United States Patent Application Publication US 2026/0337666 A1 - sequence listing, part 3

SEQ ID NO: 2867 - DNA, 2102 bp, Homo sapiens
  source 1..2102: mol_type = unassigned DNA; mol_type = unassigned DNA
gtattgggaaggcagataaaatgccaggtctggactgcctctggggataacctcaccctgtgggatgtgaatgaatagcatcttgcctggtaaatccacaggaattgataaggcaggcgcagttctcccaaacaggccttttctctttaagctgtagctgtggtttctgcagcaattttgtttttgccttgaaagaggtgctctggattatcacacctccatgtatgacaatttgtacctgcatggaattgaagactcggaggctaataatgtgatgtgttacccaagatggtgtgaacagagcttcaagccaatggagaagactaggcctaaatagctgacctggtgaagtgacacataaagccacacctggagtgccacctcctcagcagtctttctcagtgccaatgcatttatggctggttcagcggattcctacacaagcaggccgtctgactccgatgtctctttggaagaggaccgggaagcaattcgacaggagagagaacagcaagcagctatccagcttgagagagcaaagtccaaacctgtagcatttgccgtgaagacaaatgtgagctactgcggcgccctggacgaggatgtgcctgttccaagcacagctatctcctttgatgctaaagactttctacatattaaagagaaatataacaatgattggtggataggaaggctggtgaaagagggctgtgaaattggcttcattccaagtccactcagattggagaacatacggatccagcaagaacaaaaaagaggacgttttcacggagggaaatcaagtggaaattcttcttcaagtcttggagaaatggtatctgggacattccgagcaactcccacatcaacagcaaaacagaagcaaaaagtgacggagcacattcctccttacgatgttgtaccgtcaatgcgtccggtggtgttagtggggccgtcactgaaaggttacgaggtaacagacatgatgcagaaagccctctttgatttcctgaagcacaggtttgatgggaggatttcaataacgagagtgacagctgacatttctcttgctaagaggtctgtcctaaataatcccagcaagagagcaataattgaacgttcgaacacccggtccagcttagcggaagtacaaagtgaaattgaaagaatctttgagttggcaagatctttgcaactggttgttcttgatgcagacaccatcaatcacccagcacaacttataaagacttccttagcaccaattattgttcatgtaaaagtctcatctccaaaggaaatgtttgatgttatattggatgaaaatcagcttgaggatgcatgtgaacatctaggggagtacctggaggcgtactggcgtgccacccacacaaccagtagcacacccatgaccccgctgctgggaaggaatttgggctccacggcactctcaccatatcccacagcaatttctgggttacagagtcagcgaatgaggcacagcaaccactccacagagaactctccaattgaaagacgaagtctaatgacctctgatgaaaattatcacaatgaaagggctcggaagagtaggaaccgcttgtcttccagttctcagcatagccgagatcattaccctcttgtggaagaagattaccctgactcataccaggacacttacaaaccccataggaaccgaggatcacctgggggatatagccatgactcccgacataggctttgagtctaatgaaacaaaaaatattcatctgttgacaatttgccatagcagtgctaggataaaccaatcatcttaacttggctaacatagcacagtatttactgtgctaatgggctgctgtcattttatgctaagtaaggggcaaaaaaaaaaattacattatgcccttgagtctagatggatattagatgcccgatcatatagatatttttaagtgcaacatttacatgataacagtacattttgttttcttcatagatttagacacatcaatttgtaatttagggtacttacaaggcacatataaaataatttcccatgctggaaattccaaatgaccagttccagttggaaccaatttata

SEQ ID NO: 2868 - DNA, 2026 bp, Homo sapiens
  source 1..2026: mol_type = unassigned DNA; mol_type = unassigned DNA
gtctgtggttgaggaagggttttgctttttgtgctctgtattgggaaggcagataaaatgccaggtctggactgcctctggggataacctcaccctgtgggatgtgaatgaatagcatcttgcctggtaaatccacaggaattgataaggcaggcgcagttctcccaaacaggccttttctctttaagctgtagctgtggtttctgcagcaattttgtttttgccttgaaagaggtgctctggattatcacacctccatgtatgacaatttgtacctgcatggaattgaagactcggaggctgaagaataatgtgatgtgttacccaagatggtgtgaacagagcttcaagccaatggagaagactaggcctaaatagctgacctggtgaagtgacacataaagccacacctggagtgccacctcctcagcagtctttctcagtgccaatgcatttatggctggttcagcggattcctacacaagcaggccgtctgactccgatgtctctttggaagaggaccgggaagcaattcgacaggagagagaacagcaagcagctatccagcttgagagagcaaagtccaaacctgtagcatttgccgtgaagacaaatgtgagctactgcggcgccctggacgaggatgtgcctgttccaagcacagctatctcctttgatgctaaagactttctacatattaaagagaaatataacaatgattggtggataggaaggctggtgaaagagggctgtgaaattggcttcattccaagtccactcagattggagaacatacggatccagcaagaacaaaaaagaggacgttttcacggagggaaatcaagtggaaattcttcttcaagtcttggagaaatggtatctgggacattccgagcaactcccacatcaacagacggagcacattcctccttacgatgttgtaccgtcaatgcgtccggtggtgttagtggggccgtcactgaaaggttacgagcggaagtacaaagtgaaattgaaagaatctttgagttggcaagatctttgcaactggttgttcttgatgcagacaccatcaatcacccagcacaacttataaagacttccttagcaccaattattgttcatgtaaaagtctcatctccaaaggttttacagcggttgattaaatctagaggaaagtcacaaagtaaacacttgaatgttcaactggtggcagctgataaacttgcacaatgccccccagaaatgtttgatgttatattggatgaaaatcagcttgaggatgcatgtgaacatctaggggagtacctggaggcgtactggcgtgccacccacacaaccagtagcacacccatgaccccgctgctgggaaggaatttgggctccacggcactctcaccatatcccacagcaatttctgggttacagagtcagcgaatgaggcacagcaaccactccacagagaactctccaattgaaagacgaagtctaatgacctctgatgaaaattatcacaatgaaagggctcggaagagtaggaaccgcttgtcttccagttctcagcatagccgagatcattaccctcttgtggaagaagattaccctgactcataccaggacacttacaaaccccataggaaccgaggatcacctgggggatatagccatgactcccgacataggctttgagtctaatgaaacaaaaaatattcatctgttgacaatttgccatagcagtgctaggataaaccaatcatcttaacttggctaacatagcacagtatttactgtgctaatgggctgctgtcattttatgctaagtaaggggcaaaaaaaaaaattacattatgcccttgagtctagatggatattagatgcccgatcatatagatatttttaagtgcaacatttacatgataacagtacattttgttttcttcatagatttagacacatcaatttgtaatttagggtacttacaaggcacatataaaataatttcccatgctggaaattccaaatgacc

SEQ ID NO: 2869 - DNA, 1776 bp, Homo sapiens
  source 1..1776: mol_type = unassigned DNA; mol_type = unassigned DNA
ggccatgcggcggctctgaacgatgtcctcctcctcctacgccaagaacgggaccgcggacgggccgcactcccccacctcgcaggtggcccgaggcaccacaacccggaggagcaggttgaaaagatccgatggcagcaccacttcgaccagcttcatcctcagacagggttcagcggattcctacacaagcaggccgtctgactccgatgtctctttggaagaggaccgggaagcaattcgacaggagagagaacagcaagcagctatccagcttgagagagcaaagaaatataacaatgattggtggataggaaggctggtgaaagagggctgtgaaattggcttcattccaagtccactcagattggagaacatacggatccagcaagaacaaaaaagaggacgttttcacggagggaaatcaagtggaaattcttcttcaagtcttggagaaatggtatctgggacattccgagcaactcccacatcaacagcaaaacagaagcaaaaagtgacggagcacattcctccttacgatgttgtaccgtcaatgcgtccggtggtgttagtggggccgtcactgaaaggttacgaggtaacagacatgatgcagaaagccctctttgatttcctgaagcacaggtttgatgggaggatttcaataacgagagtgacagctgacatttctcttgctaagaggtctgtcctaaataatcccagcaagagagcaataattgaacgttcgaacacccggtccagcttagcggaagtacaaagtgaaattgaaagaatctttgagttggcaagatctttgcaactggttgttcttgatgcagacaccatcaatcacccagcacaacttataaagacttccttagcaccaattattgttcatgtaaaagtctcatctccaaaggttttacagcggttgattaaatctagaggaaagtcacaaagtaaacacttgaatgttcaactggtggcagctgataaacttgcacaatgccccccagaaatgtttgatgttatattggatgaaaatcagcttgaggatgcatgtgaacatctaggggagtacctggaggcgtactggcgtgccacccacacaaccagtagcacacccatgaccccgctgctgggaaggaatttgggctccacggcactctcaccatatcccacagcaatttctgggttacagagtcagcgaatgaggcacagcaaccactccacagagaactctccaattgaaagacgaagtctaatgacctctgatgaaaattatcacaatgaaagggctcggaagagtaggaaccgcttgtcttccagttctcagcatagccgagatcattaccctcttgtggaagaagattaccctgactcataccaggacacttacaaaccccataggaaccgaggatcacctgggggatatagccatgactcccgacataggctttgagtctaatgaaacaaaaaatattcatctgttgacaatttgccatagcagtgctaggataaaccaatcatcttaacttggctaacatagcacagtatttactgtgctaatgggctgctgtcattttatgctaagtaaggggcaaaaaaaaaaattacattatgcccttgagtctagatggatattagatgcccgatcatatagatatttttaagtgcaacatttacatgataacagtacattttgttttcttcatagatttagacacatcaatttgtaatttagggtacttacaaggcacatataaaataatttcc

SEQ ID NO: 2870 - DNA, 1542 bp, Homo sapiens
  source 1..1542: mol_type = unassigned DNA; mol_type = unassigned DNA
gtattgggaaggcagataaaatgccaggtctggactgcctctggggataacctcaccctgtgggatgtgaatgaatagcatcttgcctggtaaatccacaggaattgataaggcaggcgcagttctcccaaacaggccttttctctttaagctgtagctgtggtttctgcagcaattttgtttttgccttgaaagaggtgctctggattatcacacctccatgtatgacaatttgtacctgcatggaattgaagactcggaggctgaagaataatgtgatgtgttacccaagatggtgtgaacagagcttcaagccaatggagaagactaggcctaaatagctgacctggtgaagtgacacataaagccacacctggagtgccacctcctcagcagtctttctcagtgccaatgcatttatggctggttcagcggattcctacacaagcaggccgtctgactccgatgtctctttggaagaggaccgggaagcaattcgacaggagagagaacagcaagcagctatccagcttgagagagcaaagtccaaacctgtagcatttgccgtgaagacaaatgtgagctactgcggcgccctggacgaggatgtgcctgttccaagcacagctatctcctttgatgctaaagactttctacatattaaagagaaatataacaatgattggtggataggaaggctggtgaaagagggctgtgaaattggcttcattccaagtccactcagattggagaacatacggatccagcaagaacaaaaaagaggacgttttcacggagggaaatcaagtggaaattcttcttcaagtcttggagaaatggtatctgggacattccgagcaactcccacatcaacagcaaaacagaagcaaaaagtgacggagcacattcctccttacgatgttgtaccgtcaatgcgtccggtggtgttagtggggccgtcactgaaaggttacgagagtcagcgaatgaggcacagcaaccactccacagagaactctccaattgaaagacgaagtctaatgacctctgatgaaaattatcacaatgaaagggctcggaagagtaggaaccgcttgtcttccagttctcagcatagccgagatcattaccctcttgtggaagaagattaccctgactcataccaggacacttacaaaccccataggaaccgaggatcacctgggggatatagccatgactcccgacataggctttgagtctaatgaaacaaaaaatattcatctgttgacaatttgccatagcagtgctaggataaaccaatcatcttaacttggctaacatagcacagtatttactgtgctaatgggctgctgtcattttatgctaagtaaggggcaaaaaaaaaaattacattatgcccttgagtctagatggatattagatgcccgatcatatagatatttttaagtgcaacatttacatgataacagtacattttgttttcttcatagatttagacacatcaatttgtaatttagggtacttacaaggcacatataa

SEQ ID NO: 2871 - DNA, 1698 bp, Homo sapiens
  source 1..1698: mol_type = unassigned DNA; mol_type = unassigned DNA
ggcagataaaatgccaggtctggactgcctctggggataacctcaccctgtgggatgtgaatgaatagcatcttgcctggtaaatccacaggaattgataaggcaggcgcagttctcccaaacaggccttttctctttaagctgtagctgtggtttctgcagcaattttgtttttgccttgaaagaggtgctctggattatcacacctccatgtatgacaatttgtacctgcatggaattgaagactcggaggctggttcagcggattcctacacaagcaggccgtctgactccgatgtctctttggaagaggaccgggaagcaattcgacaggagagagaacagcaagcagctatccagcttgagagagcaaagtccaaacctgtagcatttgccgtgaagacaaatgtgagctactgcggcgccctggacgaggatgtgcctgttccaagcacagctatctcctttgatgctaaagactttctacatattaaagagaaatataacaatgattggtggataggaaggctggtgaaagagggctgtgaaattggcttcattccaagtccactcagattggagaacatacggatccagcaagaacaaaaaagaggacgttttcacggagggaaatcaagtggaaattcttcttcaagtcttggagaaatggtatctgggacattccgagcaactcccacatcaacagcaaaacagaagcaaaaagtgacggagcacattcctccttacgatgttgtaccgtcaatgcgtccggtggtgttagtggggccgtcactgaaaggttacgagcggaagtacaaagtgaaattgaaagaatctttgagttggcaagatctttgcaactggttgttcttgatgcagacaccatcaatcacccagcacaacttataaagacttccttagcaccaattattgttcatgtaaaagtctcatctccaaaggaaatgtttgatgttatattggatgaaaatcagcttgaggatgcatgtgaacatctaggggagtacctggaggcgtactggcgtgccacccacacaaccagtagcacacccatgaccccgctgctgggaaggaatttgggctccacggcactctcaccatatcccacagcaatttctgggttacagagtcagcgaatgaggcacagcaaccactccacagagaactctccaattgaaagacgaagtctaatgacctctgatgaaaattatcacaatgaaagggctcggaagagtaggaaccgcttgtcttccagttctcagcatagccgagatcattaccctcttgtggaagaagattaccctgactcataccaggacacttacaaaccccataggaaccgaggatcacctgggggatatagccatgactcccgacataggctttgagtctaatgaaacaaaaaatattcatctgttgacaatttgccatagcagtgctaggataaaccaatcatcttaacttggctaacatagcacagtatttactgtgctaatgggctgctgtcattttatgctaagtaaggggcaaaaaaaaaaattacattatgcccttgagtctagatggatattagatgcccgatcatatagatatttttaagtgcaacatttacatgataacagtacattttgttttcttcatagatttagacacatcaatttgtaatttagggtacttaca

SEQ ID NO: 2872 - DNA, 1772 bp, Homo sapiens
  source 1..1772: mol_type = unassigned DNA; mol_type = unassigned DNA
gggaaggcagataaaatgccaggtctggactgcctctggggataacctcaccctgtgggatgtgaatgaatagcatcttgcctggtaaatccacaggaattgataaggcaggcgcagttctcccaaacaggccttttctctttaagctgtagctgtggtttctgcagcaattttgtttttgccttgaaagaggtgctctggattatcacacctccatgtatgacaatttgtacctgcatggaattgaagactcggaggctggttcagcggattcctacacaagcaggccgtctgactccgatgtctctttggaagaggaccgggaagcaattcgacaggagagagaacagcaagcagctatccagcttgagagagcaaagtccaaacctgtagcatttgccgtgaagacaaatgtgagctactgcggcgccctggacgaggatgtgcctgttccaagcacagctatctcctttgatgctaaagactttctacatattaaagagaaatataacaatgattggtggataggaaggctggtgaaagagggctgtgaaattggcttcattccaagtccactcagattggagaacatacggatccagcaagaacaaaaaagaggacgttttcacggagggaaatcaagtggaaattcttcttcaagtcttggagaaatggtatctgggacattccgagcaactcccacatcaacagacggagcacattcctccttacgatgttgtaccgtcaatgcgtccggtggtgttagtggggccgtcactgaaaggttacgagcggaagtacaaagtgaaattgaaagaatctttgagttggcaagatctttgcaactggttgttcttgatgcagacaccatcaatcacccagcacaacttataaagacttccttagcaccaattattgttcatgtaaaagtctcatctccaaaggttttacagcggttgattaaatctagaggaaagtcacaaagtaaacacttgaatgttcaactggtggcagctgataaacttgcacaatgccccccagaaatgtttgatgttatattggatgaaaatcagcttgaggatgcatgtgaacatctaggggagtacctggaggcgtactggcgtgccacccacacaaccagtagcacacccatgaccccgctgctgggaaggaatttgggctccacggcactctcaccatatcccacagcaatttctgggttacagagtcagcgaatgaggcacagcaaccactccacagagaactctccaattgaaagacgaagtctaatgacctctgatgaaaattatcacaatgaaagggctcggaagagtaggaaccgcttgtcttccagttctcagcatagccgagatcattaccctcttgtggaagaagattaccctgactcataccaggacacttacaaaccccataggaaccgaggatcacctgggggatatagccatgactcccgacataggctttgagtctaatgaaacaaaaaatattcatctgttgacaatttgccatagcagtgctaggataaaccaatcatcttaacttggctaacatagcacagtatttactgtgctaatgggctgctgtcattttatgctaagtaaggggcaaaaaaaaaaattacattatgcccttgagtctagatggatattagatgcccgatcatatagatatttttaagtgcaacatttacatgataacagtacattttgttttcttcatagatttagacacatcaatttgtaatttagggt

SEQ ID NO: 2873 - DNA, 1756 bp, Homo sapiens
  source 1..1756: mol_type = unassigned DNA; mol_type = unassigned DNA
gtattgggaaggcagataaaatgccaggtctggactgcctctggggataacctcaccctgtgggatgtgaatgaatagcatcttgcctggtaaatccacaggaattgataaggcaggcgcagttctcccaaacaggccttttctctttaagctgtagctgtggtttctgcagcaattttgtttttgccttgaaagaggtgctctggattatcacacctccatgtatgacaatttgtacctgcatggaattgaagactcggaggctgaagaataatgtgatgtgttacccaagatggtgtgaacagagcttcaagccaatggagaagactaggcctaaatagctgacctggtgaagtgacacataaagccacacctggagtgccacctcctcagcagtctttctcagtgccaatgcatttatggctggttcagcggattcctacacaagcaggccgtctgactccgatgtctctttggaagaggaccgggaagcaattcgacaggagagagaacagcaagcagctatccagcttgagagagcaaagtccaaacctgtagcatttgccgtgaagacaaatgtgagctactgcggcgccctggacgaggatgtgcctgttccaagcacagctatctcctttgatgctaaagactttctacatattaaagagaaatataacaatgattggtggataggaaggctggtgaaagagggctgtgaaattggcttcattccaagtccactcagattggagaacatacggatccagcaagaacaaaaaagaggacgttttcacggagggaaatcaagtggaaattcttcttcaagtcttggagaaatggtatctgggacattccgagcaactcccacatcaacagcggaagtacaaagtgaaattgaaagaatctttgagttggcaagatctttgcaactggttgttcttgatgcagacaccatcaatcacccagcacaacttataaagacttccttagcaccaattattgttcatgtaaaagtctcatctccaaaggaaatgtttgatgttatattggatgaaaatcagcttgaggatgcatgtgaacatctaggggagtacctggaggcgtactggcgtgccacccacacaaccagtagcacacccatgaccccgctgctgggaaggaatttgggctccacggcactctcaccatatcccacagcaatttctgggttacagagtcagcgaatgaggcacagcaaccactccacagagaactctccaattgaaagacgaagtctaatgacctctgatgaaaattatcacaatgaaagggctcggaagagtaggaaccgcttgtcttccagttctcagcatagccgagatcattaccctcttgtggaagaagattaccctgactcataccaggacacttacaaaccccataggaaccgaggatcacctgggggatatagccatgactcccgacataggctttgagtctaatgaaacaaaaaatattcatctgttgacaatttgccatagcagtgctaggataaaccaatcatcttaacttggctaacatagcacagtatttactgtgctaatgggctgctgtcattttatgctaagtaaggggcaaaaaaaaaaattacattatgcccttgagtctagatggatattagatgcccgatcatatagatatttttaagtgcaacatttacatgataacagtacattttgttttcttcatagatttagacacatcaatttgtaattta

SEQ ID NO: 2874 - DNA, 1698 bp, Homo sapiens
  source 1..1698: mol_type = unassigned DNA; mol_type = unassigned DNA
gggttttgctttttgtgctctgtattgggaaggcagataaaatgccaggtctggactgcctctggggataacctcaccctgtgggatgtgaatgaatagcatcttgcctggtaaatccacaggaattgataaggcaggcgcagttctcccaaacaggccttttctctttaagctgtagctgtggtttctgcagcaattttgtttttgccttgaaagaggtgctctggattatcacacctccatgtatgacaatttgtacctgcatggaattgaagactcggaggctgaagaataatgtgatgtgttacccaagatggtgtgaacagagcttcaagccaatggagaagactaggcctaaatagctgacctggtgaagtgacacataaagccacacctggagtgccacctcctcagcagtctttctcagtgccaatgcatttatggctggttcagcggattcctacacaagcaggccgtctgactccgatgtctctttggaagaggaccgggaagcaattcgacaggagagagaacagcaagcagctatccagcttgagagagcaaagtccaaacctgtagcatttgccgtgaagacaaatgtgagctactgcggcgccctggacgaggatgtgcctgttccaagcacagctatctcctttgatgctaaagactttctacatattaaagagaaatataacaatgattggtggataggaaggctggtgaaagagggctgtgaaattggcttcattccaagtccactcagattggagaacatacggatccagcaagaacaaaaaagaggacgttttcacggagggaaatcaagtggaaattcttcttcaagtcttggagaaatggtatctgggacattccgagcaactcccacatcaacagcaaaacagaagcaaaaagtgacggagcacattcctccttacgatgttgtaccgtcaatgcgtccggtggtgttagtggggccgtcactgaaaggttacgaggaaatgtttgatgttatattggatgaaaatcagcttgaggatgcatgtgaacatctaggggagtacctggaggcgtactggcgtgccacccacacaaccagtagcacacccatgaccccgctgctgggaaggaatttgggctccacggcactctcaccatatcccacagcaatttctgggttacagagtcagcgaatgaggcacagcaaccactccacagagaactctccaattgaaagacgaagtctaatgacctctgatgaaaattatcacaatgaaagggctcggaagagtaggaaccgcttgtcttccagttctcagcatagccgagatcattaccctcttgtggaagaagattaccctgactcataccaggacacttacaaaccccataggaaccgaggatcacctgggggatatagccatgactcccgacataggctttgagtctaatgaaacaaaaaatattcatctgttgacaatttgccatagcagtgctaggataaaccaatcatcttaacttggctaacatagcacagtatttactgtgctaatgggctgctgtcattttatgctaagtaaggggcaaaaaaaaaaattacattatgcccttgagtctagatggatattagatgcccgatcatatagatatttttaagtgcaacatttacatgataacagtacattttgttttcttcat

SEQ ID NO: 2875 - DNA, 1731 bp, Homo sapiens
  source 1..1731: mol_type = unassigned DNA; mol_type = unassigned DNA
gtggttgaggaagggttttgctttttgtgctctgtattgggaaggcagataaaatgccaggtctggactgcctctggggataacctcaccctgtgggatgtgaatgaatagcatcttgcctggtaaatccacaggaattgataaggcaggcgcagttctcccaaacaggccttttctctttaagctgtagctgtggtttctgcagcaattttgtttttgccttgaaagaggtgctctggattatcacacctccatgtatgacaatttgtacctgcatggaattgaagactcggaggctggttcagcggattcctacacaagcaggccgtctgactccgatgtctctttggaagaggaccgggaagcaattcgacaggagagagaacagcaagcagctatccagcttgagagagcaaagtccaaacctgtagcatttgccgtgaagacaaatgtgagctactgcggcgccctggacgaggatgtgcctgttccaagcacagctatctcctttgatgctaaagactttctacatattaaagagaaatataacaatgattggtggataggaaggctggtgaaagagggctgtgaaattggcttcattccaagtccactcagattggagaacatacggatccagcaagaacaaaaaagaggacgttttcacggagggaaatcaagtggaaattcttcttcaagtcttggagaaatggtatctgggacattccgagcaactcccacatcaacagcaaaacagaagcaaaaagtgacggagcacattcctccttacgatgttgtaccgtcaatgcgtccggtggtgttagtggggccgtcactgaaaggttacgagcggaagtacaaagtgaaattgaaagaatctttgagttggcaagatctttgcaactggttgttcttgatgcagacaccatcaatcacccagcacaacttataaagacttccttagcaccaattattgttcatgtaaaagtctcatctccaaaggttttacagcggttgattaaatctagaggaaagtcacaaagtaaacacttgaatgttcaactggtggcagctgataaacttgcacaatgccccccagaaatgtttgatgttatattggatgaaaatcagcttgaggatgcatgtgaacatctaggggagtacctggaggcgtactggcgtgccacccacacaaccagtagcacacccatgaccccgctgctgggaaggaatttgggctccacggcactctcaccatatcccacagcaatttctgggttacagagtcagcgaatgaggcacagcaaccactccacagagaactctccaattgaaagacgaagtctaatgacctctgatgaaaattatcacaatgaaagggctcggaagagtaggaaccgcttgtcttccagttctcagcatagccgagatcattaccctcttgtggaagaagattaccctgactcataccaggacacttacaaaccccataggaaccgaggatcacctgggggatatagccatgactcccgacataggctttgagtctaatgaaacaaaaaatattcatctgttgacaatttgccatagcagtgctaggataaaccaatcatcttaacttggctaacatagcacagtatttactgtgctaatgggctgctgtcattttatgctaagtaaggggcaaaaaaaaaaattacattatgcccttgagtctagatggatattaga

SEQ ID NO: 2876 - DNA, 1751 bp, Homo sapiens
  source 1..1751: mol_type = unassigned DNA; mol_type = unassigned DNA
gtattgggaaggcagataaaatgccaggtctggactgcctctggggataacctcaccctgtgggatgtgaatgaatagcatcttgcctggtaaatccacaggaattgataaggcaggcgcagttctcccaaacaggccttttctctttaagctgtagctgtggtttctgcagcaattttgtttttgccttgaaagaggtgctctggattatcacacctccatgtatgacaatttgtacctgcatggaattgaagactcggaggctggttcagcggattcctacacaagcaggccgtctgactccgatgtctctttggaagaggaccgggaagcaattcgacaggagagagaacagcaagcagctatccagcttgagagagcaaagtccaaacctgtagcatttgccgtgaagacaaatgtgagctactgcggcgccctggacgaggatgtgcctgttccaagcacagctatctcctttgatgctaaagactttctacatattaaagagaaatataacaatgattggtggataggaaggctggtgaaagagggctgtgaaattggcttcattccaagtccactcagattggagaacatacggatccagcaagaacaaaaaagaggacgttttcacggagggaaatcaagtggaaattcttcttcaagtcttggagaaatggtatctgggacattccgagcaactcccacatcaacagcaaaacagaagcaaaaagtgacggagcacattcctccttacgatgttgtaccgtcaatgcgtccggtggtgttagtggggccgtcactgaaaggttacgaggatttcaataacgagagtgacagctgacatttctcttgctaagaggtctgtcctaaataatcccagcaagagagcaataattgaacgttcgaacacccggtccagcttagcggaagtacaaagtgaaattgaaagaatctttgagttggcaagatctttgcaactggttgttcttgatgcagacaccatcaatcacccagcacaacttataaagacttccttagcaccaattattgttcatgtaaaagtctcatctccaaaggttttacagcggttgattaaatctagaggaaagtcacaaagtaaacacttgaatgttcaactggtggcagctgataaacttgcacaatgccccccagaaatgtttgatgttatattggatgaaaatcagcttgaggatgcatgtgaacatctaggggagtacctggaggcgtactggcgtgccacccacacaaccagtagcacacccatgaccccgctgctgggaaggaatttgggctccacggcactctcaccatatcccacagcaatttctgggttacagagtcagcgaatgaggcacagcaaccactccacagagaactctccaattgaaagacgaagtctaatgacctctgatgaaaattatcacaatgaaagggctcggaagagtaggaaccgcttgtcttccagttctcagcatagccgagatcattaccctcttgtggaagaagattaccctgactcataccaggacacttacaaaccccataggaaccgaggatcacctgggggatatagccatgactcccgacataggctttgagtctaatgaaacaaaaaatattcatctgttgacaatttgccatagcagtgctaggataaaccaatcatcttaacttggctaacatagcacagtatttactgtgctaatgggctgctgtcattttatgct

SEQ ID NO: 2877 - DNA, 2444 bp, Homo sapiens
  source 1..2444: mol_type = unassigned DNA; mol_type = unassigned DNA
aggtctggactgcctctggggataacctcaccctgtgggatgtgaatgaatagcatcttgcctggtaaatccacaggaattgataaggcaggcgcagttctcccaaacaggccttttctctttaagctgtagctgtggtttctgcagcaattttgtttttgccttgaaagaggtgctctggattatcacacctccatgtatgacaatttgtacctgcatggaattgaagactcggaggctgaagaataatgtgatgtgttacccaagatggtgtgaacagagcttcaagccaatggagaagactaggcctaaatagctgacctggtgaagtgacacataaagccacacctggagtgccacctcctcagcagtctttctcagtgccaatgcatttatggctggttcagcggattcctacacaagcaggccgtctgactccgatgtctctttggaagaggaccgggaagcaattcgacaggagagagaacagcaagcagctatccagcttgagagagcaaagtccaaacctgtagcatttgccgtgaagacaaatgtgagctactgcggcgccctggacgaggatgtgcctgttccaagcacagctatctcctttgatgctaaagactttctacatattaaagagaaatataacaatgattggtggataggaaggctggtgaaagagggctgtgaaattggcttcattccaagtccactcagattggagaacatacggatccagcaagaacaaaaaagaggacgttttcacggagggaaatcaagtggaaattcttcttcaagtcttggagaaatggtatctgggacattccgagcaactcccacatcaacagcaaaacagaagcaaaaagtgacggagcacattcctccttacgatgttgtaccgtcaatgcgtccggtggtgttagtggggccgtcactgaaaggttacgagagttggaaatgtcagagggatgagcaggagagtggtctacaaaaatccagccatgggcatggagaatttccgccaacatacacaaactagcaggaaggctgagtccagtgctggcctcagttctctagctgctcctcactggaggcaggcacaactcaggcgtgccaaggatacccggcacctgtgtacaaagccagcctgttgtctcctggcagcagttctatcccctaacgagggaagagggaagagggaagagggtctggtgaacactgctggtttattcctcaacaccctggaggagaaccaaggggggtggaaattagcaattgcacatggttaagcatgaaaaacaccttccatggtaacctccccctaggagacgaatggctacaataaggtcttggctcatagtacccttccctccctcctctctcccttttgacttctctctctctctctgcatgtgtttgcctcattctttttttctcacctctgcaaaggtaacagacatgatgcagaaagccctctttgatttcctgaagcacaggtttgatgggaggatttcaataacgagagtgacagctgacatttctcttgctaagaggtctgtcctaaataatcccagcaagagagcaataattgaacgttcgaacacccggtccagcttagcggaagtacaaagtgaaattgaaagaatctttgagttggcaagatctttgcaactggttgttcttgatgcagacaccatcaatcacccagcacaacttataaagacttccttagcaccaattattgttcatgtaaaagtctcatctccaaaggttttacagcggttgattaaatctagaggaaagtcacaaagtaaacacttgaatgttcaactggtggcagctgataaacttgcacaatgccccccagaaatgtttgatgttatattggatgaaaatcagcttgaggatgcatgtgaacatctaggggagtacctggaggcgtactggcgtgccacccacacaaccagtagcacacccatgaccccgctgctgggaaggaatttgggctccacggcactctcaccatatcccacagcaatttctgggttacagagtcagcgaatgaggcacagcaaccactccacagagaactctccaattgaaagacgaagtctaatgacctctgatgaaaattatcacaatgaaagggctcggaagagtaggaaccgcttgtcttccagttctcagcatagccgagatcattaccctcttgtggaagaagattaccctgactcataccaggacacttacaaaccccataggaaccgaggatcacctgggggatatagccatgactcccgacataggctttgagtctaatgaaacaaaaaatattcatctgttgacaatttgccatagcagtgctaggataaaccaatcatcttaacttggctaacatagcacagtatttactgtgctaatgggctgctgtcattttatgc

SEQ ID NO: 2878 - DNA, 3754 bp, Homo sapiens
  source 1..3754: mol_type = unassigned DNA; mol_type = unassigned DNA
gtattgggaaggcagataaaatgccaggtctggactgcctctggggataacctcaccctgtgggatgtgaatgaatagcatcttgcctggtaaatccacaggaattgataaggcaggcgcagttctcccaaacaggccttttctctttaagctgtagctgtggtttctgcagcaattttgtttttgccttgaaagaggtgctctggattatcacacctccatgtatgacaatttgtacctgcatggaattgaagactcggaggctgaagaataatgtgatgtgttacccaagatggtgtgaacagagcttcaagccaatggagaagactaggcctaaatagctgacctggtgaagtgacacataaagccacacctggagtgccacctcctcagcagtctttctcagtgccaatgcatttatggctggttcagcggattcctacacaagcaggccgtctgactccgatgtctctttggaagaggaccgggaagcaattcgacaggagagagaacagcaagcagctatccagcttgagagagcaaagtccaaacctgtagcatttgccgtgaagacaaatgtgagctactgcggcgccctggacgaggatgtgcctgttccaagcacagctatctcctttgatgctaaagactttctacatattaaagagaaatataacaatgattggtggataggaaggctggtgaaagagggctgtgaaattggcttcattccaagtccactcagattggagaacatacggatccagcaagaacaaaaaagaggacgttttcacggagggaaatcaagtggaaattcttcttcaagtcttggagaaatggtatctgggacattccgagcaactcccacatcaacaggtgagggttgtagttaaactctttttcatacactgtattccttttaaaaatatttgaacacacatgcaagtagttttgctaatttggaaacaatttgaaggcttaatttaaagattctctaattaatatttcatttctcatttgttttctatggtaatttgatttcatttaaaatggtattaaaaattcatgtcattagaatataattttgaaaaatcttatttacccctcagtgttaataactgtccattgtgtaaattgatattcaaaaaattcattattttacctaaggaacggacagagtttaagatggtgaaggccaataaaaaaaggaaaaaaatgatgcagactctcaagaaaatgctgttttcagtctccatgtggaatttcaggatgtattagtacagcccgagctggaagggttgaagcagagagtaaggcagggcccaaaggagggagggcctcgtttacatttggacagcagacagccaagccctggaattaatggtaatgaagagatattggtggcctaatagggaattgtggtacatttggaaacgatggagttattcatgtaggaatttttcttctaccacattccctgattcctatcggctaatttcattctggcctagaactgctgttgcattagggcatccagtgtcctagttaccaattccaattgtattaccaatttggaatggcaagtccaaggccctattctggcctaccaaaactggaggcaactggattggttctggagtggttctaagtgtctgggtccttgttcatgtgaagccctcttatctacaggacactgaaccaaaccaggtttctgagttgtacccaactagactggagctgcttggatgtccacagaatcgctttaaatcagttattgagtatattttgcttcgttcccatttgttggacattcaggacattgaacactttagctattacaaacaggaaagaacaggaataactcattataaatttatctgaggaataactggttataaatgtatttgaaatttagaagcaagatagtaggaaaaatgtgccaatattctagaaaatgggcaaaaatgcccaagggactgcagaattatgagttaacaaatataaaaataactattgattgaggtgatagtcatttttgcccaagtggttattctgtttccttttatgaaattgcatttgtctaccttgttcccagcaacactgtgctgtgtccagcacgggaacaacccatggtgattggctggcccggaacttccagtgttgctctcaactcctgtacccaattcccacccagtgagaaatcaggatataaggtcatttgtaccagggaggaagctgtctgtttttcatacatcttcaaaattgacgtgtccagaatgaaatcataaggcaggttctccaaagtgggcgataggaaggtggtgaagataattacagggacaaatgggtacattcttccatcttttaaactcatgtactgtcatttgcagagtttacatattttgatatggctctcgttattgtcttttagcaaaacagaagcaaaaagtggtaagttgtgtttcctttttaaatctactgttaaggttcctatatatacatgcctgcaatgctccatttcagtgacccaagtggctataaaataagggaagagcctcctcggtggggactttgataatcatttgtcgttcaacctgagaattatgaaattatgaatgttgtggctgtggagaggcatgctcaacctcaccttgtcacgcgtgtcgaatcatctttttcagacggagcacattcctccttacgatgttgtaccgtcaatgcgtccggtggtgttagtggggccgtcactgaaaggttacgaggtaacagacatgatgcagaaagccctctttgatttcctgaagcacaggtttgatgggaggatttcaataacgagagtgacagctgacatttctcttgctaagaggtctgtcctaaataatcccagcaagagagcaataattgaacgttcgaacacccggtccagcttagcggaagtacaaagtgaaattgaaagaatctttgagttggcaagatctttgcaactggttgttcttgatgcagacaccatcaatcacccagcacaacttataaagacttccttagcaccaattattgttcatgtaaaagtctcatctccaaaggttttacagcggttgattaaatctagaggaaagtcacaaagtaaacacttgaatgttcaactggtggcagctgataaacttgcacaatgccccccagaaatgtttgatgttatattggatgaaaatcagcttgaggatgcatgtgaacatctaggggagtacctggaggcgtactggcgtgccacccacacaaccagtagcacacccatgaccccgctgctgggaaggaatttgggctccacggcactctcaccatatcccacagcaatttctgggttacagagtcagcgaatgaggcacagcaaccactccacagagaactctccaattgaaagacgaagtctaatgacctctgatgaaaattatcacaatgaaagggctcggaagagtaggaaccgcttgtcttccagttctcagcatagccgagatcattaccctcttgtggaagaagattaccctgactcataccaggacacttacaaaccccataggaaccgaggatcacctgggggatatagccatgactcccgacataggctttgagtctaatgaaacaaaaaatattcatctgttgacaatttgccatagcagtgctaggataaaccaatcatcttaacttggctaacatagcacagtatttactgtgctaatgggctgctgtcattttatgc

SEQ ID NO: 2879 - DNA, 3104 bp, Homo sapiens
  source 1..3104: mol_type = unassigned DNA; mol_type = unassigned DNA
gtattgggaaggcagataaaatgccaggtctggactgcctctggggataacctcaccctgtgggatgtgaatgaatagcatcttgcctggtaaatccacaggaattgataaggcaggcgcagttctcccaaacaggccttttctctttaagctgtagctgtggtttctgcagcaattttgtttttgccttgaaagaggtgctctggattatcacacctccatgtatgacaatttgtacctgcatggaattgaagactcggaggctggttcagcggattcctacacaagcaggccgtctgactccgatgtctctttggaagaggaccgggaagcaattcgacaggagagagaacagcaagcagctatccagcttgagagagcaaagtccaaacctgtagcatttgccgtgaagacaaatgtgagctactgcggcgccctggacgaggatgtgcctgttccaagcacagctatctcctttgatgctaaagactttctacatattaaagagaaatataacaatgattggtggataggaaggctggtgaaagagggctgtgaaattggcttcattccaagtccactcagattggagaacatacggatccagcaagaacaaaaaagaggacgttttcacggagggaaatcaagtggaaattcttcttcaagtcttggagaaatggtatctgggacattccgagcaactcccacatcaacagcaaaacagaagcaaaaagtgacggagcacattcctccttacgatgttgtaccgtcaatgcgtccggtggtgttagtggggccgtcactgaaaggttacgaggtacaaatatcatctgttactcttcagttcttgatcgagcacccaggagacagtcatgttgacgcttgctcctcaagggtctgtttccacgtgggtcctgatggaagccagtgctcagcatgggaaggcagggggtaccgtgtggggctcatgaggccctctgccctttctttcctctcttgcacacttctcatcttttatgtattacattgtttagaaatacctccctcaaaatattcacaatgggaagatctggtcaaagatttgctgtacattaaatgcaaagaaaaggactttatctgtcttgaccattctcattattattagaagtaatagagaatgaacagcacaagaggacaaacaatcaatcttccagcaaacccaaacctttaaagcccaaacagagttcaccctgctgggtttttaagatgatggcatatgccaccaaatccttctctgcttatttattttaaagggcacatgttttaaaagaccactaaaaacattagtgaactttggagattaaacaaaaccatgtgacaaggaaaagagtagagacttcgtttcagatgtttgttttgactttgtgctagcttggattaaaaaataggtagaacgtgacattaaactctgaaggtgagcagcctccagggcaccattcccatcgagctaggacaatgtgtggcacatagtaggcactcagtacacatttgctgaatgaattaatgaatcgctttcaggcagatctaagaatcctggctctatccccctctctttctctcttgtctttctcagagttggaaatgtcagagggatgagcaggagagtggtctacaaaaatccagccatgggcatggagaatttccgccaacatacacaaactagcaggaaggctgagtccagtgctggcctcagttctctagctgctcctcactggaggcaggcacaactcaggcgtgccaaggatacccggcacctgtgtacaaagccagcctgttgtctcctggcagcagttctatcccctaacgagggaagagggaagagggaagagggtctggtgaacactgctggtttattcctcaacaccctggaggagaaccaaggggggtggaaattagcaattgcacatggttaagcatgaaaaacaccttccatggtaacctccccctaggagacgaatggctacaataaggtcttggctcatagtacccttccctccctcctctctcccttttgacttctctctctctctctgcatgtgtttgcctcattctttttttctcacctctgcaaaggtaacagacatgatgcagaaagccctctttgatttcctgaagcacaggtttgatgggaggatttcaataacgagagtgacagctgacatttctcttgctaagaggtctgtcctaaataatcccagcaagagagcaataattgaacgttcgaacacccggtccagcttagcggaagtacaaagtgaaattgaaagaatctttgagttggcaagatctttgcaactggttgttcttgatgcagacaccatcaatcacccagcacaacttataaagacttccttagcaccaattattgttcatgtaaaagtctcatctccaaaggttttacagcggttgattaaatctagaggaaagtcacaaagtaaacacttgaatgttcaactggtggcagctgataaacttgcacaatgccccccagaaatgtttgatgttatattggatgaaaatcagcttgaggatgcatgtgaacatctaggggagtacctggaggcgtactggcgtgccacccacacaaccagtagcacacccatgaccccgctgctgggaaggaatttgggctccacggcactctcaccatatcccacagcaatttctgggttacagagtcagcgaatgaggcacagcaaccactccacagagaactctccaattgaaagacgaagtctaatgacctctgatgaaaattatcacaatgaaagggctcggaagagtaggaaccgcttgtcttccagttctcagcatagccgagatcattaccctcttgtggaagaagattaccctgactcataccaggacacttacaaaccccataggaaccgaggatcacctgggggatatagccatgactcccgacataggctttgagtctaatgaaacaaaaaatattcatctgttgacaatttgccatagcagtgctaggataaaccaatcatcttaacttggctaacatagcacagtatttactgtgctaatgggctgctgtcattttatgc

SEQ ID NO: 2880 - DNA, 1885 bp, Homo sapiens
  source 1..1885: mol_type = unassigned DNA; mol_type = unassigned DNA
actctccgagggaacgctcttcagctgactgaagcagggaagccgagccaatcagaggccgctttcctagctcagtcaccagtctgtggttgaggaagggttttgctttttgtgctctgtattgggaaggcagataaaatgccaggtctggactgcctctggggataacctcaccctgtgggatgtgaatgaatagcatcttgcctggtaaatccacaggaattgataaggcaggcgcagttctcccaaacaggccttttctctttaagctgtagctgtggtttctgcagcaattttgtttttgccttgaaagaggtgctctggattatcacacctccatgtatgacaatttgtacctgcatggaattgaagactcggaggctggttcagcggattcctacacaagcaggccgtctgactccgatgtctctttggaagaggaccgggaagcaattcgacaggagagagaacagcaagcagctatccagcttgagagagcaaagtccaaacctgtagcatttgccgtgaagacaaatgtgagctactgcggcgccctggacgaggatgtgcctgttccaagcacagctatctcctttgatgctaaagactttctacatattaaagagaaatataacaatgattggtggataggaaggctggtgaaagagggctgtgaaattggcttcattccaagtccactcagattggagaacatacggatccagcaagaacaaaaaagaggacgttttcacggagggaaatcaagtggaaattcttcttcaagtcttggagaaatggtatctgggacattccgagcaactcccacatcaacagcaaaacagaagcaaaaagtgacggagcacattcctccttacgatgttgtaccgtcaatgcgtccggtggtgttagtggggccgtcactgaaaggttacgagcacaggtttgatgggaggatttcaataacgagagtgacagctgacatttctcttgctaagaggtctgtcctaaataatcccagcaagagagcaataattgaacgttcgaacacccggtccagcttagcggaagtacaaagtgaaattgaaagaatctttgagttggcaagatctttgcaactggttgttcttgatgcagacaccatcaatcacccagcacaacttataaagacttccttagcaccaattattgttcatgtaaaagtctcatctccaaaggttttacagcggttgattaaatctagaggaaagtcacaaagtaaacacttgaatgttcaactggtggcagctgataaacttgcacaatgccccccagaaatgtttgatgttatattggatgaaaatcagcttgaggatgcatgtgaacatctaggggagtacctggaggcgtactggcgtgccacccacacaaccagtagcacacccatgaccccgctgctgggaaggaatttgggctccacggcactctcaccatatcccacagcaatttctgggttacagagtcagcgaatgaggcacagcaaccactccacagagaactctccaattgaaagacgaagtctaatgacctctgatgaaaattatcacaatgaaagggctcggaagagtaggaaccgcttgtcttccagttctcagcatagccgagatcattaccctcttgtggaagaagattaccctgactcataccaggacacttacaaaccccataggaaccgaggatcacctgggggatatagccatgactcccgacataggctttgagtctaatgaaacaaaaaatattcatctgttgacaatttgccatagcagtgctaggataaaccaatcatcttaacttggctaacatagcacagtatttactgtgctaatgggctgctgtcattttatgc

SEQ ID NO: 2881 - DNA, 1880 bp, Homo sapiens
  source 1..1880: mol_type = unassigned DNA; mol_type = unassigned DNA
gtagctgtggtttctgcagcaattttgtttttgccttgaaagaggtgctctggattatcacacctccatgtatgacaatttgtacctgcatggaattgaagactcggaggctgaagaataatgtgatgtgttacccaagatggtgtgaacagagcttcaagccaatggagaagactaggcctaaatagctgacctggtgaagtgacacataaagccacacctggagtgccacctcctcagcagtctttctcagtgccaatgcatttatggctcctgagcatcatataggaaaaagattctgaccttctacgttattactctattggcagctttgttgaaaagtttgggttcagcggattcctacacaagcaggccgtctgactccgatgtctctttggaagaggaccgggaagcaattcgacaggagagagaacagcaagcagctatccagcttgagagagcaaagtccaaacctgtagcatttgccgtgaagacaaatgtgagctactgcggcgccctggacgaggatgtgcctgttccaagcacagctatctcctttgatgctaaagactttctacatattaaagagaaatataacaatgattggtggataggaaggctggtgaaagagggctgtgaaattggcttcattccaagtccactcagattggagaacatacggatccagcaagaacaaaaaagaggacgttttcacggagggaaatcaagtggaaattcttcttcaagtcttggagaaatggtatctgggacattccgagcaactcccacatcaacagcaaaacagaagcaaaaagtgacggagcacattcctccttacgatgttgtaccgtcaatgcgtccggtggtgttagtggggccgtcactgaaaggttacgaggtaacagacatgatgcagaaagccctctttgatttcctgaagcacaggtttgatgggaggatttcaataacgagagtgacagctgacatttctcttgctaagaggtctgtcctaaataatcccagcaagagagcaataattgaacgttcgaacacccggtccagcttagcggaagtacaaagtgaaattgaaagaatctttgagttggcaagatctttgcaactggttgttcttgatgcagacaccatcaatcacccagcacaacttataaagacttccttagcaccaattattgttcatgtaaaagtctcatctccaaaggttttacagcggttgattaaatctagaggaaagtcacaaagtaaacacttgaatgttcaactggtggcagctgataaacttgcacaatgccccccagaaatgtttgatgttatattggatgaaaatcagcttgaggatgcatgtgaacatctaggggagtacctggaggcgtactggcgtgccacccacacaaccagtagcacacccatgaccccgctgctgggaaggaatttgggctccacggcactctcaccatatcccacagcaatttctgggttacagagtcagcgaatgaggcacagcaaccactccacagagaactctccaattgaaagacgaagtctaatgacctctgatgaaaattatcacaatgaaagggctcggaagagtaggaaccgcttgtcttccagttctcagcatagccgagatcattaccctcttgtggaagaagattaccctgactcataccaggacacttacaaaccccataggaaccgaggatcacctgggggatatagccatgactcccgacataggctttgagtctaatgaaacaaaaaatattcatctgttgacaatttgccatagcagtgctaggataaaccaatcatcttaacttggctaacatagcacagtatttactgtgctaatgggctgctgt

SEQ ID NO: 2882 - DNA, 1646 bp, Homo sapiens
  source 1..1646: mol_type = unassigned DNA; mol_type = unassigned DNA
gtgctctgtattgggaaggcagataaaatgccaggtctggactgcctctggggataacctcaccctgtgggatgtgaatgaatagcatcttgcctggtaaatccacaggaattgataaggcaggcgcagttctcccaaacaggccttttctctttaagctgtagctgtggtttctgcagcaattttgtttttgccttgaaagaggtgctctggattatcacacctccatgtatgacaatttgtacctgcatggaattgaagactcggaggctggttcagcggattcctacacaagcaggccgtctgactccgatgtctctttggaagaggaccgggaagcaattcgacaggagagagaacagcaagcagctatccagcttgagagagcaaagtccaaacctgtagcatttgccgtgaagacaaatgtgagctactgcggcgccctggacgaggatgtgcctgttccaagcacagctatctcctttgatgctaaagactttctacatattaaagagaaatataacaatgattggtggataggaaggctggtgaaagagggctgtgaaattggcttcattccaagtccactcagattggagaacatacggatccagcaagaacaaaaaagaggacgttttcacggagggaaatcaagtggaaattcttcttcaagtcttggagaaatggtatctgggacattccgagcaactcccacatcaacaggatttcaataacgagagtgacagctgacatttctcttgctaagaggtctgtcctaaataatcccagcaagagagcaataattgaacgttcgaacacccggtccagcttagcggaagtacaaagtgaaattgaaagaatctttgagttggcaagatctttgcaactggttgttcttgatgcagacaccatcaatcacccagcacaacttataaagacttccttagcaccaattattgttcatgtaaaagtctcatctccaaaggttttacagcggttgattaaatctagaggaaagtcacaaagtaaacacttgaatgttcaactggtggcagctgataaacttgcacaatgccccccagaaatgtttgatgttatattggatgaaaatcagcttgaggatgcatgtgaacatctaggggagtacctggaggcgtactggcgtgccacccacacaaccagtagcacacccatgaccccgctgctgggaaggaatttgggctccacggcactctcaccatatcccacagcaatttctgggttacagagtcagcgaatgaggcacagcaaccactccacagagaactctccaattgaaagacgaagtctaatgacctctgatgaaaattatcacaatgaaagggctcggaagagtaggaaccgcttgtcttccagttctcagcatagccgagatcattaccctcttgtggaagaagattaccctgactcataccaggacacttacaaaccccataggaaccgaggatcacctgggggatatagccatgactcccgacataggctttgagtctaatgaaacaaaaaatattcatctgttgacaatttgccatagcagtgctaggataaaccaatcatcttaacttggctaacatagcacagtatttactgtgctaatgggctgctgt

SEQ ID NO: 2883 - DNA, 1430 bp, Homo sapiens
  source 1..1430: mol_type = unassigned DNA; mol_type = unassigned DNA
gaactgactctgaatgctcatttgagtttatttgtttttataaggaagaataatgtgatgtgttacccaagatggtgtgaacagagcttcaagccaatggagaagactaggcctaaatagctgacctggtgaagtgacacataaagccacacctggagtgccacctcctcagcagtctttctcagtgccaatgcatttatggctcctgagcatcatataggaaaaagattctgaccttctacgttattactctattggcagctttgttgaaaagtttgggttcagcggattcctacacaagcaggccgtctgactccgatgtctctttggaagaggaccgggaagcaattcgacaggagagagaacagcaagcagctatccagcttgagagagcaaagtccaaacctgtagcatttgccgtgaagacaaatgtgagctactgcggcgccctggacgaggatgtgcctgttccaagcacagctatctcctttgatgctaaagactttctacatattaaagagaaatataacaatgattggtggataggaaggctggtgaaagagggctgtgaaattggcttcattccaagtccactcagattggagaacatacggatccagcaagaacaaaaaagaggacgttttcacggagggaaatcaagtggaaattcttcttcaagtcttggagaaatggtatctgggacattccgagcaactcccacatcaacagcaaaacagaagcaaaaagtgacggagcacattcctccttacgatgttgtaccgtcaatgcgtccggtggtgttagtggggccgtcactgaaaggttacgagcggaagtacaaagtgaaattgaaagaatctttgagttggcaagatctttgcaactggttgttcttgatgcagacaccatcaatcacccagcacaacttataaagacttccttagcaccaattattgttcatgtaaaagtctcatctccaaaggttttacagcggttgattaaatctagaggaaagtcacaaagtaaacacttgaatgttcaactggtggcagctgataaacttgcacaatgccccccaagtcagcgaatgaggcacagcaaccactccacagagaactctccaattgaaagacgaagtctaatgacctctgatgaaaattatcacaatgaaagggctcggaagagtaggaaccgcttgtcttccagttctcagcatagccgagatcattaccctcttgtggaagaagattaccctgactcataccaggacacttacaaaccccataggaaccgaggatcacctgggggatatagccatgactcccgacataggctttgagtctaatgaaacaaaaaatattcatctgttgacaatttgccatagcagtgctaggataaaccaatcatcttaacttggctaacatagcaca

SEQ ID NO: 2884 - DNA, 858 bp, Homo sapiens
  source 1..858: mol_type = unassigned DNA; mol_type = unassigned DNA
ttgatgctaaagactttctacatattaaagagaaatataacaatgattggtggataggaaggctggtgaaagagggctgtgaaattggcttcattccaagtccactcagattggagaacatacggatccagcaagaacaaaaaagaggacgttttcacggagggaaatcaagtggaaattcttcttcaagtcttggagaaatggtatctgggacattccgagcaactcccacatcaacagacggagcacattcctccttacgatgttgtaccgtcaatgcgtccggtggtgttagtggggccgtcactgaaaggttacgaggaaatgtttgatgttatattggatgaaaatcagcttgaggatgcatgtgaacatctaggggagtacctggaggcgtactggcgtgccacccacacaaccagtagcacacccatgaccccgctgctgggaaggaatttgggctccacggcactctcaccatatcccacagcaatttctgggttacagagtcagcgaatgaggcacagcaaccactccacagagaactctccaattgaaagacgaagtctaatgacctctgatgaaaattatcacaatgaaagggctcggaagagtaggaaccgcttgtcttccagttctcagcatagccgagatcattaccctcttgtggaagaagattaccctgactcataccaggacacttacaaaccccataggaaccgaggatcacctgggggatatagccatgactcccgacataggctttgagtctaatgaaacaaaaaatattcatctgttgacaatttgccatagcagtgctaggataaaccaatcatcttaacttggctaacatagcac

SEQ ID NO: 2885 - DNA, 1831 bp, Homo sapiens
  source 1..1831: mol_type = unassigned DNA; mol_type = unassigned DNA
agtagttgatggcgggtagtgctaggtactgcagtgctgtactcctggtgactcagtggtggccagcaggctgagatcctccgggctgtgcacatctgtggaggaagaataatgtgatgtgttacccaagatggtgtgaacagagcttcaagccaatggagaagactaggcctaaatagctgacctggtgaagtgacacataaagccacacctggagtgccacctcctcagcagtctttctcagtgccaatgcatttatggctggttcagcggattcctacacaagcaggccgtctgactccgatgtctctttggaagaggaccgggaagcaattcgacaggagagagaacagcaagcagctatccagcttgagagagcaaagtccaaacctgtagcatttgccgtgaagacaaatgtgagctactgcggcgccctggacgaggatgtgcctgttccaagcacagctatctcctttgatgctaaagactttctacatattaaagagaaatataacaatgattggtggataggaaggctggtgaaagagggctgtgaaattggcttcattccaagtccactcagattggagaacatacggatccagcaagaacaaaaaagaggacgttttcacggagggaaatcaagtggaaattcttcttcaagtcttggagaaatggtatctgggacattccgagcaactcccacatcaacagcaaaacagaagcaaaaagtgacggagcacattcctccttacgatgttgtaccgtcaatgcgtccggtggtgttagtggggccgtcactgaaaggttacgaggtaacagacatgatgcagaaagccctctttgatttcctgaagcacaggtttgatgggaggatttcaataacgagagtgacagctgacatttctcttgctaagaggtctgtcctaaataatcccagcaagagagcaataattgaacgttcgaacacccggtccagcttagcggaagtacaaagtgaaattgaaagaatctttgagttggcaagatctttgcaactggttgttcttgatgcagacaccatcaatcacccagcacaacttataaagacttccttagcaccaattattgttcatgtaaaagtctcatctccaaaggttttacagcggttgattaaatctagaggaaagtcacaaagtaaacacttgaatgttcaactggtggcagctgataaacttgcacaatgccccccagaaatgtttgatgttatattggatgaaaatcagcttgaggatgcatgtgaacatctaggggagtacctggaggcgtactggcgtgccacccacacaaccagtagcacacccatgaccccgctgctgggaaggaatttgggctccacggcactctcaccatatcccacagcaatttctgggttacagagaaaactacccagagactgacaatttcctgagaattatgctgtctgtgaatttacagtggattttacttagagtcagcgaatgaggcacagcaaccactccacagagaactctccaattgaaagacgaagtctaatgacctctgatgaaaattatcacaatgaaagggctcggaagagtaggaaccgcttgtcttccagttctcagcatagccgagatcattaccctcttgtggaagaagattaccctgactcataccaggacacttacaaaccccataggaaccgaggatcacctgggggatatagccatgactcccgacataggctttgagtctaatgaaacaaaaaatattcatctgttgacaatttgccatagcagtgctaggataaaccaatcatcttaacttggct

SEQ ID NO: 2886 - DNA, 2955 bp, Homo sapiens
  source 1..2955: mol_type = unassigned DNA; mol_type = unassigned DNA
gtattgggaaggcagataaaatgccaggtctggactgcctctggggataacctcaccctgtgggatgtgaatgaatagcatcttgcctggtaaatccacaggaattgataaggcaggcgcagttctcccaaacaggccttttctctttaagctgtagctgtggtttctgcagcaattttgtttttgccttgaaagaggtgctctggattatcacacctccatgtatgacaatttgtacctgcatggaattgaagactcggaggctggttcagcggattcctacacaagcaggccgtctgactccgatgtctctttggaagaggaccgggaagcaattcgacaggagagagaacagcaagcagctatccagcttgagagagcaaagtccaaacctgtagcatttgccgtgaagacaaatgtgagctactgcggcgccctggacgaggatgtgcctgttccaagcacagctatctcctttgatgctaaagactttctacatattaaagagaaatataacaatgattggtggataggaaggctggtgaaagagggctgtgaaattggcttcattccaagtccactcagattggagaacatacggatccagcaagaacaaaaaagaggacgttttcacggagggaaatcaagtggaaattcttcttcaagtcttggagaaatggtatctgggacattccgagcaactcccacatcaacagcaaaacagaagcaaaaagtgacggagcacattcctccttacgatgttgtaccgtcaatgcgtccggtggtgttagtggggccgtcactgaaaggttacgaggtacaaatatcatctgttactcttcagttcttgatcgagcacccaggagacagtcatgttgacgcttgctcctcaagggtctgtttccacgtgggtcctgatggaagccagtgctcagcatgggaaggcagggggtaccgtgtggggctcatgaggccctctgccctttctttcctctcttgcacacttctcatcttttatgtattacattgtttagaaatacctccctcaaaatattcacaatgggaagatctggtcaaagatttgctgtacattaaatgcaaagaaaaggactttatctgtcttgaccattctcattattattagaagtaatagagaatgaacagcacaagaggacaaacaatcaatcttccagcaaacccaaacctttaaagcccaaacagagttcaccctgctgggtttttaagatgatggcatatgccaccaaatccttctctgcttatttattttaaagggcacatgttttaaaagaccactaaaaacattagtgaactttggagattaaacaaaaccatgtgacaaggaaaagagtagagacttcgtttcagatgtttgttttgactttgtgctagcttggattaaaaaataggtagaacgtgacattaaactctgaaggtgagcagcctccagggcaccattcccatcgagctaggacaatgtgtggcacatagtaggcactcagtacacatttgctgaatgaattaatgaatcgctttcaggcagatctaagaatcctggctctatccccctctctttctctcttgtctttctcagagttggaaatgtcagagggatgagcaggagagtggtctacaaaaatccagccatgggcatggagaatttccgccaacatacacaaactagcaggaaggctgagtccagtgctggcctcagttctctagctgctcctcactggaggcaggcacaactcaggcgtgccaaggatacccggcacctgtgtacaaagccagcctgttgtctcctggcagcagttctatcccctaacgagggaagagggaagagggaagagggtctggtgaacactgctggtttattcctcaacaccctggaggagaaccaaggggggtggaaattagcaattgcacatggttaagcatgaaaaacaccttccatggtaacctccccctaggagacgaatggctacaataaggtcttggctcatagtacccttccctccctcctctctcccttttgacttctctctctctctctgcatgtgtttgcctcattctttttttctcacctctgcaaaggtaacagacatgatgcagaaagccctctttgatttcctgaagcacaggtttgatgggaggatttcaataacgagagtgacagctgacatttctcttgctaagaggtctgtcctaaataatcccagcaagagagcaataattgaacgttcgaacacccggtccagcttagcggaagtacaaagtgaaattgaaagaatctttgagttggcaagatctttgcaactggttgttcttgatgcagacaccatcaatcacccagcacaacttataaagacttccttagcaccaattattgttcatgtaaaagtctcatctccaaaggaaatgtttgatgttatattggatgaaaatcagcttgaggatgcatgtgaacatctaggggagtacctggaggcgtactggcgtgccacccacacaaccagtagcacacccatgaccccgctgctgggaaggaatttgggctccacggcactctcaccatatcccacagcaatttctgggttacagagtcagcgaatgaggcacagcaaccactccacagagaactctccaattgaaagacgaagtctaatgacctctgatgaaaattatcacaatgaaagggctcggaagagtaggaaccgcttgtcttccagttctcagcatagccgagatcattaccctcttgtggaagaagattaccctgactcataccaggacacttacaaaccccataggaaccgaggatcacctgggggatatagccatgactcccgacataggctttgagtctaatgaaacaaaaaatattcatctgttgacaatttgccatagcagtgctaggataaaccaatcatcttaact

SEQ ID NO: 2887 - DNA, 1389 bp, Homo sapiens
  source 1..1389: mol_type = unassigned DNA; mol_type = unassigned DNA
cggctctgaacgatgtcctcctcctcctacgccaagaacgggaccgcggacgggccgcactcccccacctcgcaggtggcccgaggcaccacaacccggaggagcaggttgaaaagatccgatggcagcaccacttcgaccagcttcatcctcagacagggttcagcggattcctacacaagcaggccgtctgactccgatgtctctttggaagaggaccgggaagcaattcgacaggagagagaacagcaagcagctatccagcttgagagagcaaagtccaaacctgtagcatttgccgtgaagacaaatgtgagctactgcggcgccctggacgaggatgtgcctgttccaagcacagctatctcctttgatgctaaagactttctacatattaaagagaaatataacaatgattggtggataggaaggctggtgaaagagggctgtgaaattggcttcattccaagtccactcagattggagaacatacggatccagcaagaacaaaaaagaggacgttttcacggagggaaatcaagtggaaattcttcttcaagtcttggagaaatggtatctgggacattccgagcaactcccacatcaacagcaaaacagaagcaaaaagtgacggagcacattcctccttacgatgttgtaccgtcaatgcgtccggtggtgttagtggggccgtcactgaaaggttacgaggtaacagacatgatgcagaaagccctctttgatttcctgaagcacaggtttgatgggaggatttcaataacgagagtgacagctgacatttctcttgctaagaggtctgtcctaaataatcccagcaagagagcaataattgaacgttcgaacacccggtccagcttagcggaagtacaaagtgaaattgaaagaatctttgagttggcaagatctttgcaactggttgttcttgatgcagacaccatcaatcacccagcacaacttataaagacttccttagcaccaattattgttcatgtaaaagtctcatctccaaaggttttacagcggttgattaaatctagaggaaagtcacaaagtaaacacttgaatgttcaactggtggcagctgataaacttgcacaatgccccccaagtcagcgaatgaggcacagcaaccactccacagagaactctccaattgaaagacgaagtctaatgacctctgatgaaaattatcacaatgaaagggctcggaagagtaggaaccgcttgtcttccagttctcagcatagccgagatcattaccctcttgtggaagaagattaccctgactcataccaggacacttacaaaccccataggaaccgaggatcacctgggggatatagccatgactcccgacataggctttga

SEQ ID NO: 2888 - DNA, 3174 bp, Homo sapiens
  source 1..3174: mol_type = unassigned DNA; mol_type = unassigned DNA
gtattgggaaggcagataaaatgccaggtctggactgcctctggggataacctcaccctgtgggatgtgaatgaatagcatcttgcctggtaaatccacaggaattgataaggcaggcgcagttctcccaaacaggccttttctctttaagctgtagctgtggtttctgcagcaattttgtttttgccttgaaagaggtgctctggattatcacacctccatgtatgacaatttgtacctgcatggaattgaagactcggaggctggttcagcggattcctacacaagcaggccgtctgactccgatgtctctttggaagaggaccgggaagcaattcgacaggagagagaacagcaagcagctatccagcttgagagagcaaagtccaaacctgtagcatttgccgtgaagacaaatgtgagctactgcggcgccctggacgaggatgtgcctgttccaagcacagctatctcctttgatgctaaagactttctacatattaaagagaaatataacaatgattggtggataggaaggctggtgaaagagggctgtgaaattggcttcattccaagtccactcagattggagaacatacggatccagcaagaacaaaaaagaggacgttttcacggagggaaatcaagtggaaattcttcttcaagtcttggagaaatggtatctgggacattccgagcaactcccacatcaacaggtgagggttgtagttaaactctttttcatacactgtattccttttaaaaatatttgaacacacatgcaagtagttttgctaatttggaaacaatttgaaggcttaatttaaagattctctaattaatatttcatttctcatttgttttctatggtaatttgatttcatttaaaatggtattaaaaattcatgtcattagaatataattttgaaaaatcttatttacccctcagtgttaataactgtccattgtgtaaattgatattcaaaaaattcattattttacctaaggaacggacagagtttaagatggtgaaggccaataaaaaaaggaaaaaaatgatgcagactctcaagaaaatgctgttttcagtctccatgtggaatttcaggatgtattagtacagcccgagctggaagggttgaagcagagagtaaggcagggcccaaaggagggagggcctcgtttacatttggacagcagacagccaagccctggaattaatggtaatgaagagatattggtggcctaatagggaattgtggtacatttggaaacgatggagttattcatgtaggaatttttcttctaccacattccctgattcctatcggctaatttcattctggcctagaactgctgttgcattagggcatccagtgtcctagttaccaattccaattgtattaccaatttggaatggcaagtccaaggccctattctggcctaccaaaactggaggcaactggattggttctggagtggttctaagtgtctgggtccttgttcatgtgaagccctcttatctacaggacactgaaccaaaccaggtttctgagttgtacccaactagactggagctgcttggatgtccacagaatcgctttaaatcagttattgagtatattttgcttcgttcccatttgttggacattcaggacattgaacactttagctattacaaacaggaaagaacaggaataactcattataaatttatctgaggaataactggttataaatgtatttgaaatttagaagcaagatagtaggaaaaatgtgccaatattctagaaaatgggcaaaaatgcccaagggactgcagaattatgagttaacaaatataaaaataactattgattgaggtgatagtcatttttgcccaagtggttattctgtttccttttatgaaattgcatttgtctaccttgttcccagcaacactgtgctgtgtccagcacgggaacaacccatggtgattggctggcccggaacttccagtgttgctctcaactcctgtacccaattcccacccagtgagaaatcaggatataaggtcatttgtaccagggaggaagctgtctgtttttcatacatcttcaaaattgacgtgtccagaatgaaatcataaggcaggttctccaaagtgggcgataggaaggtggtgaagataattacagggacaaatgggtacattcttccatcttttaaactcatgtactgtcatttgcagagtttacatattttgatatggctctcgttattgtcttttagcaaaacagaagcaaaaagtggtaagttgtgtttcctttttaaatctactgttaaggttcctatatatacatgcctgcaatgctccatttcagtgacccaagtggctataaaataagggaagagcctcctcggtggggactttgataatcatttgtcgttcaacctgagaattatgaaattatgaatgttgtggctgtggagaggcatgctcaacctcaccttgtcacgcgtgtcgaatcatctttttcagacggagcacattcctccttacgatgttgtaccgtcaatgcgtccggtggtgttagtggggccgtcactgaaaggttacgaggtaacagacatgatgcagaaagccctctttgatttcctgaagcacaggtttgatgggaggatttcaataacgagagtgacagctgacatttctcttgctaagaggtctgtcctaaataatcccagcaagagagcaataattgaacgttcgaacacccggtccagcttagcggaagtacaaagtgaaattgaaagaatctttgagttggcaagatctttgcaactggttgttcttgatgcagacaccatcaatcacccagcacaacttataaagacttccttagcaccaattattgttcatgtaaaagtctcatctccaaaggttttacagcggttgattaaatctagaggaaagtcacaaagtaaacacttgaatgttcaactggtggcagctgataaacttgcacaatgccccccagaaatgtttgatgttatattggatgaaaatcagcttgaggatgcatgtgaacatctaggggagtacctggaggcgtactggcgtgccacccacacaaccagtagcacacccatgaccccgctgctgggaaggaatttgggctccacggcactctc

SEQ ID NO: 2889 - DNA, 1292 bp, Homo sapiens
  source 1..1292: mol_type = unassigned DNA; mol_type = unassigned DNA
tcagtcaccagtctgtggttgaggaagggttttgctttttgtgctctgtattgggaaggcagataaaatgccaggtctggactgcctctggggataacctcaccctgtgggatgtgaatgaatagcatcttgcctggtaaatccacaggaattgataaggcaggcgcagttctcccaaacaggccttttctctttaagctgtagctgtggtttctgcagcaattttgtttttgccttgaaagaggtgctctggattatcacacctccatgtatgacaatttgtacctgcatggaattgaagactcggaggctggttcagcggattcctacacaagcaggccgtctgactccgatgtctctttggaagaggaccgggaagcaattcgacaggagagagaacagcaagcagctatccagcttgagagagcaaagtccaaacctgtagcatttgccgtgaagacaaatgtgagctactgcggcgccctggacgaggatgtgcctgttccaagcacagctatctcctttgatgctaaagactttctacatattaaagagaaatataacaatgattggtggataggaaggctggtgaaagagggctgtgaaattggcttcattccaagtccactcagattggagaacatacggatccagcaagaacaaaaaagaggacgttttcacggagggaaatcaagtggaaattcttcttcaagtcttggagaaatggtatctgggacattccgagcaactcccacatcaacagcaaaacagaagcaaaaagtgacggagcacattcctccttacgatgttgtaccgtcaatgcgtccggtggtgttagtggggccgtcactgaaaggttacgaggtaacagacatgatgcagaaagccctctttgatttcctgaagcacaggtttgatgggaggatttcaataacgagagtgacagctgacatttctcttgctaagaggtctgtcctaaataatcccagcaagagagcaataattgaacgttcgaacacccggtccagcttagcggaagtacaaagtgaaattgaaagaatctttgagttggcaagatctttgcaactggttgttcttgatgcagacaccatcaatcacccagcacaacttataaagacttccttagcaccaattattgttcatgtaaaagtctcatctccaaaggaaatgtttgatgttatattggatgaaaatcagcttgaggatgcatgtgaacatctaggggagtacctggaggcgtactggcgtgccacccacacaaccagtagcac

SEQ ID NO: 2890 - DNA, 4299 bp, Homo sapiens
  source 1..4299: mol_type = unassigned DNA; mol_type = unassigned DNA
aactgccaaccagcatggcagtcttctctcatgggtggagaatgtctaaagaagctgtactctcctccagatgttctgagatcctagccttccatctatctctgcagacactgctttggtgcagtggacttgggaatcctgaacaaactagggccttttgagaatcagtagaatggattgaaagagctgctgggggttcaagcacttcactgcagtgcaggagagttcagcccttcccactgcccatgacactgtggtgtccttaagtgcaagaacaggagttcccagacacctatgtcctggggtattatagagctcatagattagcattgtttgcaggggaagggccacgggacatggcagtatatgaccaaatgcagttacagcagtggccaaaagacatagatatatcactggtttacatgtagcaatatactaatacaaatgttttgcctgggtctccaatcacagaatagtctgattaatttaaaattaaactgaaatgtcccattaataatcggtgacaaaaataaccagaaaatgactctgacatttatctgacatggagatagtgagctaaaacattattcaggtgaataatattaaagtattacttaacataaatgacctggtacagtccactccctccatttttacaggtctctctttgaaatctctgggaaaaatctaggatgggaactcaggctcctcctgagacttcacacagagttagaataggatgaacatatcaaatccatggaactgagagccaatgtaagcagatgacatcattacaggtttaaatatatgatttctcacactgcatttcctctctgataatactcagggccaagcagaccattaaaaagatcctggcttatttgattttctttcaactcatctacaatacctcaggttcatgtcttcttctatcaggttttacagcggttgattaaatctagaggaaagtcacaaagtaaacacttgaatgttcaactggtggcagctgataaacttgcacaatgccccccagtaagtatgatcattttttgtcttcatcattcttgactagttagaagagggtgggtttttttttcttcatattgttgttttcattctaaaatgatggtgatgatggtatgttgtcatctaaaagatttcttggaacaaactgctgctgttatgttgcttgtattcaggcatccagatgtggatggtgtttgccttgtaataagaaatgaacttagtgtccggggtctgttcttctcactgctaccttgtttgctttgcaaacatgcagcaaaccacttagcattcagcctccagtcacatggatacgcttaagaaaagaacaaaagaaaacataccaatttgatcttcctttaactcttctgcaagaaaattccagcaggcataaaagattatgacactgaaggtcaagaattgattggaactagagaggccctgtggttatagtagatgaaagagtcagggctgagtcagatgaaaaacgaaattatagcaactcttcttctagtgccattgccagaaaacagctgctgggttagaaggtgagcaatggtgggatggggtgggagatggaactgctatcacatggcactgggtccccagtggccagtctctccacttttcccactgacttactatttctgtgcctatgtttctgtaaaggaaataactgtccttcttactcaatggattcactagattgttttatacacttgtgtaggattgtttaagctctatggaagcatgaaatctgattcaaatgtttagagagggcaacacagcataacctgtaaaagcacagactctggagccagatatttgggttttgaatccacactgactagttatgtaatcttgggcaagtacctatctcatgggattggtgtaaggattgagtgagtgaatatgtggtaaagctgttagaacagcgccaggaacataagaagcaccgtctaagttttcttattataattactggatacactttgtgtgacgtcatgtctggtccagtagactctgtaagaacccgtgcccctctggctcactgttgtatgtcagttccctatcatagtagacccataatatatatttgtggaatgagtgaataaatgaaaggatgttcagacgataagagtaataatgcatcctttcattagatgcttacagttggccacacagtgtgctagatgctttacatagattatctctaatcttcacagttacctggtgagataggccatattatctccattttatagtttaggcaactgaaaacagagacattaaacgatttccctaaggtgacatagcaaattaggattcaatctattctagatctatctggctccaaagacaatttcctaccccctaacccatccacccatacacacatgtacctggttacctaccctgaagataatttgatagcttggagcatggcgtgctctgttaagtttcacttcacgctgcctgttagtgaagcccaattacacagtggaatgtatgattaaggcactgaacagacagaggaatgtattgcccagccctgaccttctaatgtttcacagttgaaggaagataatctttgttgtctagctatcaaaagccgggaactatgttattatttccaatttttggaacaatcttataaggatagttatatcagtttggtcttctgggaagcagacacctaaatggaattacaaatgcaagagatttattggagaaattttatctttatgaaaataagtttattaacatttattctaataattactagagaaaattcttgtgtcctattaaatttgagggattttagctgctgagagggttgatcattgagtagttgtacatataatatggtttgttacatctgaaatagctggaatcaagaaaagatatttgcatctgtaaaagcaactaatatactgagctaccttaggacttgtacccaggtcagagatttcaaacagctccatgactggaaagacagccttgccttaccattatctcagtaggataaacactttatctttttatataattggtaagataacctggaattttaaacaggcagtctggatggataaggttaccttgtacttagcattttctaaacactgtttactttattaaacatgttcaattgatactgcacagatgtagtaatgctgaggaggaatagtatcctctattttggcatgtgtgaagaaatctttggattataaaaaccagtagtaaccttaaaatgtgtctgcatttgcccctgctttacttcaagaccataattataattgtcatccaaagattggtgatcactgtgtcattttaattcctttaggagaatttgcgacttacttaattggccaccatatctccagtatgaaaagtcagcaaattacattggcagagtatcacattgctaagaaatgaaaggcaacagtttttggaaagggaagcctataggagctctgaaaaaagttaacgctgtagccagaattaatcctagatccagggactgttgaagcaaaaggggaccttaaagagcacccaatatagtatttcctagactatattatttataatatgggtcctatgtgatatcagtaagtgttatgggaaaataatcctgataccaaaaatgtttgagaaaacacttaggtgaacaaaggtagtctggtttctttactacagaaccctgaatatgccaatgtgtattttatatctccaataggacaaatagtgtgcacagcttcccctaaaattgtgactgcagatctgcttttccattgagcatcctatgggtccagtggaacatgtctagggaaagacttagtccaatctcctcattttacaaatgatggaactgagaccaagagaactggcttttcaaaggttgtatgcctgggccaaagtcagcttaagatctctttctcctagtctagcaagactagatgatgaatggcaacaggtcagttatatattctcctggaaagaaaagtatgggttttggccaggtgcagtagctcatgcctgtaatcctagcactttgggaggccaaggcgggtggatcatgaggtcaggagtttgagaccagcctgaccaacatggtgaatccccgtctctactaaaaatacaaaaattagccaggtgtggtggtgcgcacctgtaatcccagctactcaggaggttgaggcagaattgcttgaacctgggaggtggaggttgcagtgagctgagaccatgccactgcactccagcctgggtgac

SEQ ID NO: 2891 - DNA, 558 bp, Homo sapiens
  source 1..558: mol_type = unassigned DNA; mol_type = unassigned DNA
tccaagtccactcagattggagaacatacggatccagcaagaacaaaaaagaggacgttttcacggagggaaatcaagtggaaattcttcttcaagtcttggagaaatggtatctgggacattccgagcaactcccacatcaacagacggagcacattcctccttacgatgttgtaccgtcaatgcgtccggtggtgttagtggggccgtcactgaaaggttacgaggatttcaataacgagagtgacagctgacatttctcttgctaagaggtctgtcctaaataatcccagcaagagagcaataattgaacgttcgaacacccggtccagcttagcggaagtacaaagtgaaattgaaagaatctttgagttggcaagatctttgcaactggttgttcttgatgcagacaccatcaatcacccagcacaacttataaagacttccttagcaccaattattgttcatgtaaaagtctcatctccaaaggttttacagcggttgattaaatctagaggaaagtcacaaagtaaacacttgaatgttcaactggtggca

SEQ ID NO: 2892 - DNA, 4589 bp, Homo sapiens
  source 1..4589: mol_type = unassigned DNA; mol_type = unassigned DNA
ggtttctgcagcaattttgtttttgccttgaaagaggtgctctggattatcacacctccatgtatgacaatttgtacctgcatggaattgaagactcggaggctgaagaataatgtgatgtgttacccaagatggtgtgaacagagcttcaagccaatggagaagactaggcctaaatagctgacctggtgaagtgacacataaagccacacctggagtgccacctcctcagcagtctttctcagtgccaatgcatttatggctggttcagcggattcctacacaagcaggccgtctgactccgatgtctctttggaagaggaccgggaagcaattcgacaggagagagaacagcaagcagctatccagcttgagagagcaaagtccaaacctgtagcatttgccgtgaagacaaatgtgagctactgcggcgccctggacgaggatgtgcctgttccaagcacagctatctcctttgatgctaaagactttctacatattaaagagaaatataacaatgattggtggataggaaggctggtgaaagagggctgtgaaattggcttcattccaagtccactcagattggagaacatacggatccagcaagaacaaaaaagaggacgttttcacggagggaaatcaagtggaaattcttcttcaagtcttggagaaatggtatctgggacattccgagcaactcccacatcaacaggtgagggttgtagttaaactctttttcatacactgtattccttttaaaaatatttgaacacacatgcaagtagttttgctaatttggaaacaatttgaaggcttaatttaaagattctctaattaatatttcatttctcatttgttttctatggtaatttgatttcatttaaaatggtattaaaaattcatgtcattagaatataattttgaaaaatcttatttacccctcagtgttaataactgtccattgtgtaaattgatattcaaaaaattcattattttacctaaggaacggacagagtttaagatggtgaaggccaataaaaaaaggaaaaaaatgatgcagactctcaagaaaatgctgttttcagtctccatgtggaatttcaggatgtattagtacagcccgagctggaagggttgaagcagagagtaaggcagggcccaaaggagggagggcctcgtttacatttggacagcagacagccaagccctggaattaatggtaatgaagagatattggtggcctaatagggaattgtggtacatttggaaacgatggagttattcatgtaggaatttttcttctaccacattccctgattcctatcggctaatttcattctggcctagaactgctgttgcattagggcatccagtgtcctagttaccaattccaattgtattaccaatttggaatggcaagtccaaggccctattctggcctaccaaaactggaggcaactggattggttctggagtggttctaagtgtctgggtccttgttcatgtgaagccctcttatctacaggacactgaaccaaaccaggtttctgagttgtacccaactagactggagctgcttggatgtccacagaatcgctttaaatcagttattgagtatattttgcttcgttcccatttgttggacattcaggacattgaacactttagctattacaaacaggaaagaacaggaataactcattataaatttatctgaggaataactggttataaatgtatttgaaatttagaagcaagatagtaggaaaaatgtgccaatattctagaaaatgggcaaaaatgcccaagggactgcagaattatgagttaacaaatataaaaataactattgattgaggtgatagtcatttttgcccaagtggttattctgtttccttttatgaaattgcatttgtctaccttgttcccagcaacactgtgctgtgtccagcacgggaacaacccatggtgattggctggcccggaacttccagtgttgctctcaactcctgtacccaattcccacccagtgagaaatcaggatataaggtcatttgtaccagggaggaagctgtctgtttttcatacatcttcaaaattgacgtgtccagaatgaaatcataaggcaggttctccaaagtgggcgataggaaggtggtgaagataattacagggacaaatgggtacattcttccatcttttaaactcatgtactgtcatttgcagagtttacatattttgatatggctctcgttattgtcttttagcaaaacagaagcaaaaagtggtaagttgtgtttcctttttaaatctactgttaaggttcctatatatacatgcctgcaatgctccatttcagtgacccaagtggctataaaataagggaagagcctcctcggtggggactttgataatcatttgtcgttcaacctgagaattatgaaattatgaatgttgtggctgtggagaggcatgctcaacctcaccttgtcacgcgtgtcgaatcatctttttcagacggagcacattcctccttacgatgttgtaccgtcaatgcgtccggtggtgttagtggggccgtcactgaaaggttacgaggtacaaatatcatctgttactcttcagttcttgatcgagcacccaggagacagtcatgttgacgcttgctcctcaagggtctgtttccacgtgggtcctgatggaagccagtgctcagcatgggaaggcagggggtaccgtgtggggctcatgaggccctctgccctttctttcctctcttgcacacttctcatcttttatgtattacattgtttagaaatacctccctcaaaatattcacaatgggaagatctggtcaaagatttgctgtacattaaatgcaaagaaaaggactttatctgtcttgaccattctcattattattagaagtaatagagaatgaacagcacaagaggacaaacaatcaatcttccagcaaacccaaacctttaaagcccaaacagagttcaccctgctgggtttttaagatgatggcatatgccaccaaatccttctctgcttatttattttaaagggcacatgttttaaaagaccactaaaaacattagtgaactttggagattaaacaaaaccatgtgacaaggaaaagagtagagacttcgtttcagatgtttgttttgactttgtgctagcttggattaaaaaataggtagaacgtgacattaaactctgaaggtgagcagcctccagggcaccattcccatcgagctaggacaatgtgtggcacatagtaggcactcagtacacatttgctgaatgaattaatgaatcgctttcaggcagatctaagaatcctggctctatccccctctctttctctcttgtctttctcagagttggaaatgtcagagggatgagcaggagagtggtctacaaaaatccagccatgggcatggagaatttccgccaacatacacaaactagcaggaaggctgagtccagtgctggcctcagttctctagctgctcctcactggaggcaggcacaactcaggcgtgccaaggatacccggcacctgtgtacaaagccagcctgttgtctcctggcagcagttctatcccctaacgagggaagagggaagagggaagagggtctggtgaacactgctggtttattcctcaacaccctggaggagaaccaaggggggtggaaattagcaattgcacatggttaagcatgaaaaacaccttccatggtaacctccccctaggagacgaatggctacaataaggtcttggctcatagtacccttccctccctcctctctcccttttgacttctctctctctctctgcatgtgtttgcctcattctttttttctcacctctgcaaaggtaacagacatgatgcagaaagccctctttgatttcctgaagcacaggtttgatgggaggatttcaataacgagagtgacagctgacatttctcttgctaagaggtctgtcctaaataatcccagcaagagagcaataattgaacgttcgaacacccggtccagcttagcggaagtacaaagtgaaattgaaagaatctttgagttggcaagatctttgcaactggttgttcttgatgcagacaccatcaatcacccagcacaacttataaagacttccttagcaccaattattgttcatgtaaaagtctcatctccaaaggtaattagctcctttctgccttaaggtttagaagtgcatcttttaaaaatgtgttttgctctgtggttttttgttagtggacaaaggagaacgtcttgctgattattaataagcacatttaaaatctttccacagtgtacagattctatgaattttcagatagtgaagaatataatagttcatttcttctaaaagctactattgtagatcccaaacaagacagttatgcaagtgtataatagaaacaaaacattaagacagatgtggaaaagtagactctggcttatcatagactatgaattctatattggtaaatttcttggatcctgttgattcctgtgtcatccatactctgtacctagttgagagagt

SEQ ID NO: 2893 - DNA, 5209 bp, Homo sapiens
  source 1..5209: mol_type = unassigned DNA; mol_type = unassigned DNA
gtattgggaaggcagataaaatgccaggtctggactgcctctggggataacctcaccctgtgggatgtgaatgaatagcatcttgcctggtaaatccacaggaattgataaggcaggcgcagttctcccaaacaggccttttctctttaagctgtagctgtggtttctgcagcaattttgtttttgccttgaaagaggtgctctggattatcacacctccatgtatgacaatttgtacctgcatggaattgaagactcggaggctgaagaataatgtgatgtgttacccaagatggtgtgaacagagcttcaagccaatggagaagactaggcctaaatagctgacctggtgaagtgacacataaagccacacctggagtgccacctcctcagcagtctttctcagtgccaatgcatttatggctggttcagcggattcctacacaagcaggccgtctgactccgatgtctctttggaagaggaccgggaagcaattcgacaggagagagaacagcaagcagctatccagcttgagagagcaaagtccaaacctgtagcatttgccgtgaagacaaatgtgagctactgcggcgccctggacgaggatgtgcctgttccaagcacagctatctcctttgatgctaaagactttctacatattaaagagaaatataacaatgattggtggataggaaggctggtgaaagagggctgtgaaattggcttcattccaagtccactcagattggagaacatacggatccagcaagaacaaaaaagaggacgttttcacggagggaaatcaagtggaaattcttcttcaagtcttggagaaatggtatctgggacattccgagcaactcccacatcaacagcaaaacagaagcaaaaagtgacggagcacattcctccttacgatgttgtaccgtcaatgcgtccggtggtgttagtggggccgtcactgaaaggttacgaggtaacagacatgatgcagaaagccctctttgatttcctgaagcacaggtttgatgggaggatttcaataacgagagtgacagctgacatttctcttgctaagaggtctgtcctaaataatcccagcaagagagcaataattgaacgttcgaacacccggtccagcttaggtaagatgttcaaatgtggtacttcttcaagctgtgcttacagaccgggctgacacatggtgcatttgtgaatgtctttttcaatttgttccccattctgaacgggggagcactgagtacctaaaaagaatgctagctatggacaagaaggcagcagagtcttgcagtagcgagagcttgctgtctctcagctttagtcaattagctaattagtagtctggtggaaagaatcctcaatgggctctcctagtcttttcctgcctaactacatgaaaccagtcatctccactttgctcagcttctcaacaaggctaatgatatctgtcatacctgagtcacagctgacataaaaggaaacgaggtgttcagccttctgagatctttagaagaaaagctagataacggtgttcttggtgttgtgaatggcaatgaccattagtaacatgcagggactttaaacatgtctttcctggggtaccagttggaaagcatcctaaaattccccatgatggagaagaataaaggctgtaagtgagtagctccgtcaagccataggtgagcagggctgtggaggatggatcataacccacagaagcgagtccatagtgctggtgaattacatcgttcatctggaaagcctgttcatggtctccacgattgccaagggtggtgtagtccactcatgacttcctaggattctctttacattcatattctgagggcaacttgttttaactaggaaggataaatagggctcttccatgccttacattttttaaactgttgaaattagctctatagataatagaaaaataaaattaagatttccaagacagagtgcatgccctaacatcacattaagaacccactgaccttgagccaaagatcgtgcaatttgtaaagaaggtacaaaatattatctgtgtgttcctgacatgggattggcatgtgataattgctaataaatgtgggatggttgctttgtgaaggattactaaacataccaaatagagtagtggtcagtgcttgtgaggggaagatcccagcgattagtggtcccttcttttgtcttgtatttagagccttccacatgcagagggaaacatgctcaaaggcacagtattttgaccttgaagaggtacaatggcagtgttgatggtgaatcctattaggtaatgactaaagttaaatatcatgggtgacagggacattaagttaggttgaagtttctcaaacaaacatcaattctctgctctcctgttttctacccattttgtaactccttatagtgtctttggcttttaagtactccttctaatgtatggtgagaggctaaaagataattaaaagcttaagccaggttgtctgactcctttaaccattgacacctgccaagggcttcatgtgtattcactgaagtcattccttacaatccattcacctgctgtcagagtcagtggggtggatggggggcatgttagtgtaaacaagaagaaacaaagtatatctcacctcatggtttttacctttactctgtaaagtcataaacccacaaccattggaattaatttcatggcaatctattaattttataataaccacaatgtgatccatttgtgtgcttgttaatgcacatttgtagattccttcatcaaatgtttattgaacacttgttatgtgccatgcattgtgctagacttaggaaataaagacataacccacacacagtatcttacccatgggcaaagagacagaagagacagatggttagaatacctgtgacagtggaattatgaacaaggaactaggggtataaagaagagtaggggttaagagatgtgtgagaagacttctcagaagttatatttgagctggttcttcaaggcaggcaggaatgtacaaagacattgacatgtaaacaaaaatatgttgttgagaaacaagtagatttgtgtatagcatgcttagaacagggaagttggtggtgtgatttgagaggaacagaagagattgaaaaagattgaggccaatgtgttggggttctaatgcaccttgctaaagagaactccaaaatagatcccatgcaatgttaattttacaacatagtaacagttgttacattcagaatgttttccattgtcaaataaatttggaaatgatgaattaaactgacaggtttcttctctgcaagacttagagccttgaagatatgaaggataatgcatgtttgaaattctaaagagaagctattatagtattcaatataacccttacacaaaacccccttcttcccataggatatcttatgagattattgttccagagtactcactttgggaaatgttgctttggaccctggggagccattgaagtgttttaagcatgggagaaatatgaacaggtttgagtataagggatataatttgtgacagggatcctggagagaggtgggcccaaatcatcatggtcagtttatagaagtgttcatcgaggtcctccagcatcatagtccatgactccccagggctccatttgactggaataggattatgaggaaaacttatttggaacccctctgagaatcagtccaggtagccaagattttttgatttggttgagatctttttctttaaaaaacaaaaaaagagctatatagataaatatgcctcacagataaaatatatttattacattctgtatacatattatccaaacattgggctcaccccagtatttaatgtggccttctccagcatccctgctggcttgttctgcccaagcacctctcttcctctgcccaagtgcctgttgcctaagagttttgtgttggttaagcagtaggtatggctgcccttgctcctggcagaaaccacacttaacctcattgctggtgcagagtaaataaggcccaggtatttctgagtcatttacacagaaactcagagtgccttgagggttatttgtaccagggcagtccagttcacatcaatgtctttctgctgcttctgaaaatattgtattcatatttgaagcttaagaaaacataggcttgctcacatgtagtcctggccaggagctcccataagccagtgacagtttaatgaaaacagcaaatgggaaacataccctgacatcctgaggctgaaatttactacagtaaaaattgactttattttccaaacttccttctgaagaaaatttattttaaaactgtttctgccatgtgagagaaaaggggacaaatatgctacattactaacaaatgtagaatatgatttcagaagaatttgacaaataagcccacttgttttcattaatattctgaaagctagtcacctttccaagcaatgtgaagtctttcaggccattggtattggataacatgaaaagtgatatgttgactcttcaaattaatcctttttaatacagatcatgccttaaacttcagtgattctatgggaaataagaattttatgcaatcatgcaaaacataagaaaatagattttcatgatagtcttgagtattcatgaccctgcacaccttgtcaatccttttggttaaggaagggagaattttttggtgggctatgtgaacttgaatttatactaaataagcaaagcaaatcacaaacacttttcaatgaggatatttagagcaacattacctttttccctaggccatctttagggtcgtttaaggccgggtacaatggctcacacctgtgatgccaacacttcaggaggccaaggcaggaggattgcttggactttggagttcaagaccaacctgggaaacttagtgagacccagtctctacaaaaaataaaaaatttagccaggcacagtgatgtgcacctgtagtcccagctactcggcaagctgaggtgggaggatcacttgagcccagaaggttgaggctgcagtgagctgtgattgtaccactgcactccagcatgggacacagagtgagaccctgtctctaaaaattaataataataatttaagttagatagttttgtgtactgtatgtactttggaccagattacagcattgtttggtcac

SEQ ID NO: 2894 - DNA, 5575 bp, Homo sapiens
  source 1..5575: mol_type = unassigned DNA; mol_type = unassigned DNA
gctttttgtgctctgtattgggaaggcagataaaatgccaggtctggactgcctctggggataacctcaccctgtgggatgtgaatgaatagcatcttgcctggtaaatccacaggaattgataaggcaggcgcagttctcccaaacaggccttttctctttaagctgtagctgtggtttctgcagcaattttgtttttgccttgaaagaggtgctctggattatcacacctccatgtatgacaatttgtacctgcatggaattgaagactcggaggctggttcagcggattcctacacaagcaggccgtctgactccgatgtctctttggaagaggaccgggaagcaattcgacaggagagagaacagcaagcagctatccagcttgagagagcaaagtccaaacctgtagcatttgccgtgaagacaaatgtgagctactgcggcgccctggacgaggatgtgcctgttccaagcacagctatctcctttgatgctaaagactttctacatattaaagagaaatataacaatgattggtggataggaaggctggtgaaagagggctgtgaaattggcttcattccaagtccactcagattggagaacatacggatccagcaagaacaaaaaagaggacgttttcacggagggaaatcaagtggaaattcttcttcaagtcttggagaaatggtatctgggacattccgagcaactcccacatcaacagcaaaacagaagcaaaaagtgacggagcacattcctccttacgatgttgtaccgtcaatgcgtccggtggtgttagtggggccgtcactgaaaggttacgaggtacaaatatcatctgttactcttcagttcttgatcgagcacccaggagacagtcatgttgacgcttgctcctcaagggtctgtttccacgtgggtcctgatggaagccagtgctcagcatgggaaggcagggggtaccgtgtggggctcatgaggccctctgccctttctttcctctcttgcacacttctcatcttttatgtattacattgtttagaaatacctccctcaaaatattcacaatgggaagatctggtcaaagatttgctgtacattaaatgcaaagaaaaggactttatctgtcttgaccattctcattattattagaagtaatagagaatgaacagcacaagaggacaaacaatcaatcttccagcaaacccaaacctttaaagcccaaacagagttcaccctgctgggtttttaagatgatggcatatgccaccaaatccttctctgcttatttattttaaagggcacatgttttaaaagaccactaaaaacattagtgaactttggagattaaacaaaaccatgtgacaaggaaaagagtagagacttcgtttcagatgtttgttttgactttgtgctagcttggattaaaaaataggtagaacgtgacattaaactctgaaggtgagcagcctccagggcaccattcccatcgagctaggacaatgtgtggcacatagtaggcactcagtacacatttgctgaatgaattaatgaatcgctttcaggcagatctaagaatcctggctctatccccctctctttctctcttgtctttctcagagttggaaatgtcagagggatgagcaggagagtggtctacaaaaatccagccatgggcatggagaatttccgccaacatacacaaactagcaggaaggctgagtccagtgctggcctcagttctctagctgctcctcactggaggcaggcacaactcaggcgtgccaaggatacccggcacctgtgtacaaagccagcctgttgtctcctggcagcagttctatcccctaacgagggaagagggaagagggaagagggtctggtgaacactgctggtttattcctcaacaccctggaggagaaccaaggggggtggaaattagcaattgcacatggttaagcatgaaaaacaccttccatggtaacctccccctaggagacgaatggctacaataaggtcttggctcatagtacccttccctccctcctctctcccttttgacttctctctctctctctgcatgtgtttgcctcattctttttttctcacctctgcaaaggtaacagacatgatgcagaaagccctctttgatttcctgaagcacaggtttgatgggaggtgagaaatatagatgtttttgtatttttattttcctttaaccaaacttgtgtgataaattgaattgtagatctatgtttccagagatttcagaagttctctagttaaaagttaactcagtattcttgggaagaatataataaaagaactctgaaaatatgaagtataacattgagtccccagtgaagaaaggaccatgagaagaaaaataagccatttgttttatttaaatgtatatatctttattttctcagttattaataatttcataccaaaatgttttttatgaaaaaatattaattaaaatatataatatttctcatgagtatagtggcttgctggtcaaactaggcagtatttgggaattgtgtatgtgtgtgtgtgtgtgtgtgtgtgtgtgtgtgtcatatgaaagcataaatgtcaagtactgaatttcctcaaaagaagagagtgagaattattttaatcataagcctcccaaagtgatcattttgtagggaatagtacttatttggatatttattatagttgtgggttgtttttattagaaatgtccttgttattttattgatctttttttaatgtattttactatgatccatcaacaatatggctcaggcattagccattaaataattttatcatttaagttttgtgaaaaattctaaagaaagtttctctgttttgcagagaaatggtaaaaagcctgtattgactcaattctaaatattaagctctttcacagtgctgaatgcagtccatgtaaaaataaccacatgaaaaaacctgagatttatcagaaatgtaggaaatttaaatggggtgcatcaaaaagtatgggcaaatgcatccagtttattactgtaggattgaagaaaaacatcacattctttatttttgaaggcagtaattaagccattcactttctctttgctaaattatgagaatccactaaatgcacaaaataattttaaaatgtaaaaaaacttcagatagattttaataaattggtatattaagaataaaaacaagcatggtattgctttaaatataaattgtatgcatttgttaaaataaaagctttctggataattgggtaaaatattcattagtttctggaacaatatagaaagttagtaaacagattttagtttaagaaataagaatgcttctaggtacattagtatataggtcaggctgccttaataaatagaccccaaaatgtgtagtgattcaaacacaatggaagcttattattgctcacttaacagtctgaagcaggtgttccttggctgggagggaggatagagttgggggaggggagaattgggcagaaagtttgttccctctgtcatttggggcccttagcccaggtacgatgtctctagtcagcttgcccggcctggaggtagcgcaactgacatttcactggttagaacttggttatgtggtcatacttaattgcagcggaggcactcttgcagtccaggaggaagaggagatagaatttgttgaatcaataatagccttcgtcacattcatctactggacaaaggcttaataagaaagatgtatttgttccatttcactctctttaaaaaagaaataggcagataatgaagtagcttcaaagaaaataagttaaaagccctgaatcctagagcattggagttggaaggatacataaaatgtcttttagactcatcatttctccaataaccacaatcagatagacaacctgcttctgtttgaaacttttggttattgggattacactttctaaaaaagcattgcaaaaaaatagctgaactctgactttgtaacttaatagggctggtcttggtcttgctgtctgatgctctggccttaaccctaaccctcatgcaggtccctgtggattgaaggcagccagcatgccttggtcgcacgtgcatagttccttcagatatgtatggagtcacatggtttcaacctgtggagctgttacctaaggcagttctgagcagtgccgaatccactggccccataacagccctatctgaacaaatcccatcccataagacagtgttagattattttggtctataacatacttatacgcaacagtgctgttaaaggtttgccctcaagaatgaagaatctgatgttcttcctcaatcctgaggcccagaaaaagggaatttatttaattgtaacagcagagatttgtctcgaatcaagtagaattgtcgcatccattactgtacacatactactgaagttggttttaatagaaattgaatgcaaatttcaatctcaagtattcatggggtctgatgacatggcagagggtctggaggaagagcccagcagtagcaaaagtaatagctgaagagagagacttagccctggagaaatctgatatatttctccagcaggagaaagataggtagatattaaaggggtgaggggtgagagaatggacttgatttcaaatattaagaggccaggcagcagaatgaacaataaggagttccttggttgagtgtatgtggagactttgataagaaagaaattcgctggtagcgtcacactgactctgacatgtcttcttcgtggggaatatcgttaggttttgagctataacatcatgctgcattatgttttaccaattgatacaaggagagaaaaaaacaaatagtctttaattgaaaccagccaagagaacaatgacaaggaaggctttagcacagtgacacggcataaacaatatgttctaatggaaacctactctgtgtttcatgggctatgaatgcagtacgttagacaaaataggagaaagtcctattatttttcagaaagtacaaagaagggatctgttggctacgaggctttcttctttaatctgcttttcagatcttagtagaaaataattcaacaaattggatgaaagtccaacagtttgactattgcagaatcataaacttgggatttttttgataccttagaaattatttgagtcagtttagagctacttattatacaattttattgctgtagctgctattgtggggcctaactgtaatacatgtaagaaaaacagaatactaggctgggcgcagtggctcatgcctataatcccagcactttgggaggcccaggtgggcagatcacctgaggtcgggagttcgagaccagcctgaccaacatggagaaacctcatctctaataaaaatacaaaattagccaggcgtggtggcgcgtgcctgtaattccagccactcgggaggctgaggcaggaaaatcacttgaacctgggaggcagaggttgcggtgagccaagatcatgccattgcactccagcctgggcaataggagcaaaactctgtctcaataaaaaaaaaaaaa

SEQ ID NO: 2895 - DNA, 8233 bp, Homo sapiens
  source 1..8233: mol_type = unassigned DNA; mol_type = unassigned DNA
tgtcatggttctgtagactgtaaaggaagcatggcagcatctgcttctggggaggtctcagggagattttactggtagcagaaggccaagcgggagcaggtgtcttacatgcctggagcaggaggaagagacggggaggtgccacacacttttaaacaatcagatctcactataactcactcattgtcacaggaacagcacaaggagatggtgccaaaccattcatgagggactgcccccgtggtccagtcacctctcaccagtccccacctccatcactggggattacatctcaacatgagatttgcgggggacacagatccaaaccatattatccctttttttctaaaattttgtcttccatgcccctttttagacacatggggagcatgtgttcctgtcttggggtctttgcatttgctgttttttcttactggaacctttttcttcacacttacacccggccactccatctgctttatatctttgttaggtatcaccctttcagtgacccctttcctgccaattgtatttaaaattgtacccactccccttccctgtacttcccatcccttccctgacttagttttctctgttgcacttattactctcagaaatattatatatttacctatctatcttgtttggtataagctgagcatccataatctgaaaagctgaaatccagaatgttccaaaatttgaaactttttgaggactgacatgatgctcaaaggagatgctcattagagcattttcgatttcagacatttggattagggatgttcaactaagtatatagtgcaaatttccgaaatctgaaaacagtggaaatccaaaacatttctgctcccaggcattttggataagggatattcaacctgtactgatatgtcctactagtatatgactcaataagggaaaggattttgtctccccaatgccgctgtcttatttctactttccaaaacagggatgtacaatccatatttgttgaataaaataactgaattattatcattttcaaagttttattgttattattatttcttaattgttacagtcatgggccatataacttttttgtcaaagacaaaaagtaggaaggtggcagctcccgacggcatttgtgggcttcagggaagcttccagagcacacctgaggagaccagagttgaggatcttctatttaaataaataatatttttcgtgaccaattccctacgatcagttcttaattctgatgcccacataatcatcttgtaagaagaaatggtttctccaggtctaactgcttgttttgagctgtgtttgacatctgactggcacattggtgcctggtgttaggttaacaagcagttcataagaccattcccgtcagtgatggttttgtctgatttccgcactgagtaactagaagagatgcttttgcagagtattccaggtctcggctagttctccacattctcttagaaatgaggtcaaagaaaacatttggatagattcttgaaattctttatagcagaatttggtgtgttttgaattatttaataggatgagggccaaagaaagctttgtactctcaagttctattttcaaagaatctggggagtgagtctttagttccttttctatatcctaggaaatcaagtggaaattcttcttcaagtcttggagaaatggtatctgggacattccgagcaactcccacatcaacaggtgagggttgtagttaaactctttttcatacactgtattccttttaaaaatatttgaacacacatgcaagtagttttgctaatttggaaacaatttgaaggcttaatttaaagattctctaattaatatttcatttctcatttgttttctatggtaatttgatttcatttaaaatggtattaaaaattcatgtcattagaatataattttgaaaaatcttatttacccctcagtgttaataactgtccattgtgtaaattgatattcaaaaaattcattattttacctaaggaacggacagagtttaagatggtgaaggccaataaaaaaaggaaaaaaatgatgcagactctcaagaaaatgctgttttcagtctccatgtggaatttcaggatgtattagtacagcccgagctggaagggttgaagcagagagtaaggcagggcccaaaggagggagggcctcgtttacatttggacagcagacagccaagccctggaattaatggtaatgaagagatattggtggcctaatagggaattgtggtacatttggaaacgatggagttattcatgtaggaatttttcttctaccacattccctgattcctatcggctaatttcattctggcctagaactgctgttgcattagggcatccagtgtcctagttaccaattccaattgtattaccaatttggaatggcaagtccaaggccctattctggcctaccaaaactggaggcaactggattggttctggagtggttctaagtgtctgggtccttgttcatgtgaagccctcttatctacaggacactgaaccaaaccaggtttctgagttgtacccaactagactggagctgcttggatgtccacagaatcgctttaaatcagttattgagtatattttgcttcgttcccatttgttggacattcaggacattgaacactttagctattacaaacaggaaagaacaggaataactcattataaatttatctgaggaataactggttataaatgtatttgaaatttagaagcaagatagtaggaaaaatgtgccaatattctagaaaatgggcaaaaatgcccaagggactgcagaattatgagttaacaaatataaaaataactattgattgaggtgatagtcatttttgcccaagtggttattctgtttccttttatgaaattgcatttgtctaccttgttcccagcaacactgtgctgtgtccagcacgggaacaacccatggtgattggctggcccggaacttccagtgttgctctcaactcctgtacccaattcccacccagtgagaaatcaggatataaggtcatttgtaccagggaggaagctgtctgtttttcatacatcttcaaaattgacgtgtccagaatgaaatcataaggcaggttctccaaagtgggcgataggaaggtggtgaagataattacagggacaaatgggtacattcttccatcttttaaactcatgtactgtcatttgcagagtttacatattttgatatggctctcgttattgtcttttagcaaaacagaagcaaaaagtggtaagttgtgtttcctttttaaatctactgttaaggttcctatatatacatgcctgcaatgctccatttcagtgacccaagtggctataaaataagggaagagcctcctcggtggggactttgataatcatttgtcgttcaacctgagaattatgaaattatgaatgttgtggctgtggagaggcatgctcaacctcaccttgtcacgcgtgtcgaatcatctttttcagacggagcacattcctccttacgatgttgtaccgtcaatgcgtccggtggtgttagtggggccgtcactgaaaggttacgaggtacaaatatcatctgttactcttcagttcttgatcgagcacccaggagacagtcatgttgacgcttgctcctcaagggtctgtttccacgtgggtcctgatggaagccagtgctcagcatgggaaggcagggggtaccgtgtggggctcatgaggccctctgccctttctttcctctcttgcacacttctcatcttttatgtattacattgtttagaaatacctccctcaaaatattcacaatgggaagatctggtcaaagatttgctgtacattaaatgcaaagaaaaggactttatctgtcttgaccattctcattattattagaagtaatagagaatgaacagcacaagaggacaaacaatcaatcttccagcaaacccaaacctttaaagcccaaacagagttcaccctgctgggtttttaagatgatggcatatgccaccaaatccttctctgcttatttattttaaagggcacatgttttaaaagaccactaaaaacattagtgaactttggagattaaacaaaaccatgtgacaaggaaaagagtagagacttcgtttcagatgtttgttttgactttgtgctagcttggattaaaaaataggtagaacgtgacattaaactctgaaggtgagcagcctccagggcaccattcccatcgagctaggacaatgtgtggcacatagtaggcactcagtacacatttgctgaatgaattaatgaatcgctttcaggcagatctaagaatcctggctctatccccctctctttctctcttgtctttctcagagttggaaatgtcagagggatgagcaggagagtggtctacaaaaatccagccatgggcatggagaatttccgccaacatacacaaactagcaggaaggctgagtccagtgctggcctcagttctctagctgctcctcactggaggcaggcacaactcaggcgtgccaaggatacccggcacctgtgtacaaagccagcctgttgtctcctggcagcagttctatcccctaacgagggaagagggaagagggaagagggtctggtgaacactgctggtttattcctcaacaccctggaggagaaccaaggggggtggaaattagcaattgcacatggttaagcatgaaaaacaccttccatggtaacctccccctaggagacgaatggctacaataaggtcttggctcatagtacccttccctccctcctctctcccttttgacttctctctctctctctgcatgtgtttgcctcattctttttttctcacctctgcaaaggtaacagacatgatgcagaaagccctctttgatttcctgaagcacaggtttgatgggaggtgagaaatatagatgtttttgtatttttattttcctttaaccaaacttgtgtgataaattgaattgtagatctatgtttccagagatttcagaagttctctagttaaaagttaactcagtattcttgggaagaatataataaaagaactctgaaaatatgaagtataacattgagtccccagtgaagaaaggaccatgagaagaaaaataagccatttgttttatttaaatgtatatatctttattttctcagttattaataatttcataccaaaatgttttttatgaaaaaatattaattaaaatatataatatttctcatgagtatagtggcttgctggtcaaactaggcagtatttgggaattgtgtatgtgtgtgtgtgtgtgtgtgtgtgtgtgtgtgtcatatgaaagcataaatgtcaagtactgaatttcctcaaaagaagagagtgagaattattttaatcataagcctcccaaagtgatcattttgtagggaatagtacttatttggatatttattatagttgtgggttgtttttattagaaatgtccttgttattttattgatctttttttaatgtattttactatgatccatcaacaatatggctcaggcattagccattaaataattttatcatttaagttttgtgaaaaattctaaagaaagtttctctgttttgcagagaaatggtaaaaagcctgtattgactcaattctaaatattaagctctttcacagtgctgaatgcagtccatgtaaaaataaccacatgaaaaaacctgagatttatcagaaatgtaggaaatttaaatggggtgcatcaaaaagtatgggcaaatgcatccagtttattactgtaggattgaagaaaaacatcacattctttatttttgaaggcagtaattaagccattcactttctctttgctaaattatgagaatccactaaatgcacaaaataattttaaaatgtaaaaaaacttcagatagattttaataaattggtatattaagaataaaaacaagcatggtattgctttaaatataaattgtatgcatttgttaaaataaaagctttctggataattgggtaaaatattcattagtttctggaacaatatagaaagttagtaaacagattttagtttaagaaataagaatgcttctaggtacattagtatataggtcaggctgccttaataaatagaccccaaaatgtgtagtgattcaaacacaatggaagcttattattgctcacttaacagtctgaagcaggtgttccttggctgggagggaggatagagttgggggaggggagaattgggcagaaagtttgttccctctgtcatttggggcccttagcccaggtacgatgtctctagtcagcttgcccggcctggaggtagcgcaactgacatttcactggttagaacttggttatgtggtcatacttaattgcagcggaggcactcttgcagtccaggaggaagaggagatagaatttgttgaatcaataatagccttcgtcacattcatctactggacaaaggcttaataagaaagatgtatttgttccatttcactctctttaaaaaagaaataggcagataatgaagtagcttcaaagaaaataagttaaaagccctgaatcctagagcattggagttggaaggatacataaaatgtcttttagactcatcatttctccaataaccacaatcagatagacaacctgcttctgtttgaaacttttggttattgggattacactttctaaaaaagcattgcaaaaaaatagctgaactctgactttgtaacttaatagggctggtcttggtcttgctgtctgatgctctggccttaaccctaaccctcatgcaggtccctgtggattgaaggcagccagcatgccttggtcgcacgtgcatagttccttcagatatgtatggagtcacatggtttcaacctgtggagctgttacctaaggcagttctgagcagtgccgaatccactggccccataacagccctatctgaacaaatcccatcccataagacagtgttagattattttggtctataacatacttatacgcaacagtgctgttaaaggtttgccctcaagaatgaagaatctgatgttcttcctcaatcctgaggcccagaaaaagggaatttatttaattgtaacagcagagatttgtctcgaatcaagtagaattgtcgcatccattactgtacacatactactgaagttggttttaatagaaattgaatgcaaatttcaatctcaagtattcatggggtctgatgacatggcagagggtctggaggaagagcccagcagtagcaaaagtaatagctgaagagagagacttagccctggagaaatctgatatatttctccagcaggagaaagataggtagatattaaaggggtgaggggtgagagaatggacttgatttcaaatattaagaggccaggcagcagaatgaacaataaggagttccttggttgagtgtatgtggagactttgataagaaagaaattcgctggtagcgtcacactgactctgacatgtcttcttcgtggggaatatcgttaggttttgagctataacatcatgctgcattatgttttaccaattgatacaaggagagaaaaaaacaaatagtctttaattgaaaccagccaagagaacaatgacaaggaaggctttagcacagtgacacggcataaacaatatgttctaatggaaacctactctgtgtttcatgggctatgaatgcagtacgttagacaaaataggagaaagtcctattatttttcagaaagtacaaagaagggatctgttggctacgaggctttcttctttaatctgcttttcagatcttagtagaaaataattcaacaaattggatgaaagtccaacagtttgactattgcagaatcataaacttgggatttttttgataccttagaaattatttgagtcagtttagagctacttattatacaattttattgctgtagctgctattgtggggcctaactgtaatacatgtaagaaaaacagaatactaggctgggcgcagtggctcatgcctataatcccagcactttgggaggcccaggtgggcagatcacctgaggtcgggagttcgagaccagcctgaccaacatggagaaacctcatctctaataaaaatacaaaattagccaggcgtggtggcgcgtgcctgtaattccagccactcgggaggct

SEQ ID NO: 2896 - DNA, 4036 bp, Homo sapiens
  source 1..4036: mol_type = unassigned DNA; mol_type = unassigned DNA
gggcgccggcgcgggtcctggagccgggtggggaagtcctgcgccctccccctccgtccgcagcccagcctcgggggccagccccctccgcccaccgcacacgggctggccatgcggcggctctgaacgatgtcctcctcctcctacgccaagaacgggaccgcggacgggccgcactcccccacctcgcaggtggcccgaggcaccacaacccggaggagcaggttgaaaagatccgatggcagcaccacttcgaccagcttcatcctcagacagggttcagcggattcctacacaagcaggccgtctgactccgatgtctctttggaagaggaccgggaagcaattcgacaggagagagaacagcaagcagctatccagcttgagagagcaaagtccaaacctgtagcatttgccgtgaagacaaatgtgagctactgcggcgccctggacgaggatgtgcctgttccaagcacagctatctcctttgatgctaaagactttctacatattaaagagaaatataacaatgattggtggataggaaggctggtgaaagagggctgtgaaattggcttcattccaagtccactcagattggagaacatacggatccagcaagaacaaaaaagaggacgttttcacggagggaaatcaagtggaaattcttcttcaagtcttggagaaatggtatctgggacattccgagcaactcccacatcaacagcaaaacagaagcaaaaagtgacggagcacattcctccttacgatgttgtaccgtcaatgcgtccggtggtgttagtggggccgtcactgaaaggttacgaggtaacagacatgatgcagaaagccctctttgatttcctgaagcacaggtttgatgggaggtgagaaatatagatgtttttgtatttttattttcctttaaccaaacttgtgtgataaattgaattgtagatctatgtttccagagatttcagaagttctctagttaaaagttaactcagtattcttgggaagaatataataaaagaactctgaaaatatgaagtataacattgagtccccagtgaagaaaggaccatgagaagaaaaataagccatttgttttatttaaatgtatatatctttattttctcagttattaataatttcataccaaaatgttttttatgaaaaaatattaattaaaatatataatatttctcatgagtatagtggcttgctggtcaaactaggcagtatttgggaattgtgtatgtgtgtgtgtgtgtgtgtgtgtgtgtgtgtgtcatatgaaagcataaatgtcaagtactgaatttcctcaaaagaagagagtgagaattattttaatcataagcctcccaaagtgatcattttgtagggaatagtacttatttggatatttattatagttgtgggttgtttttattagaaatgtccttgttattttattgatctttttttaatgtattttactatgatccatcaacaatatggctcaggcattagccattaaataattttatcatttaagttttgtgaaaaattctaaagaaagtttctctgttttgcagagaaatggtaaaaagcctgtattgactcaattctaaatattaagctctttcacagtgctgaatgcagtccatgtaaaaataaccacatgaaaaaacctgagatttatcagaaatgtaggaaatttaaatggggtgcatcaaaaagtatgggcaaatgcatccagtttattactgtaggattgaagaaaaacatcacattctttatttttgaaggcagtaattaagccattcactttctctttgctaaattatgagaatccactaaatgcacaaaataattttaaaatgtaaaaaaacttcagatagattttaataaattggtatattaagaataaaaacaagcatggtattgctttaaatataaattgtatgcatttgttaaaataaaagctttctggataattgggtaaaatattcattagtttctggaacaatatagaaagttagtaaacagattttagtttaagaaataagaatgcttctaggtacattagtatataggtcaggctgccttaataaatagaccccaaaatgtgtagtgattcaaacacaatggaagcttattattgctcacttaacagtctgaagcaggtgttccttggctgggagggaggatagagttgggggaggggagaattgggcagaaagtttgttccctctgtcatttggggcccttagcccaggtacgatgtctctagtcagcttgcccggcctggaggtagcgcaactgacatttcactggttagaacttggttatgtggtcatacttaattgcagcggaggcactcttgcagtccaggaggaagaggagatagaatttgttgaatcaataatagccttcgtcacattcatctactggacaaaggcttaataagaaagatgtatttgttccatttcactctctttaaaaaagaaataggcagataatgaagtagcttcaaagaaaataagttaaaagccctgaatcctagagcattggagttggaaggatacataaaatgtcttttagactcatcatttctccaataaccacaatcagatagacaacctgcttctgtttgaaacttttggttattgggattacactttctaaaaaagcattgcaaaaaaatagctgaactctgactttgtaacttaatagggctggtcttggtcttgctgtctgatgctctggccttaaccctaaccctcatgcaggtccctgtggattgaaggcagccagcatgccttggtcgcacgtgcatagttccttcagatatgtatggagtcacatggtttcaacctgtggagctgttacctaaggcagttctgagcagtgccgaatccactggccccataacagccctatctgaacaaatcccatcccataagacagtgttagattattttggtctataacatacttatacgcaacagtgctgttaaaggtttgccctcaagaatgaagaatctgatgttcttcctcaatcctgaggcccagaaaaagggaatttatttaattgtaacagcagagatttgtctcgaatcaagtagaattgtcgcatccattactgtacacatactactgaagttggttttaatagaaattgaatgcaaatttcaatctcaagtattcatggggtctgatgacatggcagagggtctggaggaagagcccagcagtagcaaaagtaatagctgaagagagagacttagccctggagaaatctgatatatttctccagcaggagaaagataggtagatattaaaggggtgaggggtgagagaatggacttgatttcaaatattaagaggccaggcagcagaatgaacaataaggagttccttggttgagtgtatgtggagactttgataagaaagaaattcgctggtagcgtcacactgactctgacatgtcttcttcgtggggaatatcgttaggttttgagctataacatcatgctgcattatgttttaccaattgatacaaggagagaaaaaaacaaatagtctttaattgaaaccagccaagagaacaatgacaaggaaggctttagcacagtgacacggcataaacaatatgttctaatggaaacctactctgtgtttcatgggctatgaatgcagtacgttagacaaaataggagaaagtcctattatttttcagaaagtacaaagaagggatctgttggctacgaggctttcttctttaatctgcttttcagatcttagtagaaaataattcaacaaattggatgaaagtccaacagtttgactattgcagaatcataaacttgggatttttttgataccttagaaattatttgagtcagtttagagctacttattatacaattttattgctgtagctgctattgtggggcctaactgtaatacatgtaagaaaaacagaatactaggctgggcgcagtggctcatgcctataatcccagcactttgggaggcccaggtgggc

SEQ ID NO: 2897 - DNA, 2283 bp, Homo sapiens
  source 1..2283: mol_type = unassigned DNA; mol_type = unassigned DNA
gcaccctgagagtctttgttaatggatgtggtggcccgaggcaccacaacccggaggagcaggttgaaaagatccgatggcagcaccacttcgaccagcttcatcctcagacagggttcagcggattcctacacaagcaggccgtctgactccgatgtctctttggaagaggaccgggaagcaattcgacaggagagagaacagcaagcagctatccagcttgagagagcaaagtccaaacctgtagcatttgccgtgaagacaaatgtgagctactgcggcgccctggacgaggatgtgcctgttccaagcacagctatctcctttgatgctaaagactttctacatattaaagagaaatataacaatgattggtggataggaaggctggtgaaagagggctgtgaaattggcttcattccaagtccactcagattggagaacatacggatccagcaagaacaaaaaagaggacgttttcacggagggaaatcaagtggaaattcttcttcaagtcttggagaaatggtatctgggacattccgagcaactcccacatcaacagcaaaacagaagcaaaaagtgacggagcacattcctccttacgatgttgtaccgtcaatgcgtccggtggtgttagtggggccgtcactgaaaggttacgaggtacaaatatcatctgttactcttcagttcttgatcgagcacccaggagacagtcatgttgacgcttgctcctcaagggtctgtttccacgtgggtcctgatggaagccagtgctcagcatgggaaggcagggggtaccgtgtggggctcatgaggccctctgccctttctttcctctcttgcacacttctcatcttttatgtattacattgtttagaaatacctccctcaaaatattcacaatgggaagatctggtcaaagatttgctgtacattaaatgcaaagaaaaggactttatctgtcttgaccattctcattattattagaagtaatagagaatgaacagcacaagaggacaaacaatcaatcttccagcaaacccaaacctttaaagcccaaacagagttcaccctgctgggtttttaagatgatggcatatgccaccaaatccttctctgcttatttattttaaagggcacatgttttaaaagaccactaaaaacattagtgaactttggagattaaacaaaaccatgtgacaaggaaaagagtagagacttcgtttcagatgtttgttttgactttgtgctagcttggattaaaaaataggtagaacgtgacattaaactctgaaggtgagcagcctccagggcaccattcccatcgagctaggacaatgtgtggcacatagtaggcactcagtacacatttgctgaatgaattaatgaatcgctttcaggcagatctaagaatcctggctctatccccctctctttctctcttgtctttctcagagttggaaatgtcagagggatgagcaggagagtggtctacaaaaatccagccatgggcatggagaatttccgccaacatacacaaactagcaggaaggctgagtccagtgctggcctcagttctctagctgctcctcactggaggcaggcacaactcaggcgtgccaaggatacccggcacctgtgtacaaagccagcctgttgtctcctggcagcagttctatcccctaacgagggaagagggaagagggaagagggtctggtgaacactgctggtttattcctcaacaccctggaggagaaccaaggggggtggaaattagcaattgcacatggttaagcatgaaaaacaccttccatggtaacctccccctaggagacgaatggctacaataaggtcttggctcatagtacccttccctccctcctctctcccttttgacttctctctctctctctgcatgtgtttgcctcattctttttttctcacctctgcaaaggtaacagacatgatgcagaaagccctctttgatttcctgaagcacaggtttgatgggaggtgagaaatatagatgtttttgtatttttattttcctttaaccaaacttgtgtgataaattgaattgtagatctatgtttccagagatttcagaagttctctagttaaaagttaactcagtattcttgggaagaatataataaaagaactctgaaaatatgaagtataacattgagtccccagtgaagaaaggaccatgagaagaaaaataagccatttgttttatttaaatgtatatatctttattttctcagttattaata

SEQ ID NO: 2898 - DNA, 605 bp, Homo sapiens
  source 1..605: mol_type = unassigned DNA; mol_type = unassigned DNA
aagactttctacatattaaagagaaatataacaatgattggtggataggaaggctggtgaaagagggctgtgaaattggcttcattccaagtccactcagattggagaacatacggatccagcaagaacaaaaaagaggacgttttcacggagggaaatcaagtggaaattcttcttcaagtcttggagaaatggtatctgggacattccgagcaactcccacatcaacagacggagcacattcctccttacgatgttgtaccgtcaatgcgtccggtggtgttagtggggccgtcactgaaaggttacgaggtacaaatatcatctgttactcttcagttcttgatcgagcacccaggagacagtcatgttgacgcttgctcctcaagggtctgtttccacgtgggtcctgatggaagccagtgctcagcatgggaaggcagggggtaccgtgtggggctcatgaggccctctgccctttctttcctctcttgcacacttctcatcttttatgtattacattgtttagaaatacctccctcaaaatattcacaatgggaagatctggtcaaagatttgctgtacattaaatgcaaagaaaagga

SEQ ID NO: 2899 - DNA, 720 bp, Homo sapiens
  source 1..720: mol_type = unassigned DNA; mol_type = unassigned DNA
agcatcttgcctggtaaatccacaggaattgataaggcaggcgcagttctcccaaacaggccttttctctttaagctgtagctgtggtttctgcagcaattttgtttttgccttgaaagaggtgctctggattatcacacctccatgtatgacaatttgtacctgcatggaattgaagactcggaggctgaagaataatgtgatgtgttacccaagatggtgtgaacagagcttcaagccaatggagaagactaggcctaaatagctgacctggtgaagtgacacataaagccacacctggagtgccacctcctcagcagtctttctcagtgccaatgcatttatggctggttcagcggattcctacacaagcaggccgtctgactccgatgtctctttggaagaggaccgggaagcaattcgacaggagagagaacagcaagcagctatccagcttgagagagcaaagaaatataacaatgattggtggataggaaggctggtgaaagagggctgtgaaattggcttcattccaagtccactcagattggagaacatacggatccagcaagaacaaaaaagaggacgttttcacggagggaaatcaagtggaaattcttcttcaagtcttggagaaatggtatctgggacattccgagcaactcccacatcaacagcaaaacagaagcaaaaagtgacggagcacattcctccttacga

SEQ ID NO: 2900 - DNA, 745 bp, Homo sapiens
  source 1..745: mol_type = unassigned DNA; mol_type = unassigned DNA
actttacagctgaagaaaaagaaatccagcaaaattaaatgatttgcccaaggtcctataaccagtggactgcaaggctggactagagggcagagtttccatcccatgggtgcaggccaggtcctgagggacacgcttctctctgtagagagctgtctctcctgctcacatcctgggtaaatccttattggcaaagaataaggtgggagagaaggtggccaacaaagtgctagctctgccaacttctctcatcgtcaggagacaagtgttgcagggttcagcggattcctacacaagcaggccgtctgactccgatgtctctttggaagaggaccgggaagcaattcgacaggagagagaacagcaagcagctatccagcttgagagagcaaagtccaaacctgtagcatttgccgtgaagacaaatgtgagctactgcggcgccctggacgaggatgtgcctgttccaagcacagctatctcctttgatgctaaagactttctacatattaaagagaaatataacaatgattggtggataggaaggctggtgaaagagggctgtgaaattggcttcattccaagtccactcagattggagaacatacggatccagcaagaacaaaaaagaggacgttttcacggagggaaatcaagtggaaattcttcttcaagtcttggagaaatggtatctgggacattccgagcaactcccacatcaacagcaaaacagaagcaaaaagtg

SEQ ID NO: 2901 - DNA, 1807 bp, Homo sapiens
  source 1..1807: mol_type = unassigned DNA; mol_type = unassigned DNA
gctttttgtgctctgtattgggaaggcagataaaatgccaggtctggactgcctctggggataacctcaccctgtgggatgtgaatgaatagcatcttgcctggtaaatccacaggaattgataaggcaggcgcagttctcccaaacaggccttttctctttaagctgtagctgtggtttctgcagcaattttgtttttgccttgaaagaggtgctctggattatcacacctccatgtatgacaatttgtacctgcatggaattgaagactcggaggctggttcagcggattcctacacaagcaggccgtctgactccgatgtctctttggaagaggaccgggaagcaattcgacaggagagagaacagcaagcagctatccagcttgagagagcaaagtccaaacctgtagcatttgccgtgaagacaaatgtgagctactgcggcgccctggacgaggatgtgcctgttccaagcacagctatctcctttgatgctaaagactttctacatattaaagaggtaaatgtagaacatactgcatcccttcacctgccaaaaagctgaagccaggaatcagctctgagccaaactagccagagaggagacccaaggagctgccagtgcagtacatgatttaatttgctgagcctcccaaatctagtcattctcattaagattgagaagtctgagatcattgcttgcattatcacacactgacaacattaaatcacagtcaaccttaaaattatagcatagatttctgacagacctctatggtcctctgggcacctttaaatccccttctgtgactgcagagccataaatatatggatccaactttggaaaatgtaagtttggtgtcatggcacctacccagaagggactgtttacaggggatgttgtaattatagacatgtagactatagtgctgtgcaccttgactatggaaccaacactagagtgtataatcattcaaagaaagatttacagctaagaaaagggcagagggctctgggaaacagaaaggcaaaagggtaaagtgtttgagtagccaagaagggtgggatccaagacccctagtggagggacagacctttgatagaaagaagaatgctaattcattgtgacatgcagggaaaagatgagtgcaggcacagacacttcagggccttgggaataggaaactgaggacccatcaacttcaaccatggcctctactttcttgatggtatatgaggtgaggatgtctacatttgtctagaagacaagaactcttgacctgaaacatgtgccctggcatctgaatggttaagttgattatgtctcaccatttccatcaaaaatgcccaagccatattcattagttgctaatacccactgtgtccaaggagaagcaccacttgaaaaggtaagagatgttcttacatgtgacatgcacactcactcacaccaacattccaaccttgtatttgattgctttcctgcattgtatcaaggtctcaatttgtcctggctgctgtttgagctatgtgcttgttgatcagtgattttctcttcagtctggcagtttgatgtgacattgagctggtaatcttatgtggaccagagcctcttgttttcatgtcttgaaattatcagataagaaaacatctttgatatagaaagtgctaatcattttagggaaatccaaatagagaagggttggaacaacaccgaggtgacctctgtagagagctggcacaagttcccagaacatcaacacaaatgaatacatttctataatcaagttatagccttccctctc

SEQ ID NO: 2902 - DNA, 1174 bp, Homo sapiens
  source 1..1174: mol_type = unassigned DNA
caccatgcccggctaatttttgtatttttagtagagatggggtttcaccatgtcagccaggctggtctcaaactcctgacctggtgatccacccaccttggcctcccaaagtgctgggattacaggcgtgagccaccgtgcccagccttcagtgctgtttaaatagctcttctagtgtgggcttcaactgagaacatccctgttttcatcctcaaggttgtttttctgctcagtgttcttgttgaccacgtctgggctgctgcaggacaatgattgaagttttagtagtgaaagagttcaatagtgttgacattgaaactggaaaatcattttactaatgtaagatgatgctttactatattgaaatcttagacaaatagatgacccatagcccaaatacaggtaggatttatcttttgtaataagctgagtctctttttcctttagatgtatatgcaaaagagaagatggatgaaaactaacgtttcacaagtgatatgggcttaatatagcacaaaacaagaagaattggtgctgagtatcacataattttcattgcagtttacttcctagcacttaatctagtcaaaatatttttcttcacaacattgctactttccgaataactcagatgcttaactatattctgccatctaaatttatatctgcaataaggcatggagtgtgtgcatcaaattttaggcaaatgaaaaagaactcgccccaggatactgttatggatgtgacaatttaagaagctacacatcatctgaaactattctattttctttgccagggttcagcggattcctacacaagcaggccgtctgactccgatgtctctttggaagaggaccgggaagcaattcgacaggagagagaacagcaagcagctatccagcttgagagagcaaaggtgagtctctttccttctctttggctcaaaagtgggtcgttgctcagtggctaccagctgctcttcccttacctcacatttctggaataatcattttgtgattattctaacaaggctccagattgggaagctctctgatcctttcacctctaagtgaggttagtaacatctccaaagaggcatttcctcagaaccttcacctttttgtatttggtttggtggtgaattattggtcgtcttccaacttagcaatatcaa

SEQ ID NO: 2903 - DNA, 430 bp, Homo sapiens
  source 1..430: mol_type = unassigned DNA; mol_type = unassigned DNA
gcccgcagcctcccccagcggatgccggggactcggaccccgcaccctgagagtctttgttaatggatgtggtggcccgaggcaccacaacccggaggagcaggttgaaaagatccgatggcagcaccacttcgaccagcttcatcctcagacaggaagaataatgtgatgtgttacccaagatggtgtgaacagagcttcaagccaatggagaagactaggcctaaatagctgacctggtgaagtgacacataaagccacacctggagtgccacctcctcagcagtctttctcagtgccaatgcatttatggctggttcagcggattcctacacaagcaggccgtctgactccgatgtctctttggaagaggaccgggaagcaattcgacaggagagagaacagcaagcagctatccagcttgagagag

SEQ ID NO: 2904 - DNA, 6849 bp, Homo sapiens
  source 1..6849: mol_type = unassigned DNA; mol_type = unassigned DNA
attgggaaggcagataaaatgccaggtctggactgcctctggggataacctcaccctgtgggatgtgaatgaatagcatcttgcctggtaaatccacaggaattgataaggcaggcgcagttctcccaaacaggccttttctctttaagctgtagctgtggtttctgcagcaattttgtttttgccttgaaagaggtgctctggattatcacacctccatgtatgacaatttgtacctgcatggaattgaagactcggaggctgtaagtattttcatagatagctaattccctctcccctcctcttcctcctcccactatcccctccacccccccgcttcttatttcttaggcaacgcagggaacatggagcagaaagctaacatcattctggggcttgctggctgctgtgtaaatgttctctgtgtagtttataggtaactaaaattatttattgtcaagcaaaaaagaaattagggtgatggcaaagcattcaagagtgtaggctgtttgaatttatacattaccgggtccacgtttgatctcaccaggggtaactgctccttgcagactggtttaaactatgcagaaagtgcctatgttttccaatagcagggttcatagaaaagcctcattcattatataatacacattgtttgttgagctagcatgaatggaagttcctaagctgtggctgtattattatgtgctttctggccaaacaagcagtgcagatatactgcttctttgttaaggaaatcagatgctaggcttgtggccatacagcaatccagtgcagaggcagtgggcagtgttcctatactctaccttggaagagcgaagcagactcacgtgtgttttgggttagagaactggactccttctcccccctaggtcaggctcatgcaatctgttaaaatcagggtgaaataatttcctgaaatccctgaaatcataccatagagtgctagcttttaaatataaggtaaagctgataattgaatctttcttttgactcttgctggtggtagttcctatttttttcatcaatacacagaaacctcgcaaggtagaatggctgggggtggttaatgggaagtgctgtggggagtctgaattttatgtgagtgcagtgccaatacatgttgctacatttgaaacaggagtgtgttatataagattctctggctaaaccaccaaataaacaggttataacaaaaaaaaaacaaaaaacaaaaaaaaaccctgtggtatacgtcaatgcagacgtatatgtctaatgatgtgctatccatgaaagatagaaatcctcagttctgttaaggcattccatttttccttcctgtctgtgtgttttctctaactctaactctgtttccgcaaagtctctctgcgtgttgcccaacgtgctcataaatgatcagactgtcagtgtattgtaagggactgtagtctgaaacattggtggctgaaatcaagaaggtccacacttgcaggtggggtgggggaatggcaaaggcaattacaggagttcagtaagccagcttcctgggctggtttcttcagaaggcctgatcacttcttctaccccttctctgctcactcagttatgaaacctatgatgccttgtgaattgtaagttttattttcggccattgattttaaacttgggcaggcagtgaattgcaccgaagtggactggagtcattttagaaatgcctgtagaaactggctgctgtgaagagttggctaggaactaataaatccagctccttgttctccagaactgtatacatttcagatgcactggttcagaggggagccattataagtatgaaaacatttttttttttttttttttttgcctttgggtccagtgtcacaggacagctgagtttttctgtaagatgggaagtgaagagtgcagtgacttgactcggtggcagtagttgatggcgggtagtgctaggtactgcagtgctgtactcctggtgactcagtggtggccagcaggctgagatcctccgggctgtgcacatctgtggaggtgaggaaggtgggaaacatgaggagtggagttgggcatctggccaatcctcagttgagagtatgggaggctttcaggtgggcgggattgaaaccgtgtcacataaatcaggggaagagagagatgttcggaggggtgaactgactctgaatgctcatttgagtttatttgtttttataaggaagaataatgtgatgtgttacccaagatggtgtgaacagagcttcaagccaatggagaagactaggcctaaatagctgacctggtgaagtgacacataaagccacacctggagtgccacctcctcagcagtctttctcagtgccaatgcatttatggctgtaagtgtggggggttgtccagatggaagcagagctctcggaacaggtctggtggataggcgtggaaaggcttttctcagatggctagctgcagtccgagaatatataggcactaaaagctgagtacggcacttcggttgggggtgggggttggggaaccatccgcatatgtcctaccgttctgtgctgttgaaaatgtctttgtggggtgtgtgggggttaacttgtgataagtgattattttcaatgttttcacacagtaagcttgtaataagatcatcttgcctagggacaattttattccgaataagagtaaaccattattatacactgttagcacctcacatccccacagtaggagagagatgttggtactgtgatgcaaggctttcttaagagtttggtccaaaagtagatgttatgctcccagtgccctagattttagtttgtaacctccgtgtttcacatactctatatgtgaagagagaggaaaaagaaacatgccgaaacacacttgagtcaggcattttagattctttttttttttttttttgagacggagtctcgctctgtcgcccaggctggacattttagattcttgagtcctgtggagcctttttgggcaagtccattaacttctgctttggtgtccaggagggtagttaagaatctggattacaaggaagtgcaaaagatcattcagtgccccacagcagggccccacttccgaataggagatttcacacagaacgtcaccttacttcttgtattaccttgacatagatgatggagtgtgtgcttccagatgaacccatacctagcccaggctggttccagtggatcatgcacatcgactcttcctacattagctgctatataagagctgcctattctaccttcactgtccccactgtgtgttaatacaagttctagtggccaagatttttttcatggactgagccccccatgtacactatactatgtgttttcatctgatttgcagtagatttcattagacctgctctttagtgtgtacgtgtatttcataaatggattcattgtgtattttgatgtttgtggaattattctggaaatagatttattttttcattcatcaggtttattacacaaaccgagggatgttcttatggggatccatggacgcagcagagaaagttaccaaaaacctaccacccagaaatagtcattgttaatatattgctacacaccctttcagatgatcaatccacatatatgtaaataggtcagtctcaacctgctactgtgtgttgcaccctattctgtcaaatgctgttcttacttgagaaaatgttgagcatactaggactagaactggcctgcacaggagacactttgcaaaatttaaagctcctacatggaccttctggaattgtgagtagcttgaaatacggattcttagggtatattgtacggtgatgccggggttagttgcacataggagtaatagttcatttctctgacacaattgcttccatttccaaatgcttaaattctaaagcatttagaaagagggacctgatcttttcctgtgaaaaagatgatcagatcatcattcagggcaatttccagagaggaaaatatagtctttaagtgttttcaatcatagaaaggaatcataatatattgattaatactgttagaaattttatgtatgtaaaagttacagcaaagtaaattttacaaacttaatatgtatgtataacaatatctgagtgtatatataaaagcacatacttaaatttacatgtacgtacacattattataagaatagctttgtgttaaactatttattttctataagctgtggaactatgtatgtttgtctcaatgtctgtgcacctctgcatgcatgcgtactgttcaccctggtaccttcacctacattcatatacagatatgttccatgcatcgctaattgatggttaatgctaagtgggagatgtctactgtggagcttttggagatggaaaattagctgcttttgatgtgaacaaagatacccaagagagttgaaaggcaaagcagcctcaagagaataaaggattgctcctttcaaagatatagtaaagttattttaaatatgaagatatatccttgtgcttgctagggaggcggataaacttcagacagaaggatttatatgtttaggggccttcagaagacactttagggatttaaggattagatttcttttggaaacaagaaggccagaggtctctatggtttggtggatcagagcatctcttctggagtcaaaaagtctttctggcctatttatagagaatgaggactgatctgtaagagaatccaaggactggatgttggcatctctgaccacagaagaaaaccaaatgttgctcctggtttgtgtagggaatttgactgagaaaaatcaagttgttttactcagctgagctgtgttggtgtttggctaggggtgtgttaagtaaatgacaaacagggctttctcttcaatcagcaatgatggttttctaaaatatatattgaaattatttctagatataattggcatggagccaaagagagaaattccttgaatcgatcagatcccatgaatttgctgttccagcttgtcaatcttgctgctttcttgttaattttctatttttgagtcacagaggcaagaattcggatcaatcctcgccaggtacttccatgtctccttttctgctgctgttattattattattagattatgatgagtcaatccaggattttagaatatggccctgtgactccctttgtatgtactcaatggacattccattattctgtggtgcaagacattctgtaaaagggtcagcaataaccgtgaaaaatcattattttagggtgaaggtggggaggcttcccattaccttagctcttctctttctgtggggttcagcttggaccttatttctatgtcaacagttctcccattctggtcactgtctcccctttaccgtctcttacccaggtgaacaaggccacttaaggaggacaagaggatataactggactggttatcatcgttcattctcttctcttccctctcccacttgtcctttaaaataatcatgaagccatgaactcagatatccataacattaagttaaaaattgtaccaaggaagcgctacagatataggctctgtgttctcatctacatcggctgatttaggggcctttcatgtgtttgcatcaggctctggcggctgtgaaaacagcaacagctgtaacctgccacactagaaaaaatacattcattgggtggatccccgagttctcacaggaggctggggcactgccgtgtaaagctagcgccctgccctcagaacaacttagtgtgtaaaacctaaaggagcttacagttcatataaaataatgacaactttgagctttttaagactttgaagggcgtgagtctaagataaaactgtgtggctatttttacagcatgtattggtatgccaaaagaaggtagcccagatagctcacgtgacaatttttgacatctaaatagaccaatacttgctcttgctctacattttatattcttttataacataactatatagttttagttataaatattttcctctctttttaaatggtgccacattatcagtacttcctgtgtccttttttttcttttgtgtctgtcatgagaaatattgaaaagtcttatatttaaaacaggatgttttgaatttgcttttagccttttcattcagaggagttgatccaaggtatccactcagacatggagattggcaactgtcaattactcaggagcttgtctgtgtagtttgtggaaaaaaaaaaacaacagttctcttattttgcctttcttatgcctgttattccttaatctcccttttctttttagcctgagcatcatataggaaaaagattctgaccttctacgttattactctattggcagctttgttgaaaagtttggtgagtgataaggttgtagttgaaattgtttctagatctttttaaatctccataagacttaaaaaattttgccttctattgggcatatctatcagccaggaaaatttctattttactttttgtactttgtattatgaaaaaatgttgtagtataatagtgtcatgattgaaagtggagacagaccaggcgcggtggctcacacctgtaatctcagcactttaggaggcacagatgggcagattgcttgagctcaggagtttgagaccagtctgggcaacatggcaaaaccccatctttgcaaaaaaataaaaataaaaaaaattagtggggcatggtggcatgtacctgtagtcctagctactcaggaagctgaggcaggaggatcgcttgagcccaggaggttgaggcttcagtgaggcctgatcatgccactgcacttcaggcttggtgaca

SEQ ID NO: 2905 - DNA, 4858 bp, Homo sapiens
  source 1..4858: mol_type = unassigned DNA; mol_type = unassigned DNA
gctttttgtgctctgtattgggaaggcagataaaatgccaggtctggactgcctctggggataacctcaccctgtgggatgtgaatgaatagcatcttgcctggtaaatccacaggaattgataaggcaggcgcagttctcccaaacaggccttttctctttaagctgtagctgtggtttctgcagcaattttgtttttgccttgaaagaggtgctctggattatcacacctccatgtatgacaatttgtacctgcatggaattgaagactcggaggctgaagaataatgtgatgtgttacccaagatggtgtgaacagagcttcaagccaatggagaagactaggcctaaatagctgacctggtgaagtgacacataaagccacacctggagtgccacctcctcagcagtctttctcagtgccaatgcatttatggctgtaagtgtggggggttgtccagatggaagcagagctctcggaacaggtctggtggataggcgtggaaaggcttttctcagatggctagctgcagtccgagaatatataggcactaaaagctgagtacggcacttcggttgggggtgggggttggggaaccatccgcatatgtcctaccgttctgtgctgttgaaaatgtctttgtggggtgtgtgggggttaacttgtgataagtgattattttcaatgttttcacacagtaagcttgtaataagatcatcttgcctagggacaattttattccgaataagagtaaaccattattatacactgttagcacctcacatccccacagtaggagagagatgttggtactgtgatgcaaggctttcttaagagtttggtccaaaagtagatgttatgctcccagtgccctagattttagtttgtaacctccgtgtttcacatactctatatgtgaagagagaggaaaaagaaacatgccgaaacacacttgagtcaggcattttagattctttttttttttttttttgagacggagtctcgctctgtcgcccaggctggacattttagattcttgagtcctgtggagcctttttgggcaagtccattaacttctgctttggtgtccaggagggtagttaagaatctggattacaaggaagtgcaaaagatcattcagtgccccacagcagggccccacttccgaataggagatttcacacagaacgtcaccttacttcttgtattaccttgacatagatgatggagtgtgtgcttccagatgaacccatacctagcccaggctggttccagtggatcatgcacatcgactcttcctacattagctgctatataagagctgcctattctaccttcactgtccccactgtgtgttaatacaagttctagtggccaagatttttttcatggactgagccccccatgtacactatactatgtgttttcatctgatttgcagtagatttcattagacctgctctttagtgtgtacgtgtatttcataaatggattcattgtgtattttgatgtttgtggaattattctggaaatagatttattttttcattcatcaggtttattacacaaaccgagggatgttcttatggggatccatggacgcagcagagaaagttaccaaaaacctaccacccagaaatagtcattgttaatatattgctacacaccctttcagatgatcaatccacatatatgtaaataggtcagtctcaacctgctactgtgtgttgcaccctattctgtcaaatgctgttcttacttgagaaaatgttgagcatactaggactagaactggcctgcacaggagacactttgcaaaatttaaagctcctacatggaccttctggaattgtgagtagcttgaaatacggattcttagggtatattgtacggtgatgccggggttagttgcacataggagtaatagttcatttctctgacacaattgcttccatttccaaatgcttaaattctaaagcatttagaaagagggacctgatcttttcctgtgaaaaagatgatcagatcatcattcagggcaatttccagagaggaaaatatagtctttaagtgttttcaatcatagaaaggaatcataatatattgattaatactgttagaaattttatgtatgtaaaagttacagcaaagtaaattttacaaacttaatatgtatgtataacaatatctgagtgtatatataaaagcacatacttaaatttacatgtacgtacacattattataagaatagctttgtgttaaactatttattttctataagctgtggaactatgtatgtttgtctcaatgtctgtgcacctctgcatgcatgcgtactgttcaccctggtaccttcacctacattcatatacagatatgttccatgcatcgctaattgatggttaatgctaagtgggagatgtctactgtggagcttttggagatggaaaattagctgcttttgatgtgaacaaagatacccaagagagttgaaaggcaaagcagcctcaagagaataaaggattgctcctttcaaagatatagtaaagttattttaaatatgaagatatatccttgtgcttgctagggaggcggataaacttcagacagaaggatttatatgtttaggggccttcagaagacactttagggatttaaggattagatttcttttggaaacaagaaggccagaggtctctatggtttggtggatcagagcatctcttctggagtcaaaaagtctttctggcctatttatagagaatgaggactgatctgtaagagaatccaaggactggatgttggcatctctgaccacagaagaaaaccaaatgttgctcctggtttgtgtagggaatttgactgagaaaaatcaagttgttttactcagctgagctgtgttggtgtttggctaggggtgtgttaagtaaatgacaaacagggctttctcttcaatcagcaatgatggttttctaaaatatatattgaaattatttctagatataattggcatggagccaaagagagaaattccttgaatcgatcagatcccatgaatttgctgttccagcttgtcaatcttgctgctttcttgttaattttctatttttgagtcacagaggcaagaattcggatcaatcctcgccaggtacttccatgtctccttttctgctgctgttattattattattagattatgatgagtcaatccaggattttagaatatggccctgtgactccctttgtatgtactcaatggacattccattattctgtggtgcaagacattctgtaaaagggtcagcaataaccgtgaaaaatcattattttagggtgaaggtggggaggcttcccattaccttagctcttctctttctgtggggttcagcttggaccttatttctatgtcaacagttctcccattctggtcactgtctcccctttaccgtctcttacccaggtgaacaaggccacttaaggaggacaagaggatataactggactggttatcatcgttcattctcttctcttccctctcccacttgtcctttaaaataatcatgaagccatgaactcagatatccataacattaagttaaaaattgtaccaaggaagcgctacagatataggctctgtgttctcatctacatcggctgatttaggggcctttcatgtgtttgcatcaggctctggcggctgtgaaaacagcaacagctgtaacctgccacactagaaaaaatacattcattgggtggatccccgagttctcacaggaggctggggcactgccgtgtaaagctagcgccctgccctcagaacaacttagtgtgtaaaacctaaaggagcttacagttcatataaaataatgacaactttgagctttttaagactttgaagggcgtgagtctaagataaaactgtgtggctatttttacagcatgtattggtatgccaaaagaaggtagcccagatagctcacgtgacaatttttgacatctaaatagaccaatacttgctcttgctctacattttatattcttttataacataactatatagttttagttataaatattttcctctctttttaaatggtgccacattatcagtacttcctgtgtccttttttttcttttgtgtctgtcatgagaaatattgaaaagtcttatatttaaaacaggatgttttgaatttgcttttagccttttcattcagaggagttgatccaaggtatccactcagacatggagattggcaactgtcaattactcaggagcttgtctgtgtagtttgtggaaaaaaaaaaacaacagttctcttattttgcctttcttatgcctgttattccttaatctcccttttctttttagcctgagcatcatataggaaaaagattctgaccttctacgttattactctattggcagctttgttgaaaagtttggtgagtgataaggttgtagttgaaattgtttctagatctttttaaatctccataagacttaaaaaattttgccttctattgggcatatctatcagccaggaaaatttctattttactttttgtactttgtattatgaaaaaatgttgtagtataatagtgtcatgattgaaagtggagacagaccaggcgcggtggctcacacctgtaatctcagcactttaggaggcacagatgggcagattgcttgagctcaggagtttgagaccagtctgggcaacatggcaaaaccccatctttgcaaaaaaataaaaataaaaaaaattagtggggcatggtggcatgtacctgtagtcctagctactcaggaagctgaggcaggaggatcgcttgagcccaggaggttgaggctt

SEQ ID NO: 2906 - DNA, 3088 bp, Homo sapiens
  source 1..3088: mol_type = unassigned DNA; mol_type = unassigned DNA
actttttgcccgcctaagcgagccatagagccgtctccagagctgccggtgcctttaagaagactcggtctttcgggtcttctttttccccaatgggctccagtggtgcccgcagcaaaaggcaaacttgcctggctcatggggtgaaagggaggattgaagaatgccgcgttgggtgggtgctgagggagcgccagagtgcgctacgggcttcgctccccttcccctttccttaacccttcctagagcggaggaaccgggtcgtgctgcagcgcccaggagccagggcgctgactgtcctcggctccagaaactttgcgcggagagtgggcttgactgggcagagccgagccggctggctgacccgggaaggaacgggggaagggcggggtgagggaagaaagaccctttagcaccccgggtttctagcccgggcggcggtgtgcagctgcatgagggagctgtcccttcggcaccacggaccttaaagcctaggcgttaagacgacggaggcggggcaacaggcggggagctgtcccttcagcaccacggaccttggcgcccccagggaaaccagccggcccccgccccaggactctgtcttttctccagtttgagcgggggtgtcgggagcaggcggagagctttcctgcgaggctgtggaagcagtgaacactcttctcagcggctcgcctcccagcagtgctattttttgccatccgccctcacccccagcacacgcgctcgcacacacacgcacgcacgcacacacacacacacacacactcacacagagacctctctgggtttctttgccttgagtctcccggggctgtgagaagccaggcgcatctcaaaccgagctggcagctccaggctccggagccatgccctgcacggaccctcgtctttaccacgctcctgaggaatgaaaggaacccagggaccctcagaaggcagcagtgatgcggaccaaccccccggagcctgcacccttccgagggccataggcgacccagggaactggagagagctccagaaaggaaatcccagctttcccaaagtccctgtggatgctgacaaaaggagacctgaatttttggaagagcctgtactaggttacccggctgcagagtgattttcccctccggcactgactctccccctccaacccccagccgtccagagtaccatgaagaattatgaggatgtgtgacagaggtatccagatgttgatcaccactgtaggagcctttgccgcttttagtttaatgaccattgcagtgggcacggactactggttatattccagaggtgtgtgcaggactaaatctacaagtgataatgaaaccagcaggaagaatgaagaagtaatgacccattcggggctgtggaggacctgctgcctagaaggggctttccgaggcgtgtgcaagaaaatcgatcacttccctgaagatgctgactacgaacaggacacagccgaatatctcctgcgagctgtgagggcctccagtgtcttccccatcctcagtgtcacgctgctgttcttcggcgggctctgcgtggcagccagtgagttccaccgcagcagacacaacgtcattctcagcgcgggcatcttttttgtctctgcagggttaagcaacatcattggcatcatagtttatatatcagccaacgccggagaccccgggcagcgtgactccaaaaaaagttactcctatggttggtccttttatttcggagccttctctttcatcatcgcagaaattgtaggagtggttgccgtgcacatctatattgaaaaacatcagcagttacgagccaaatcccactcggagttcctgaagaaatctacttttgcccgcctcccaccctacaggtatcgattccggaggcggtcaagttctcgctccaccgagcccagatcccgagacctgtcccccatcagcaaaggcttccacaccatcccttccactgacatctcgatgttcaccctctcccgggacccctcaaagatcaccatggggaccctcctcaactccgaccgggaccacgcttttctacagttccacaattccacacccaaagagttcaaagagtcactgcataataatccggccaacaggcgcaccacgcccgtctgaactgacctctgacctctgccccacgcccagcacagccttgggggaagtgtacagagatgtctctgaggttgcatggcatggtccttgtgatggtattactttttacaaagaatgaaaccaaatggactcagccctctcccacattttcccctcaccctccaagtcctaacccctccatcctctctaacttttcaagccaatcccttaatgtcattcctctctctgtgtatctgtgccagatgttttcctttcttccttctttactggaaggacctccacattcttccctccttggaagaggactttactaaaagtcacaggtggtggccaggggggatttccgaatctccatcaggcgcgctcatagttgtccccattgtctacccacacaaatcctcaggaaaccaaccaccgcccaggtggccctgagggaggcattcacctttatgtgttagaaaaacatgaccagaaatcaaagatgtcagagccccgaagcagctaatgtaataagcactcatgttattaaaggttttgccttgtcgtaaccaaccgagccgggggtgttttgtttcttgtgggtgtttcctacacaaactcactcccctgcctccaaactggctcatgtccatcttggaagctgaactttgctcatccacacttgagccactaggaaggatctccctgcacctttggaagctagtaaggcattcccacaaatgtccaaatcaatgcatccttctacttgaattcctggaggctacctgggggtgggtgagtgaatgctggttttcaagatctaactttggcatgcaatagctctagaaccttgggcaagtcacctaagcctcaagcctcagtctcctcatctgtaaaatggaacatgataatagcactctcctccacagagttatgaggtttaaataaaactgtgtgtaaaa

SEQ ID NO: 2907 - DNA, 3380 bp, Homo sapiens
  source 1..3380: mol_type = unassigned DNA; mol_type = unassigned DNA
ccatggtgcgatgcgaccgcgggctgcagatgctgctgaccacggccggagccttcgccgccttctcgctcatggccatcgccatcggcaccgactactggctgtactccagcgcgcacatctgcaacggcaccaacctgaccatggacgacgggcccccgccccgccgcgcccgcggcgacctcacccactctggtctgtggcgggtgtgctgcatcgaagggatctataaagggcactgcttccggatcaatcacttcccagaggacaatgactacgaccacgacagctcggagtacctcctccgcatcgtgcgagcctccagcgtcttccccatcctcagcaccatcctgctcctgctgggtggcctgtgcatcggtgctggcaggatctacagccgcaagaacaacatcgtcctcagtgccggcatcctcttcgtggctgcaggcctcagtaacatcatcggtatcatcgtctacatttccagcaacacaggtgacccgagtgacaagcgggacgaagacaaaaagaaccattacaactacggctggtctttttactttggagctctgtctttcattgtggctgagaccgtgggcgtcctggctgtaaacatttacattgagaaaaataaagagttgaggtttaagaccaaacgggaattccttaaggcgtcttcctcttctccttatgccaggatgccgagctacaggtaccggcgacggcgctcgaggtccagctcaaggtccaccgaggcctcgccctccagggacgtgtcgcccatgggcctgaagatcacaggggccatccccatgggggagctgtccatgtacacgctgtccagggagcccctcaaggtgaccaccgcagccagctacagccccgaccaggaggccagcttcctgcaggtgcatgactttttccagcaggacctgaaggaaggtttccacgtcagcatgctgaaccgacggacgacccctgtgtgagccgcctgccctttctctccgctccagcctctccccagaacggctctttttgtcacacaggatggcatgtgatcctcaagacgacgaacaatgaactaaagccaaatgcagccctccctggcctccagaggtggcgtgggctggctttgcacgaaggttgtgctgggagaccggacccggggctgcagaagaagctgaaggctgactttgtcccctccccgaaaaagggtgttttgatgcctcagggtctctgaaatctcccgggaagccccagagctttcctgaggctgcctggccttgatcaacttgggaagacaaaattgagccattatctcctcttggaaacgaatcttgccagaaaaacgggatttcagggccttccctccctgcctgggtgtcgggccaccagaaggctctgccggacgccaagaagacggtctctgggctcttgtcagctgcttttgaacctgaggttcctgcgtcgttgagccagaaatcagaccaccgaagctcactcccttcctctccatctctccctctctccaagactctggcagtggcctatgatcctgaagacagctctgcagccaactggtgctttggcctttgcgctgtcccggggccagcttccctcgacctggggaggccgtggcctgtggaggaggcccaggtaaaggctgggggctgttgctggctatcctctttgcttctggaagtttctgcctcactcagaatgggcaggacagacccactgactggacttcagagtctggagggttccatcggtcaggggaatggcggccacgtgacctcttgccgtgccccttgtcatagacccaaggagcaactctgtcccctgagcgttgggggtcccgggggagaggtggacagacacctccctccaactggcatttggcaacaggagcctggacttctgtgcaagaaagggagacctaagggtgaacagtggccaataaaaaccctagagaacaaacatccatttcctaggtggttacaaatcataacttcctgcaaatcaacgccaggagagcaacttaccttcatttctttgtcttaaaaagtagcagcaactggccccacaactcctgtcattgtaagttattctgccaccacctaacaggacggagtggagtgagtttggataaacggaccgagctgggcttctcttcctccctacagaggggagatctcagcactttgtccggagctgaggaagtggtttctgtgttttacagtttttccagccattcttttcttccccctcctgaagcaagcaaagagcgtggaggcgtgtgcaggcttggaagaagaactctccagaacatggaacttaaccctcttttgtataaaacatgtgctttctaaagaaaaattgtttcttattttttgagactccttgatccaccctggaacagtcgcctgtagtcctggtagctgttgtgcttggaaataacgagcgcatccttgcctcagctacctgctcacagcccatgggtggactcggccccctggggttcagacccaggtccgttcggcctagtgatgatgtcatcgtccatcccatcttcctttgcccccaggaaaggacgcatccaccggtagcggccccagctgactgtcgccgtgtgctggggatctgaaatgaggcctgccagggcccctgtgtgctgtgctccagagccttcgctcccatcagggttggcatcatctgatggcatgtccaagtgtgcccagcagcggatgctgaagcaccagagctcaaggccttcacctgctctaggccagccctgtcaccacctccactgccatgaccaggccgaaggcagggaacgccctccccagtcccgctgtccagcaaggccccgagacttttcttctgtgatttccaaaagcaaggcagccgtgctgttctagttcctctccatccgccacctcccctcccgctgccccagaagtttctatcattccatggagaaagctgtgttccaatgaatcctacctcttgcccagtcccaggcagagtaagcagggcccacctagggaccaagaaagagtaggaagaaggggacgagccgggagcaaaaccacctcagacacccgggccttctcagccttctccccgcggccagctgggtctccggggaccctgggccctgggccgcccattcctggccctcccgctgcatctcagacctgacacccaacggggggatgtggtggcctgtgcccaccttctctccctcctcccgacccgccccctcgcccccacccctgtgtgtttcgccagttaagcacctgtgactccagtacctactactggttttgggttggttgttctgtcttttttttaattaaataaaaacatttttaaaa

SEQ ID NO: 2908 - DNA, 1311 bp, Homo sapiens
  source 1..1311: mol_type = unassigned DNA; mol_type = unassigned DNA
attggcgccgagcggttccggctgactggacggggcgggcgtcccgggcagcctagcgcggtacctcccgccccgcgcgcccagccggcgagggacattggaccagggtcgggggtcgcggccgctccagcgagagccgtgggtactgccacctgctcacccactctccctagccccagagcgcagtccgtgctggtgggagcgtggcgactagttgcacagcaacggtccaggaagatgagtgcctgcgggaggaaggccctgaccctgctgagcagtgtctttgctgtctgtggcttgggcctcctgggtatcgcggtcagcaccgactactggctgtacctggaggagggtgtgattgtgccccagaaccagagcaccgagatcaagatgtccctgcactcaggcctctggcgggtctgcttccttgcaggtgaggagcgggggcgttgcttcaccatagaatatgtgatgcccatgaacacccagctgacatccgagtccacggtcaatgttctaaagatgatccgctcagccacaccattccctctggtcagcctcttcttcatgttcattgggtttatcctgaacaacatcggacacatccgtccccaccggacgatactggcctttgtctctggcatcttctttatcctctcaggcctctctctcgtggtgggcctggtgctctacatctccagcatcaacgatgagatgctcaacaggaccaaggatgcagagacctacttcaactacaagtatgggtggtcgtttgccttcgccgccatctccttccttttaacggagagtgccggggtgatgtctgtgtacctgtttatgaagcggtacaccgcggaggacatgtacaggccccaccctggcttctaccgccctcggctgagcaactgctccgattactcaggccagttcctacacccagacgcctgggtcaggggccgcagcccctccgacatctccagcgaggcctccctgcagatgaacagcaactaccccgccttgctcaagtgccccgactatgatcagatgtcctcttcaccctgctgagcctcggccgcccccatccctggactgtgggtggccagacaacccttcctgttctctccaggtgacccctgagccccaggcctgtggttgacaggcccaggccacccatgcttagctgttgtcacttgaccccagtcctctccctgcttctccagaagggctctaactgccccagcatgggtgtgggagtctggagtctgtgggcaagctgattgtctgggaacatgggagaagccccgcccatgt

SEQ ID NO: 2909 - DNA, 926 bp, Homo sapiens
  source 1..926: mol_type = unassigned DNA; mol_type = unassigned DNA
agagcgcagtccgtgctggtgggagcgtggcgactagttgcacagcaacggtccaggaagatgagtgcctgcgggaggaaggccctgaccctgctgagcagtgtctttgctgtctgtggcttgggcctcctgggtatcgcggtcagcaccgactactggctgtacctggaggagggtgtgattgtgccccagaaccagagcaccgagatcaagatgtccctgcactcaggcctctggcgggtctgcttccttgcaggtgaggagcgggggcgttgcttcaccatagaatatgtgatgcccatgaacacccagctgacatccgagtccacggtcaatgttctaaagatgatccgctcagccacaccattccctctggtcagcctcttcttcatgttcattgggtttatcctgaacaacatcggacacatccgtccccaccggacgatactggcctttgtctctggcatcttctttatcctctcaggcctctctctcgtggtgggcctggtgctctacatctccagcatcaacgatgagatgctcaacaggaccaaggatgcagagacctacttcaactacaagtatgggtggtcgtttgccttcgccgccatctccttccttttaacggagagtgccggggtgatgtctgtgtacctgtttatgaagcggtacaccgcggaggacatgtacaggccccaccctggcttctaccgccctcggctgagcaactgctccgattactcaggccagttcctacacccagacgcctgggtcaggggccgcagcccctccgacatctccagcgaggcctccctgcagatgaacagcaactaccccgccttgctcaagtgccccgactatgatcagatgtcctcttcaccctgctgagcctcggccgcccccatccctggactgtgggtggccag

SEQ ID NO: 2910 - DNA, 8747 bp, Homo sapiens
  source 1..8747: mol_type = unassigned DNA; mol_type = unassigned DNA
ccccgcttctgcctgcgctgtgaacccccccccagccgccggcacggccccgcccccgctgccccggtggtggcccacggccccccggctgcccgtggtcaaactggagtcgctgaagcgctggaacgaagagcggggcctctggtgcgagaagggggtgcaggtgctgctgacgacggtgggcgccttcgccgccttcggcctcatgaccatcgccatcagcactgactactggctctacacgcgcgccctcatctgcaacaccaccaacctcacggccggcggcgacgacgggaccccccaccgcgggggcggcggcgcctcggagaagaaggaccccggcggcctcacgcactcgggcctctggaggatctgctgcctggaagggttgaaaagaggcgtctgcgtgaagatcaatcatttcccggaggacacggactacgaccacgacagcgcggagtatctactccgagttgtccgggcctccagcatcttccccatccttagcgccatcctgctgctgctcgggggtgtgtgcgtggcggcctcccgcgtctacaagtccaagaggaacatcattctgggcgcagggatcctgttcgtggcagcaggcctgagcaacatcatcggcgtgatcgtgtacatctccgccaacgcgggcgagccgggcccgaagcgggacgaggagaagaaaaaccactactcgtacggctggtccttctacttcggcgggctgtcgttcatcctggccgaggtgataggcgtgctggccgtcaacatctacatcgagcgcagccgcgaggcgcactgccagtctcgctcggacctgctcaaggccggcgggggcgcgggcggcagtggcgggagcggcccctcggccatcctccgtctgcccagttaccgcttccgctaccgccgccgctcccgctctagctcccgctccagcgagccgtcgccgtcgcgggacgcgtctcccggcggccccgggggcccgggctttgcctccacggacatctccatgtacacgctcagccgcgacccctccaagggcagcgtggccgcggggctggcgggggccggcggcggcggcggcggcgccgtgggggcgttcggcggcgcggccgggggcgccgggggcggcggcggaggcggcggcggggcgggtgccgagcgggaccgcgggggggcgtccggcttcctcacgctgcacaacgccttccccaaggaggcgggcggcggcgtcacggtcacggtcaccgggccgcccgccccgcccgcgcccgcgccacccgcgccctctgcgcccgcccccgggaccctggccaaggaggccgccgcctccaacaccaacacgctcaacaggaaaaccacgcctgtgtaggggcgcggcgggggagccgaggggcgtgtccggggcgcgtgcgcgggcgcgcgtgcatcgaggctgccggggtcgggggcgcccccgctttcccccgtgagcgcgctggagactgctgggcccgccccacgcccaccctccccgcccccctccccctccgaagcagggaccccgagggagggggcaggggagggagggggccgctgtgagggagcgtcgtgttttatttttttgggggatctatggggaggggggagggccatggtgttttttgcagtttcgagatgttttctttttcatgttttgctgtgtgcatggggggcggggcggggggaggggagggagggactcccagcccagcccaactcctggagaggggcccataatacacgaatacatagttacacccacaaactatatatatgccctatataaagagacacagcgaagggatgcagaaaggcagaaagaagggttggacgcgggcattcattcatttttttcattcattattccacaagggcttattaagcacctactgtgtaccaggcactggtacataagaaggcattggagcaggggacacgaacgaggcacagaaagggccttctcattcattcattcattaccggcaatttatttgtgcgccttaaaaagctaggcattgtgctccgtgctcagcgtgcaggaggcaggaaaacagccaggggccccgacgtctcatagagtaaacatcttgtgcatgagacaggcattaatcgatcatgtacatacacaataaattacagttaggctataggagaaacgagatgctatgaaatgctccatcaggggagcctaacccagttgtgaggaagagatttcagtggacagtgaaaggatgagaagaagccagcagggcggagctggggcaggagtgtggcaggcagagcagcacgtgcaaaggccccggggcaggaaggagcttgcagcgagggctgaagggtagtgaggcaggtgagcggggatcaaggtgaggccggagacacagacagggccagattgtgcaggggctcgtaggtcaggagttcagattttattctaggagtggtgagggccgtggaacgggtttaagcaggacgctaacgtgaatggtgtacaaagggaagacaggaactcggaggcaagagtaggaggcagagatgtgctgaaatacagcatcaaacatgggcacgggcccttggagctcacactcttgtgggaggaagcacgtaattacacagatgctgaagcatagtcatggtgtctggtgtgcaggagaaagccgtggggcttagagactcatgtgtctgtcactcgttcattcagccactcacccattgccatttttggccatctgctaaggtaccaggaagtgtgttaggatccagatccccaggggtgaaacagactctagccctgctctcaagcagtttattgtcatcaaacaccgccatccaggcagggcaatcggtgctggaacccggaccaccgtgggtaccgtggcacacggtggacagagtgaccaactgccaggagtgagcagcacttggggtaggcttcctggagaatatgatgcccattctgggtcttgaagaaatgagtgggcatcttctggttgatgaaaggcatgagaaaggcttgtggggccaaagaacaacttgggtgaaaacgggaggaagtgaacgagcatgatgtattggggtcagtgctaacagttctgggatgctgatgtacaaggtggggctgggagatgaggccgggaaagtagccacaagctagagtgtaaaggtaccagggtggccgggcgcggtggctcatgcctgtaatcccagcgctttgggaggctgaggctggagtatcacttgagcccaggagtttgagaccagcctggataacatggcgaaaccctgtctctacaaaacattaaaaaaaattagccgggcgtggtggagcacacctgtggacacagctactcaggaggctgagggaggaggaccatttgactccaagagttcgaggctgcagtgagctaggatcgcggcactacactccagcctgagcaacagactgagatcctgtctcagaaaaaaagagaaaaaggtgcctgagttccaggcagagggactgaggctcttctaaggatggtgagagaggatgacagctgcgcgggggcaagggctgtgcggtgattggaggggatgggtttgaagttcactgagaaggcagaggggacagcgcccagtaggcttcccttccatatttgctcagcaagtgtttcctgaggcctcccccgaagccttgtgctgggcggtgctgggagtggagaggtgattttgatcttgccctgctctcaaggggctcccagtctggcgggaaaacaggcacagacgcagcttgaggaggacgtggcagcggtggtgccatgctgccaggggctctgcgtgcccttctcttgacggaagggtacagatcagagctgggtgttcagaatttctctccgaggcctgtgtggaaggaccaggaagagagagactgaaggtccctaggaagaattctgccaaggcggtttcaggaagagatgctgggaaatgtaggaaaaggaatacaaatcagtgagacggagaagcgctgagtgagagagacggatacgtggagagaagagggatgccggagcgggtgttaaaagagacaaatctggccgggtgctgtggctcctaatcccagcactttgggagactgaggcaggcagattgagctcaggagttccagaccagccaacatattgaaatcttgtctctaccaaaaatacaaaaattagccgggtgtggtggtgcacgcctgtagtcccggctactcaggaggctgaggtgaaaggatctcgcttgggcctgggagggtgaggctgcagtgacccgtgatggcaccactgcgctccagcctgggcgaaagagcgagactctgtctcaaaaaaaaaaaaaaaattgagagacagcaaatatttgctggaagagggagagggaactggttaggggagaatggattctagagtctgaaggccaaacagaacgagagagagagagagagagagagaaagaatgaggttgagggtaggcaggaggaagagcaagatggggagggagggggagagcaggagagaccaaactagtagagtcacagacagagaaaaagtcaaagacaggaaggtgatacagaggagagagaagaggaagaggagagactgacaggtgcacaaatcagagaagtcccagagatagcagaaacacacacagagacagagatagagagggagaggtaagccggagacagactcagagattcgcacaaaaagcaacgtggagactcagaagcaagcgcagcgtcaaggaatgctccatttctggtgtgttgttttcccagtattcaagaaatatttattgagtgccaacctgttctagacccaatctcggccaggggatgtggtggcaaatagacggacaagggcctgctctcctgaaacacactggagagataaacaataaataatatcatttcagtaaccaaaaagtgctttaaaaattaagctgaaggccgggcgcagtggctcatgcctgtaatcccagcactttgggaggccgaggctggtggatcacttgaggtcaggagttcgagaccagcctggtcaacatggtgaaacttcatctctaccaataaataaataaagtagctgggtgtgctggtgtgcctgtagtcccagctacttgggaggctgagaaagaaggatcacttgaacccaggaggcagaggttgcagtgagctgagatcgcgccactgcactccagcctgggcgacagtgagtggtaacagaatgacagagcaaggatgactttagatgaggtccttggagtagaccttgtggcagaggtcacagagatgtggattgtgagtaggaaagagaggtgagaaagtctgggggccaggcattccacccaccagaggcagccccaaagcccagaaaagtagcaggtcttcgaggaggcctgtgcggtgagcagatccaccataggacagaggcacagggtaggggctgatcagttagggccttggatccttgggaagaaatctgaattttattctagatctgatgggaagtgcttggagggttttgagcacaggcatgccatgatcatatttttattttcttatttatatttattttgaaaaagagtcttgctctgtctcaggctggagtccagtgggctgatctcggctcactgccaacctccgcctcccaagttcaagtgattctcctgcctcagcctcctgagtagctgggattacaggcatgtgccaccacgcctggctaatttttttgtatttttagtaaagacgggatttcaccgtgttggccaggccaatctgaaattcctggcttcaaatgatccacctgcctcggcctcccaaaatgctgggattacaggagtgagccactgcgcccggcctcatatttttatttaaacaagaacagcagaattacattgctgtgctgagcatacgtagacttcaggagtcaaaggggaaggaaggaggtagcgggctgttgccttcctctggttgctggaggcctggaccaaggtggagttagtgggatggaggaagtggaagaaggcatgggattttggaggctagagcctgcattggtggtgaactggatgtcatagaggagggaaggaaaaggaaccaggaagagaagaactctctgaattgggcacgcacatctctgatgggcaccgatgaggattgttaccaggaacgaggagactgggatcaggaaagtggctttgggagggaggaaccaaggcttctcttttggatgtgtcaagatagatctgccttcgagaaatccgagttgtggtatcaaatagccagttggatatgtgagactggagtttgggggaaagagaggccgtggctcaaaaacgtaagttttggaaacgtcaacataaagccacaggattgggtgacgtggcctagcaggggggtggggacagagaagcgaccctggccagagccttggggacatctacatctgggggagaaggggatgtagcaaaacgagcttaggagtgatctcgaggtaggctgaaaccaggagggttacagagggcaaatgcacctttgtgtttcaagaaggagaggagacagccagctgtgccaagggctgctgagacttggacaaggatgcagagagcagagtgaccattaggtctgatgacatggacagggttggtgatcttgataagataagatgtcagttcagtgcagtggtggggacagaagccctgctggagtggaggggagagagaatttggggggaagacagaaggaaagggaattcaggcaagtgtgtgtgtgtgtgtgtgtgtgtgtgtgtgtgtaactgacacaaaggccaggtgcgatggctcacgtgtgtaatcccagcactttgggaggccgaagtgggtggatcacttgaggtcaggagttcgagaccagcctggccaatatggtgaaaccccgtctctactaaaaatacagaaattagacaggtgcggtggtgcacacctgtaatcccagctacttgagaggctgaagcaggagaatctcttgggcccaggaggcagaggttgcagtgagccaagatcacaccactgcactctagcctgggtgacagagcaagactctgtctcaaaaaagaaaaaaggtaaaaaaaaaaaaaaatgaccctgaaaggaagtagggagacatgcagatagggagatgggaggcagaaaattgcatcctgcaattagctgtcacagcaggcaggagcaagagagatggggaagcccagggccaggaggggaagatgaattcagggggcagggaagagaggatgctgtcagctaggctctggcagatcccctagccagggatgctctgcccagctcctgtctcttgctgctgtcagcgccgggcacactctgggattccccctgtagaccctgtcaagacctattgaggtgaaggggaagaacacgttttcatcattcattttcagaaataaacattcactcagttcttggaaatactttctggccaggcttgggggctcatgcctgtaatcccagcactctgggaggccaagacaggaggattgcttgaggcttggcgtttgagaccagcctgggcaatatagtaagaccccgtctctacaaaaatgaaaaatgagctgtggcgtggtggctcacgcctgtagtcctagatactcgggaggctgaggcgggaggattgcttgagtccaggagtttaaggttgcagtgagctatgattgcaccattgcacttcaggctgggccacagagcaagaccctgtctcagaaaacagaaagaaagaaagtcaaagaaataaagtcaaagacaagaaggtgatacagagaagacagaaaaggaggaggagagagactgacaggtacacaaatcagagaagtcccagagataacaaaaacacaaccacagagatagggagacgtaagccggagaaagacccagagattcgcatagaaagcaacgtggagactcagaagcaagcacagcatcaaggaatgatcaataaaaagaaaaaaaaatatttcctgaggacttccaagtacaaggccctgcaatctcaggccacttctgtcccatctctgccttcagagggggggacaggtagtccagacaattagaatacagagggggctgtgttctgacggggccacgcgggcattgaggaaacgcagcaggcccctcccctagctggggcggggatgtctgtgtgccatcatctcactccatctggtcattcctttgcccattcatccatccattcattcaagtcaccccatgcacattttccaagactgcctgtgacctggccctgtgccgggtagagctgaggatgccaaggtgaattcctcctgtgcctggccccggccccagtctgctggaagaaccagacacagacaatcacactgcggggaaacacgtgctccatcggaaaagtccagagcagggggtgggcagagaggcccagcgtgcaccagagcctcgctcaggtcagcgccaggcctgcctggagcagccaactgtgggagaagaaggagttggtgaaaggtgggtcccacctgggccgtccacagaagggctgaggggtagggggtgaggggttgaagatcaggccctgccgccatgccacacggctgtcctctgtccctgctcctgggggagctgaaactgcatggaaggtcccccaggggtgccccgtctaataaactcgatgaagagga

SEQ ID NO: 2911 - DNA, 1278 bp, Homo sapiens
  source 1..1278: mol_type = unassigned DNA; mol_type = unassigned DNA
ctggagtcgctgaagcgctggaacgaagagcggggcctctggtgcgagaagggggtgcaggtgctgctgacgacggtgggcgccttcgccgccttcggcctcatgaccatcgccatcagcactgactactggctctacacgcgcgccctcatctgcaacaccaccaacctcacggccggcggcgacgacgggaccccccaccgcgggggcggcggcgcctcggagaagaaggaccccggcggcctcacgcactcgggcctctggaggatctgctgcctggaagggttgaaaagaggcgtctgcgtgaagatcaatcatttcccggaggacacggactacgaccacgacagcgcggagtatctactccgagttgtccgggcctccagcatcttccccatccttagcgccatcctgctgctgctcgggggtgtgtgcgtggcggcctcccgcgtctacaagtccaagaggaacatcattctgggcgcagggatcctgttcgtggcagcaggcctgagcaacatcatcggcgtgatcgtgtacatctccgccaacgcgggcgagccgggcccgaagcgggacgaggagaagaaaaaccactactcgtacggctggtccttctacttcggcgggctgtcgttcatcctggccgaggtgataggcgtgctggccgtcaacatctacatcgagcgcagccgcgaggcgcactgccagtctcgctcggacctgctcaaggccggcgggggcgcgggcggcagtggcgggagcggcccctcggccatcctccgtctgcccagttaccgcttccgctaccgccgccgctcccgctctagctcccgctccagcgagccgtcgccgtcgcgggacgcgtctcccggcggccccgggggcccgggctttgcctccacggacatctccatgtacacgctcagccgcgacccctccaagggcagcgtggccgcggggctggcgggggccggcggcggcggcggcggcgccgtgggggcgttcggcggcgcggccgggggcgccgggggcggcggcggaggcggcggcggggcgggtgccgagcgggaccgcgggggggcgtccggcttcctcacgctgcacaacgccttccccaaggaggcgggcggcggcgtcacggtcacggtcaccgggccgcccgccccgcccgcgcccgcgccacccgcgccctctgcgcccgcccccgggaccctggccaaggaggccgccgcctccaacaccaacacgctcaacaggaaaaccacgcctgtgtag

SEQ ID NO: 2912 - DNA, 2835 bp, Homo sapiens
  source 1..2835: mol_type = unassigned DNA; mol_type = unassigned DNA
cattttctttgatggtaaacaggctcacttataccgaatccaaacccaggcgagaactacggactcttgaaatggtcggtgaaaggggcgaaagcaccaggaaatcgtgcttcaacagtccatgactgaaaggagggcctgaaactgtggccataggcgggcccttttgttagggccttgacctgggcttccgctacagggcccggtcacgaggccaacgtagctccacctcctacggcggccagtgatgacgccaccacgtcggaactgttagaccgcggtgacgtctccaccgcgccaaactcactgaaaatcaaaccgctaccattaggagccctccacgcttaacatatccgttctttctcgtttgaaagtaaccaggctgctcctccccatttttcgccttcttctcgcggaggctgagagactaaccttacacaacatggcggcctggtgtgtctggtgtcctagagcggacgaaagcaggtgactctctagtcaacttccgacttggactccgaagatcgctacagaaagatctagaagaggtaaaggtgttgctggaaaaggctactaggaaaagagtacgtgatgcccttacagctgaaaaatccaagattgagacagaaatcaagaacaagatgcaacagaaatcacagaagaaagcagaacttcttgataatgaaaaaccagctgctgtggttgctcccattacaacgggctatacggtgaaaatcagtaattatggatgggatcagtcagataagtttgtgaaaatctacattaccttaactggagttcatcaagttcccactgagaatgtgcaggtgcatttcacagagaggtcatttgatcttttggtaaagaatctaaatgggaagagttactccatgattgtgaacaatctcttgaaacccatctctgtggaaggcagttcaaaaaaagtcaagactgatacagttcttatattgtgtagaaagaaagtggaaaacacaaggtgggattacctgacccaggttgaaaaggagtgcaaagaaaaagagaagccctcctatgacactgaaacagatcctagtgagggattgatgaatgttctaaagaaaatttatgaagatggagacgatgatatgaagcgaaccattaataaagcctgggtggaatcaagagagaagcaagccaaaggagacacggaattttgagactttaaagtcgttttgggaactgtgatgtgatgtggaaatactgatgtttccagtaagggaatattggtgagctgcatatataaatttgacagatagctatttacatagccttctaagtaaaggcaatgaattctccatttcctactggaggatttatttaaataaaatatgcttattaaacactcctgcaaagatggttttattagtaccctggtcattttgttcaaggaagggttatattgcattctcacgtgaaatataaaaagcaagtcttgcccaataaaaacgctacattgtgtgtattttttgttcagctaagaattggaaaagtatttgcttgccttttaagttactgacatcagcttccaccagtgtaaaaattgagtaaaacctgaagttttgcataaaatgcaaatcggtgcctgtgcttgaaggttgctgtagagcatctgaccccttattaccaccttaagcaatgtatatgccatgcattaccatgcactaattcaatcacaggtgtttctatctagatttaaatatatttgtcaatgaatgtggaatagaaaatctaaacatgacaataatagacatatctttgtatggtaccagttagttttgccgtggatcagatggtttataaaagtaataaccataaagcaaaaaataatttgaaagcccgtctattcctatgctcaataaagttaagtttttcttcattagaacagttttatgatttatttgtctaggagtatgtcagaaaaatcaggcttttagtaggaattactcctattccccctgaagtcaggaccagtgcctgtgatctccattactttattttcctggaggtattagccaacacagttagatcagagaaagcaattgaagccaggcatgaaggctggcgcccgtaatcccagctactaaggctggaggatcacttcagcccaggagtttaaggctgcagtgagctatgatgatgccactgtactgcagcttgggtaacagattgagaacctgtctcattaaaaaaaaaaaaaaaaaaaaagccgttagacacacaggaaaaatccagaagggtaaactaaactaaagctacaattaatatgggaatttggaagaagtggtaggatttaaaatacagaaacagtttatgtataggatagctataagtaaatactgaaacacattatgcctctgtaattggggttgacacatgaacagaatagcagacacaatgcatatgaaagttacagaatatggtaaaagtggggtaaagatgggtttttaatgatactaagataactgaaaataggcatatagatatattccaagccgcctgacgatctaattgtaaaaagtaaagcatacaaatactagaagaaaatggaggaaaacgacattatatgtgacttaaaacctagaagaaataaataaaactattgatcaattttaactacataaaaatgtttataggacaagaaaaaccccaccataacccaaggcaaacaatgtattgacaggattccaataattaagaatacttcatacaaaaagaaatgtaaatgacctttaacatgtaaagatgctcaccttgttcagaagagaataaaccagtgtttttacctttcacttg

SEQ ID NO: 2913 - DNA, 499 bp, Homo sapiens
  source 1..499: mol_type = unassigned DNA; mol_type = unassigned DNA
agaccgcggtgacgtctccaccgcgccaaactcactgaaaatcaaaccgctaccattaggagccctccacgcttaacatatccgttctttctcgtttgaaagtaaccaggctgctcctccccatttttcgccttcttctcgcggaggctgagagactaaccttacacaacatggcggcctggtgtgtctggtgtcctagagcggacgaaagcaggtgactctctagtcaacttccgacttggactccgaagatcggcgtctgcgctcggtttgagggctcggcgcggggtttcctgttcctccttctgcgcggctgcagctcgggacttcggcctgacccagcccccatggcttcagaagagctacagaaagatctagaagaggtaaaggtgttgctggaaaaggctactaggaaaagagtacgtgatgcccttacagctgaaaaatccaagattgagacagaaatcaagaacaagatgcaacagaaatcacagaagaa

SEQ ID NO: 2914 - DNA, 574 bp, Homo sapiens
  source 1..574: mol_type = unassigned DNA; mol_type = unassigned DNA
gaaaatcaaaccgctaccattaggagccctccacgcttaacatatccgttctttctcgtttgaaagtaaccaggctgctcctccccatttttcgccttcttctcgcggaggctgagagactaaccttacacaacatggcggcctggtgtgtctggtgtcctagagcggacgaaagcaggtgactctctagtcaacttccgacttggactccgaagatcgctacagaaagatctagaagaggtaaaggtgttgctggaaaaggctactaggaaaagagtacgtgatgcccttacagctgaaaaatccaagattgagacagaaatcaagaacaagatgcaacagaaatcacagaagaaagcagaacttcttgataatgaaaaaccagctgctgtggttgctcccattacaacgggctatacggtgaaaatcagtaattatggtatgacttgcttccctatagccagttctgcctccgagcaacctattcctcatagtggtctaacaaattcatccccaatgagttttgagtctgtgtttttggtggtttggagcaagacccatcagtttttattta

SEQ ID NO: 2915 - DNA, 2766 bp, Homo sapiens
  source 1..2766: mol_type = unassigned DNA; mol_type = unassigned DNA
gcgactgcgcagcgtggcccagcgcggtcaaattataatacataaaagttgtcagggcggagagcaagacattactcttctcggattgccggttcgctcgcgagacttgagcgttgctaggagattcggcaggcgggcggagccagactcggcggggcggggaggggtggggctaggctcggcgaggcgaggaagggtgggtggagccaggcttggcgggctgtgcgtgctcgcggtgggcggtggcggcggctgcctcgcgaaggttcgagatccgtcgcgtgcgggaggcgggccgcgatcttgcgcagggtcggtgtgggcgcaggctgcagcgccgcgactcgtgcgggtaggcgtctgcgctcggtttgagggctcggcgcggggtttcctgttcctccttctgcgcggctgcagctcgggacttcggcctgacccagcccccatggcttcagaagagctacagaaagatctagaagaggtaaaggtgttgctggaaaaggctactaggaaaagagtacgtgatgcccttacagctgaaaaatccaagattgagacagaaatcaagaacaagatgcaacagaaatcacagaagaaagcagaacttcttgataatgaaaaaccagctgctgtggttgctcccattacaacgggctatacggtgaaaatcagtaattatggatgggatcagtcagataagtttgtgaaaatctacattaccttaactggagttcatcaagttcccactgagaatgtgcaggtgcatttcacagagaggtcatttgatcttttggtaaagaatctaaatgggaagagttactccatgattgtgaacaatctcttgaaacccatctctgtggaaggcagttcaaaaaaagtcaagactgatacagttcttatattgtgtagaaagaaagtggaaaacacaaggtgggattacctgacccaggttgaaaaggagtgcaaagaaaaagagaagccctcctatgacactgaaacagatcctagtgagggattgatgaatgttctaaagaaaatttatgaagatggagacgatgatatgaagcgaaccattaataaagcctgggtggaatcaagagagaagcaagccaaaggagacacggaattttgagactttaaagtcgttttgggaactgtgatgtgatgtggaaatactgatgtttccagtaagggaatattggtgagctgcatatataaatttgacagatagctatttacatagccttctaagtaaaggcaatgaattctccatttcctactggaggatttatttaaataaaatatgcttattaaacactcctgcaaagatggttttattagtaccctggtcattttgttcaaggaagggttatattgcattctcacgtgaaatataaaaagcaagtcttgcccaataaaaacgctacattgtgtgtattttttgttcagctaagaattggaaaagtatttgcttgccttttaagttactgacatcagcttccaccagtgtaaaaattgagtaaaacctgaagttttgcataaaatgcaaatcggtgcctgtgcttgaaggttgctgtagagcatctgaccccttattaccaccttaagcaatgtatatgccatgcattaccatgcactaattcaatcacaggtgtttctatctagatttaaatatatttgtcaatgaatgtggaatagaaaatctaaacatgacaataatagacatatctttgtatggtaccagttagttttgccgtggatcagatggtttataaaagtaataaccataaagcaaaaaataatttgaaagcccgtctattcctatgctcaataaagttaagtttttcttcattagaacagttttatgatttatttgtctaggagtatgtcagaaaaatcaggcttttagtaggaattactcctattccccctgaagtcaggaccagtgcctgtgatctccattactttattttcctggaggtattagccaacacagttagatcagagaaagcaattgaagccaggcatgaaggctggcgcccgtaatcccagctactaaggctggaggatcacttcagcccaggagtttaaggctgcagtgagctatgatgatgccactgtactgcagcttgggtaacagattgagaacctgtctcattaaaaaaaaaaaaaaaaaaaaagccgttagacacacaggaaaaatccagaagggtaaactaaactaaagctacaattaatatgggaatttggaagaagtggtaggatttaaaatacagaaacagtttatgtataggatagctataagtaaatactgaaacacattatgcctctgtaattggggttgacacatgaacagaatagcagacacaatgcatatgaaagttacagaatatggtaaaagtggggtaaagatgggtttttaatgatactaagataactgaaaataggcatatagatatattccaagccgcctgacgatctaattgtaaaaagtaaagcatacaaatactagaagaaaatggaggaaaacgacattatatgtgacttaaaacctagaagaaataaataaaactattgatcaattttaactacataaaaatgtttataggacaagaaaaaccccaccataacccaaggcaaacaatgtattgacaggattccaataattaagaatacttcatacaaaaagaaatgtaaatgacctttaacatgtaaagatgctcaccttgttcagaagagaataaaccagtgtttttacctttc

SEQ ID NO: 2916 - DNA, 688 bp, Homo sapiens
  source 1..688: mol_type = unassigned DNA; mol_type = unassigned DNA
ttggcgggctgtgcgtgctcgcggtgggcggtggcggcggctgcctcgcgaaggttcgagatccgtcgcgtgcgggaggcgggccgcgatcttgcgcagggtcggtgtgggcgcaggctgcagcgccgcgactcgtgcgggtaggcgtctgcgctcggtttgagggctcggcgcggggtttcctgttcctccttctgcgcggctgcagctcgggacttcggcctgacccagcccccatggcttcagaagagctacagaaagatctagaagaggtaaaggtgttgctggaaaaggctactaggaaaagagtacgtgatgcccttacagctgaaaaatccaagattgagacagaaatcaagaacaagatgcaacagaaatcacagaagaaagcagaacttcttgataatgaaaaaccagctgctgtggttgctcccattacaacgggctatacggtgaaaatcagtaattatggtatgacttgcttccctatagccagttctgcctccgagcaacctattcctcatagtggtctaacaaattcatccccaatgagttttgagtctgtgtttttggtggtttggagcaagacccatcagtttttatttaataaaacttttttaagatataaataggaaaggatgcgttctagaagctgttaacaagagtaaggtgattcactacaaaatgt

SEQ ID NO: 2917 - DNA, 804 bp, Homo sapiens
  source 1..804: mol_type = unassigned DNA; mol_type = unassigned DNA
gtgcgtgctcgcggtgggcggtggcggcggctgcctcgcgaaggttcgagatccgtcgcgtgcgggaggcgggccgcgatcttgcgcagggtcggtgtgggcgcaggctgcagcgccgcgactcgtgcgggtaggcgtctgcgctcggtttgagggctcggcgcggggtttcctgttcctccttctgcgcggctgcagctcgggacttcggcctgacccagcccccatggcttcagaagagctacagaaagatctagaagaggtaaaggtgttgctggaaaaggctactaggaaaagagtacgtgatgcccttacagctgaaaaatccaagattgagacagaaatcaagaacaagatgcaacagaaatcacagaagaaagcagaacttcttgataatgaaaaaccagctgctgtggttgctcccattacaacgggctatacggtgaaaatcagtaattatggatgggatcagtcagataagtttgtgaaaatctacattaccttaactggagttcatcaagttcccactgagaatgtgcaggtgcatttcacagagaggtcatttgatcttttggtaaagaatctaaatgggaagagttactccatgattgtgaacaatctcttgaaacccatctctgtggaaggcagttcaaaaaaagtcaagactgatacagttcttatattgtgtagaaagaaagtggaaaacacaaggtgggattacctgacccaggttgaaaaggagtgcaaagaaaaagagtgagtctacttccatttttttaaagaattttagtgtattgtttgaga

SEQ ID NO: 2918 - DNA, 243 bp, Homo sapiens
  source 1..243: mol_type = unassigned DNA; mol_type = unassigned DNA
atggcttcagaagagctacagaaagatctagaagaggtaaaggtgttgctggaaaaggctactaggaaaagagtacgtgatgcccttacagctgaaaaatccaagattgagacagaaatcaagaacaagatgcaacagaaatcacagaagaaagcagaacttcttgataatgaaaaaccagctgctgtggttgctcccattacaacgggctatacggatgggatcagtcagataagtttgtga

SEQ ID NO: 2919 - DNA, 1059 bp, Homo sapiens
  source 1..1059: mol_type = unassigned DNA; mol_type = unassigned DNA
atattccttatgccccccggctggagctgcagcgccagcctcccgccctaccgccgtttccgtgggctgagccgccctgcggccacccggtcccgcgccagtcagtgcgccgccttcccgggggacacctcactcgccccttgctgcgccgtcggctccccagcgcttccactcgacctcgcaccccactcgcctgctgggctcgagcgggggtgtgcggcgattatccgtgcaggcggtgcggggagtgggtctgggagagcggccctttgcgcgtgttcctcaggccctttctgccctggtttcccagccagtggacaggaagcttcattcaagcaaagctgggtgcaaacatgagtgtcgttcttggtagagggcggttggaagctacagaaagatctagaagaggtaaaggtgttgctggaaaaggctactaggaaaagagtacgtgatgcccttacagctgaaaaatccaagattgagacagaaatcaagaacaagatgcaacagaaatcacagaagaaagcagaacttcttgataatgaaaaaccagctgctgtggttgctcccattacaacgggctatacggtgaaaatcagtaattatggatgggatcagtcagataagtttgtgaaaatctacattaccttaactggagttcatcaagttcccactgagaatgtgcaggtgcatttcacagagaggtcatttgatcttttggtaaagaatctaaatgggaagagttactccatgattgtgaacaatctcttgaaacccatctctgtggaaggcagttcaaaaaaagtcaagactgatacagttcttatattgtgtagaaagaaagtggaaaacacaaggtgggattacctgacccaggttgaaaaggagtgcaaagaaaaagagaagccctcctatgacactgaaacagatcctagtgagggattgatgaatgttctaaagaaaatttatgaagatggagacgatgatatgaagcgaaccattaataaagcctgggtggaatcaagagagaagcaagccaaaggagacacggaattttga

SEQ ID NO: 2920 - DNA, 904 bp, Homo sapiens
  source 1..904: mol_type = unassigned DNA; mol_type = unassigned DNA
catttctcaacctagaaaatttcttatatttcaaattttttcatgtttatatgactggattttcataattttactttcctgacttatgagccatgtgcatttgctgttctaaagatagtttcagaggcttacttacgtcccatcttttgttgtcgttgccaggatgggatcagtcagataagtttgtgaaaatctacattaccttaactggagttcatcaagttcccactgagaatgtgcaggtgcatttcacagagaggtgagttctcattataatgggaaagacagtgaattaacagtcaacattgccttatcttgagactctcttctttgcagtttttaaaattcttaaatttagaattaattatcctttacaactactttgaagaggtgagcgttaactggccaaatgcacaccctgaaataaagccagcagcttttttcccacaagaactatggagtaagggtacctttcatagaactagaaagatgatgtattcaccattgtgttgcaggtcatttgatcttttggtaaagaatctaaatgggaagagttactccatgattgtgaacaatctcttgaaacccatctctgtggaaggcagttcaaaaaaagtcaagactgatacagttcttatattgtgtagaaagaaagtggaaaacacaaggtgggattacctgacccaggttgaaaaggagtgcaaagaaaaagagtgagtctacttccatttttttaaagaattttagtgtattgtttgagatcatggatttttaatagtttgtctttatggataatgtatttctgctttcaactgtcaaactacctgaagagggcacgtccagcaagttgctttttaaggtctttgtagttaagggttggctctttagtgtggttcttaaccct

SEQ ID NO: 2921 - DNA, 2546 bp, Homo sapiens
  source 1..2546: mol_type = unassigned DNA; mol_type = unassigned DNA
agcgccggctccctcccggtccccacctcggccccgggctccgaagcggctcgggggcgccctttcggtcaacatcgtagtccaccccctccccatccccagcccccggggattcaggctcgccagcgcccagccagggagccggccgggaagcgcgatgggggccccagccgcctcgctcctgctcctgctcctgctgttcgcctgctgctgggcgcccggcggggccaacctctcccaggacggctactggcaggagcaggatttggagctgggaactctggctccactcgacgaggccatcagctccacagtctggagcagccctgacatgctggccagtcaagacagccagccctggacatctgatgaaacagtggtggctggtggcaccgtggtgctcaagtgccaagtgaaagatcacgaggactcatccctgcaatggtctaaccctgctcagcagactctctactttggggagaagagagcccttcgagataatcgaattcagctggttacctctacgccccacgagctcagcatcagcatcagcaatgtggccctggcagacgagggcgagtacacctgctcaatcttcactatgcctgtgcgaactgccaagtccctcgtcactgtgctaggaattccacagaagcccatcatcactggttataaatcttcattacgggaaaaagacacagccaccctaaactgtcagtcttctgggagcaagcctgcagcccggctcacctggagaaagggtgaccaagaactccacggagaaccaacccgcatacaggaagatcccaatggtaaaaccttcactgtcagcagctcggtgacattccaggttacccgggaggatgatggggcgagcatcgtgtgctctgtgaaccatgaatctctaaagggagctgacagatccacctctcaacgcattgaagttttatacacaccaactgcgatgattaggccagaccctccccatcctcgtgagggccagaagctgttgctacactgtgagggtcgcggcaatccagtcccccagcagtacctatgggagaaggagggcagtgtgccacccctgaagatgacccaggagagtgccctgatcttccctttcctcaacaagagtgacagtggcacctacggctgcacagccaccagcaacatgggcagctacaaggcctactacaccctcaatgttaatgaccccagtccggtgccctcctcctccagcacctaccacgccatcatcggtgggatcgtggctttcattgtcttcctgctgctcatcatgctcatcttccttggccactacttgatccggcacaaaggaacctacctgacacatgaggcaaaaggctccgacgatgctccagacgcggacacggccatcatcaatgcagaaggcgggcagtcaggaggggacgacaagaaggaatatttcatctagaggcgcctgcccacttcctgcgccccccaggggccctgtggggactgctggggccgtcaccaacccggacttgtacagagcaaccgcagggccgcccctcccgcttgctccccagcccacccacccccctgtacagaatgtctgctttgggtgcggttttgtactcggtttggaatggggagggaggagggcggggggaggggagggttgccctcagccctttccgtggcttctctgcatttgggttattattatttttgtaacaatcccaaatcaaatctgtctccaggctggagaggcaggagccctggggtgagaaaagcaaaaaacaaacaaaaaacaaaaccctggagtgttaggaggagagtgaaggtagaggggtgaggaagggtaaggggcagggctggtttcagctgggggctctcaccagccctcctttcagcctctacaacagagcagcttcccagacttctccaggaacccagaaacgggatggttgtcggcaaaggttgggagtggcttttcctctggtagccacacacctgagcactacggacagggaggcaggtgccaccttgacacctctcttccatagcaatgggaaagtgatgagtgcgggagtcctgaggagatgtggcctgcagacaacatgcagccatgcagggacccaggactgtaacctggggaggacgcgggtccctgcaaggaagagtagatttggagaggaaggatggaggtggactctcaccccattccccccggaaatgaacaaagccgggccctttccataggaactgcccttggagatagcagagtgtggctgcccctccttgctccagcagcagtgggagaggcactgctctggggcctgaactgcctctgcttccccccctgaggggcccctcactcttacccaagactctggattgttgcacggcaaccactcctcccatggcattgctcagcaactacttctcccttcccggccaccctgtgcccccttcctggtcccaacgccagcccttcatccttcctccctcagcagccaggcagacataacaacaaaactactaaaaggagcttcactgca

SEQ ID NO: 2922 - DNA, 3745 bp, Homo sapiens
  source 1..3745: mol_type = unassigned DNA; mol_type = unassigned DNA
agcgccggctccctcccggtccccacctcggccccgggctccgaagcggctcgggggcgccctttcggtcaacatcgtagtccaccccctccccatccccagcccccggggattcaggctcgccagcgcccagccagggagccggccgggaagcgcgatgggggccccagccgcctcgctcctgctcctgctcctgctgttcgcctgctgctgggcgcccggcggggccaacctctcccaggacgacagccagccctggacatctgatgaaacagtggtggctggtggcaccgtggtgctcaagtgccaagtgaaagatcacgaggactcatccctgcaatggtctaaccctgctcagcagactctctactttggggagaagagagcccttcgagataatcgaattcagctggttacctctacgccccacgagctcagcatcagcatcagcaatgtggccctggcagacgagggcgagtacacctgctcaatcttcactatgcctgtgcgaactgccaagtccctcgtcactgtgctaggaattccacagaagcccatcatcactggttataaatcttcattacgggaaaaagacacagccaccctaaactgtcagtcttctgggagcaagcctgcagcccggctcacctggagaaagggtgaccaagaactccacggagaaccaacccgcatacaggaagatcccaatggtaaaaccttcactgtcagcagctcggtgacattccaggttacccgggaggatgatggggcgagcatcgtgtgctctgtgaaccatgaatctctaaagggagctgacagatccacctctcaacgcattgaagttttatacacaccaactgcgatgattaggccagaccctccccatcctcgtgagggccagaagctgttgctacactgtgagggtcgcggcaatccagtcccccagcagtacctatgggagaaggagggcagtgtgccacccctgaagatgacccaggagagtgccctgatcttccctttcctcaacaagagtgacagtggcacctacggctgcacagccaccagcaacatgggcagctacaaggcctactacaccctcaatgttaatgaccccagtccggtgccctcctcctccagcacctaccacgccatcatcggtgggatcgtggctttcattgtcttcctgctgctcatcatgctcatcttccttggccactacttgatccggcacaaaggaacctacctgacacatgaggcaaaaggctccgacgatgctccagacgcggacacggccatcatcaatgcagaaggcgggcagtcaggaggggacgacaagaaggaatatttcatctagaggcgcctgcccacttcctgcgccccccaggggccctgtggggactgctggggccgtcaccaacccggacttgtacagagcaaccgcagggccgcccctcccgcttgctccccagcccacccacccccctgtacagaatgtctgctttgggtgcggttttgtactcggtttggaatggggagggaggagggcggggggaggggagggttgccctcagccctttccgtggcttctctgcatttgggttattattatttttgtaacaatcccaaatcaaatctgtctccaggctggagaggcaggagccctggggtgagaaaagcaaaaaacaaacaaaaaacaaaaccctggagtgttaggaggagagtgaaggtagaggggtgaggaagggtaaggggcagggctggtttcagctgggggctctcaccagccctcctttcagcctctacaacagagcagcttcccagacttctccaggaacccagaaacgggatggttgtcggcaaaggttgggagtggcttttcctctggtagccacacacctgagcactacggacagggaggcaggtgccaccttgacacctctcttccatagcaatgggaaagtgatgagtgcgggagtcctgaggagatgtggcctgcagacaacatgcagccatgcagggacccaggactgtaacctggggaggacgcgggtccctgcaaggaagagtagatttggagaggaaggatggaggtggactctcaccccattccccccggaaatgaacaaagccgggccctttccataggaactgcccttggagatagcagagtgtggctgcccctccttgctccagcagcagtgggagaggcactgctctggggcctgaactgcctctgcttccccccctgaggggcccctcactcttacccaagactctggattgttgcacggcaaccactcctcccatggcattgctcagcaactacttctcccttcccggccaccctgtgcccccttcctggtcccaacgccagcccttcatccttcctccctcagcagccaggcagacataacaacaaaactactaaaaggagcttcactgcagtgagctgtttcctgcccaaactaagggaataatgtgaactgtgtgcatgtgtgtggtgtgtatgcatgtgtgcatgtgtgtgtgtgtgtgtgcatgtgtgtgagtgagtgagaggcagagcgaggaactgaggaggagggctaagagccaggggtcctgggcaagtggacagggctgtgggacatgttggggaggctttgggaatggggtattcctagtcagggttcacacctcacctgggatgttgttccatgctggtatttcctctgccacccccaatgcccatcggtcttggagaaaggagtccccgggtgtgtgtttgcccagctgtccattctatctctcccttaaacacagagcattcagcccttccctggatttccctcctctgagccatggagtcagtgccacagcctttgctatgcacctctcaggcctctccttggcgttgaccctggaaagacctaccaccacctattttttcccatagtctgtacccagtgagttgaaggctgggtccccacccttccttttgatttcctgtcttccttctcgtggccccagctggttgctgtggagatgaggttcctggtcctccctgtcctggctggactgccccgcctcagatccaggatgcccttggcatcgctcccaccctcccccagcttttcctccctggtctgacaatgggcatgcaaaaaggggcagctgcaatctagcaggcctgcccacccccttcagttcaggtaatacagttgtgaatcttccagccgctggttagggccttgggcaccacaggcagcccctcacctaagccggggcctactcctcttacaacagcaagagagccctggggccccaggcctgttgagcttcttgtctcccagcacccgcttttgggaaaatgacttttcctcttcaagctgaaccactctgtccatattacacagaagccatatttgtacgggggggtgggagggagaggggctgttgtgctgtgtgtgtctgtccaggggtgggggggtgggggaagggagcagggaggggaccgtgtatctttataatctttctaactctcctgtgctaatctcagaggggtcaccctcaatatatctggattatccgtgtcattcagctgcctcctttctggtcctcttgctgctgctgggatgtgtgtatgtgagggtcttcttcccataccccttgcacctggtgcctggtgcctcaaaaggtggtgtgtcccttgccaggccactctcaagaatatctatgtacagcaacaatataactctacaaggga

SEQ ID NO: 2923 - DNA, 711 bp, Homo sapiens
  source 1..711: mol_type = unassigned DNA; mol_type = unassigned DNA
aagcgcgatgggggccccagccgcctcgctcctgctcctgctcctgctgttcgcctgctgctgggcgcccggcggggccaacctctcccaggacgacagccagccctggacatctgatgaaacagtggtggctggtggcaccgtggtgctcaagtgccaagtgaaagatcacgaggactcatccctgcaatggtctaaccctgctcagcagactctctactttggggagaagagagcccttcgagataatcgaattcagctggttacctctacgccccacgagctcagcatcagcatcagcaatgtggccctggcagacgagggcgagtacacctgctcaatcttcactatgcctgtgcgaactgccaagtccctcgtcactgtgctaggaattccacagaagcccatcatcactggttataaatcttcattacgggaaaaagacacagccaccctaaactgtcagtcttctgggagcaagcctgcagcccggctcacctggagaaagggtgaccaagaactccacggagaaccaacccgcatacaggaagatcccaatgacacaccaactgcgatgattaggccagaccctccccatcctcgtgagggccagaagctgttgctacactgtgagggtcgcggcaatccagtcccccagcagtacctatgggagaaggagggcagtgtgccacccctgaagatgacccagga

SEQ ID NO: 2924 - DNA, 5471 bp, Homo sapiens
  source 1..5471: mol_type = unassigned DNA; mol_type = unassigned DNA
acagcttgcaacactcggcatcttttctggaggcgcctccttcagcagccgcagatggcatccggctgcgggctcggggctcgcaattgattctcccccttgcccacctcgagtccacggacgcacctctcccttcccctcctcccttcgcgcttctgggtctgagcccagctcgcgaccgccgggcagaggatcagtcgcggcggccgaggctgagcagcagcgctctcgctccctgacctggggagaagcgcccacccgggagagctgatccccggctgcctccagcgccccccaccttttgcactccaagccgggggctccagagaccccgctccccaggcgccactatgctggacccttcgtccagcgaagaagaatcggatgagatcgtggaggaggagagcggcaaggaggtgctcggctcggccccgtccggcgcgcgcctgtctcccagccgtaccagcgagggctcggccggcagcgccgggctggggggcggcggcgccggcgccggagccggggtgggtgcaggcggcggcgggggcagcggcgcgagcagcggcggcggggccggggggctgcaacccagcagccgcgctggcggcggccggccctccagccccagcccgtcggtggtgagcgagaaggagaaggaagagttggagcggctgcagaaagaggaggaggagaggaagaagaggctgcagctgtatgtgttcgtgatgcgctgcatcgcctacccctttaatgccaagcagcccaccgacatggctcgccggcagcagaagatcagcaaacagcagctgcagacagtcaaggaccggtttcaggctttcctcaatggggaaacccagatcatggctgacgaagccttcatgaacgctgtgcagagttactatgaggtgttcctgaagagcgaccgtgtggcccgcatggttcagagtggaggctgttccgccaacgactcccgggaggtcttcaagaagcacattgagaagagagtgcgcagcctgcctgagattgacggcctcagcaaggagactgtgctgagctcctggatggccaaatttgatgccatctaccgtggagaagaggacccgcggaagcagcaggcccggatgacagccagcgcagcctccgagctgattctgagcaaggagcaactctatgagatgttccagaacattcttgggatcaagaagttcgaacatcagctcctttacaatgcctgccagctggacaatccagatgagcaagcagcccagatcagacgagagctggatggacgtctacaaatggcagaccaaatagccagggaacgcaaatttcccaagtttgtatccaaagaaatggaaaacatgtacattgaggagctgaagtcatctgtcaacctgctcatggccaacttggagagcatgccggtatccaaaggcggggagttcaagctccagaaactcaaacgcagccacaatgcttccatcatcgacatgggcgaggagagtgagaaccagctctccaagtcagatgtcgtgctgtctttctcattggaggtggtaattatggaagtccaaggcctcaaatctttggctccaaatcgcatcgtatattgcacaatggaggtggaaggaggagagaaactacagactgatcaggccgaggcttctaaaccaacctggggcacccagggtgacttctccacaacccatgcactgccagctgtgaaggtgaagctgttcacagagagcacaggcgtcctggcgttggaggacaaggagcttgggcgggttattctccatcccaccccgaacagccccaaacagtcagagtggcacaaaatgacagtctccaaaaactgccccgaccaagatctcaaaatcaaacttgctgtccgaatggataagcctcaaaacatgaagcattctgggtatttatgggccatcggtaagaatgtctggaagagatggaagaaaaggttttttgtattggtgcaggtcagtcagtacacgtttgccatgtgcagttatcgggagaagaaagcggagcctcaggaacttctacaattggatggctacactgtggattacaccgacccccagccaggtttggagggtggccgagccttcttcaatgctgtcaaggagggagacaccgtgatatttgccagtgacgatgaacaagaccgcatcctgtgggtccaggccatgtatcgggccacggggcagtcacacaagcctgtgcccccgacccaagtccagaaactcaacgccaagggaggaaatgtacctcagctggatgcccctatctctcaattttacgcagatagagctcaaaaacatggcatggatgaatttatctcttccaacccctgtaactttgaccacgcttccctctttgagatggtacaacgccttactttggatcacagacttaatgattcctattcttgcctgggctggttcagtcctggccaggtgtttgtactagacgagtattgcgcccgaaatggagtccgggggtgtcaccgacatctctgctacctcagagacttgcttgaacgggcagaaaatggcgccatgatcgaccccacccttcttcactacagctttgccttctgtgcatcccatgtccatgggaacaggcctgatggaattggaactgtgactgttgaagaaaaggaacgttttgaagaaatcaaagagaggctccgagttctgctagaaaatcagattacacattttaggtattgctttccatttggtcgacctgaaggtgctttgaaagctactctctcactcttggaaagggttttgatgaaagatattgttaccccagtgccacaagaggaggtaaaaacagttatccgtaaatgtctggaacaggctgcgttagtcaactattctcggctctcagagtatgccaaaatcgaagagaatcaaaaggatgcagaaaatgtaggccggttaatcactcctgccaaaaagcttgaagatacaatacgtcttgctgaactagtcattgaagttcttcagcaaaatgaggagcaccacgcagagccacatgttgataaaggagaagcctttgcgtggtggtcagatttaatggtggagcatgcggagacgttcctgtcactctttgcagtagacatggatgcagccttagaggtgcaacctccagacacatgggacagttttccactatttcagctgctgaatgattttctccgtactgactataatttgtgcaatggaaaatttcacaaacacctgcaagacctgtttgccccacttgttgttagatatgtggatctgatggagtcctcaattgcacaatccattcacaggggctttgagcgggagtcatgggaaccagtcaagagtttaaccagtaacctacccaatgtgaacctacccaatgtgaaccttcccaaagtaccaaatctaccagttaacatccctctaggcatcccacaaatgcctactttttcggcaccgtcatggatggctgctatatatgatgcggataatgggtcaggcacctcagaagatctgttttggaaacttgacgcccttcagaccttcattcgggacctgcactggcctgaagaagagtttggaaagcacctggaacaacggctgaagttgatggcaagtgacatgatcgaatcttgtgtcaaaagaaccaggattgcatttgaagttaagctgcaaaaaaccagtcgatcaacagattttcgagtcccacagtcaatatgcaccatgtttaatgttatggttgatgccaaagctcaatcaacaaaactttgcagcatggaaatgggccaagagcatcaataccattcaaaaatagacgaactaattgaagaaactgttaaagaaatgataacactcttggttgcaaagttcgttactatcttggaaggagtgctggcaaaattatccagatatgacgaagggactttgttttcttcttttctgtcatttaccgtgaaggcagcttccaaatatgtggatgtacctaaacccgggatggacgtggccgacgcctacgtgactttcgtccgccattctcaggatgtcctgcgtgataaggtcaatgaggagatgtacatagaaaggttatttgatcaatggtacaacagctccatgaacgtgatctgcacctggttgacggaccggatggacttacagcttcatatttatcagttgaaaacactaattaggatggtaaagaaaacctacagagatttccgattgcaaggggtcctggactccaccttaaacagcaagacctatgaaacgatccggaaccgtctcactgtggaggaagccacagcatcagtgagtgaaggtgggggactgcagggcatcagcatgaaggacagcgatgaggaagacgaagaagacgattagaccatttggtcctagagtctgctgggacagagtcctgtaatcagtgcatgtccttagtctgttagttaaacccattaggaattttctgtcaactaccatgcccatgagatgtttatcaatacaactgccattttagctatgtggtaccaagattagcaaatgaccttcatatccactgatttcctgatgtccatgtctatatgtttacaagcaatatggagcaccattctttaaatactgttcatggagaatacatagtctaaccactaggcgtgtccctgttatcagcaaagatcaatgatgcttcattcatgtactatgtatgcattggtggtaaatggatgtgagggcaagtacatcaagtacattcactctgtttcacgtatgtggatgccagttaattaaatgagtacgtaaataaattaattaaaacacatagatctgctttgtgtttttatttttattttttgaaaaacaaaaggcaagtctccaacaattaacttttgatgctttctgttcccctaaaaccaaaaaatgaaccccttgtgtcgttgttaacccatcctttcatttactcatataattagccaaaaaaaaaaggatggctacataccaatggattgattctcttaattgccacggcaagggggcgatcctatcatgacttaacatcaagcgcgcagttcaaaactactgtcttctgtcaaagttttctcctcttaaatgttattttgcttttacgtctcaactgtgtatgtaaaaaaaatgaatatttaaattacaaccctagactaaaaatgtgtttataataagatgtggatatttccttcagtagattgtaaccataatttaaattattttgttccacactgttttttatatctgtcatgtacattgcattttgatctgtaactgcacaaccctggggtttgctgcagagctatttctttccatgtaaagtagtggatccatcttgcttttgccttatataaagcctacagttatggaagtgtggaaaactgtggcttctcaataaatattcagatgtcctaagaatat

SEQ ID NO: 2925 - DNA, 3033 bp, Homo sapiens
  source 1..3033: mol_type = unassigned DNA; mol_type = unassigned DNA
gggaaaacctgtccatgcctgaagcagcttgaccccagcaaacaccctgcctccatggagtgaactgcaaatctccaaaaaaaaaaaaaaaaaaaaaaaatctacttcctacccctcctgctccctggggagggacagaaggttcctaaaactgacagtttcgcctccatgatctttaaaagagcagaagctggctgtgaggctgcagtgctgcctcgattggggtagtgtggtctctgttgcggctgggctccaaggagagccacaattggctctgatgaggaaggagcctagaaatgaaagattgcaaagagggcttctgtacgccatggctgagactgtgtcgtttcttgcaaggtgaaacttggcagttctaccttgcaagtaaaaacctaaattaatttttttaaaagaaattaagtcagaaacaaggcttcggaaaaactgtgagtgttaggcataaactgattttggatgatctttaggtgagaaagggtggagttaccatcagaaacatgtttttatttatgcttttcgaatccccactggtgtgcgatgtgtgtgtgcgcgcgcgtgcatgtgcgtgtgtattggttagcgtgagagtatgcatcatctcaattctctaaccatttctttcttttttgcatcttttctgtgcacagttcatatagatcccctataaataaatatataggtccatccacaccttttcattttatttgtaaattgtttggtataagcggcagagcgtaatgaaacctggtgaagtttaaaagattagatttttttttatactgacacttcataacactgttcatatgtctccgagtgagatttatgaatatatgagcagtactgcaaaattatactgcaccagagacttcctgcaccacaggggtggcagtctaaagtgacacagcttcaagcatttttcacagacaagaagcaaaatttaacccccttaaggggaagtatgatttcaacagcttgaaatgagctcatttgtagatggtttttttttctctcatcttccataattttttggtgttaagattaaaacagattgcacagccaatataagggcacataagctgcccagagtacagtttggcccttaaagagaaattttcattcattgtctttatcagcactcctcaatcaggtaaatgaagataaacttgcccctaaattcctaaggctctcagcccaatttccagtattgtacttagcagacagggtgtggaattttcaaacggtaagtggcaaggaacatcaattaatccagtggagaagccctcatctctctggcaccaaagacagtgacattaggaaataattaatgtattgaatataaatggtgtaaaattaaccaataaaaaagagaatcagaagagcaaaagatggtctgtatgaattgaaacataggaaatgtctgtcgtggaagagttcaattagattcgaagtcctaactgtcttagattgtctgtcttggattggtccagtacccagtaccttgcaattttgtataaactaactaacgttcattaaactctatgctctcaaattctctttaaccattttgtttcctcctggaacagagtggggtactcaaacattgcctgctctctctctgccctataaatgctccatgatgtgttggctggagaacttttgtctcttttttcagcaatggtacaacagctccatgaacgtgatctgcacctggttgacggaccggatggacttacagcttcatatttatcagttgaaaacactaattaggatggtaaagaaaacctacagagatttccgattgcaaggggtcctggactccaccttaaacagcaagacctatgaaacgatccggaaccgtctcactgtggaggaagccacagcatcagtgagtgaaggtgggggactgcagggcatcagcatgaaggacagcgatgaggaagacgaagaagacgattagaccatttggtcctagagtctgctgggacagagtcctgtaatcagtgcatgtccttagtctgttagttaaacccattaggaattttctgtcaactaccatgcccatgagatgtttatcaatacaactgccattttagctatgtggtaccaagattagcaaatgaccttcatatccactgatttcctgatgtccatgtctatatgtttacaagcaatatggagcaccattctttaaatactgttcatggagaatacatagtctaaccactaggcgtgtccctgttatcagcaaagatcaatgatgcttcattcatgtactatgtatgcattggtggtaaatggatgtgagggcaagtacatcaagtacattcactctgtttcacgtatgtggatgccagttaattaaatgagtacgtaaataaattaattaaaacacatagatctgctttgtgtttttatttttattttttgaaaaacaaaaggcaagtctccaacaattaacttttgatgctttctgttcccctaaaaccaaaaaatgaaccccttgtgtcgttgttaacccatcctttcatttactcatataattagccaaaaaaaaaaggatggctacataccaatggattgattctcttaattgccacggcaagggggcgatcctatcatgacttaacatcaagcgcgcagttcaaaactactgtcttctgtcaaagttttctcctcttaaatgttattttgcttttacgtctcaactgtgtatgtaaaaaaaatgaatatttaaattacaaccctagactaaaaatgtgtttataataagatgtggatatttccttcagtagattgtaaccataatttaaattattttgttccacactgttttttatatctgtcatgtacattgcattttgatctgtaactgcacaaccctggggtttgctgcagagctatttctttccatgtaaagtagtggatccatcttgcttttgccttatataaagcctacagttatggaagtgtggaaaactgtggcttctcaataaatattcagatgtcctaagaata

SEQ ID NO: 2926 - DNA, 2095 bp, Homo sapiens
  source 1..2095: mol_type = unassigned DNA; mol_type = unassigned DNA
acctacccaatgtgaacctacccaatgtgaaccttcccaaagtaccaaatctaccagttaacatccctctaggcatcccacaaatgcctactttttcggcaccgtcatggatggctgctatatatgatgcggataatgggtcaggcacctcagaagatctgttttggaaacttgacgcccttcagaccttcattcgggacctgcactggcctgaagaagagtttggaaagcacctggaacaacggctgaagttgatggcaagtgacatgatcgaatcttgtgtcaaaagaaccaggattgcatttgaagttaagctgcaaaaaaccagtcgatcaacagattttcgagtcccacagtcaatatgcaccatgtttaatgttatggttgatgccaaagctcaatcaacaaaactttgcagcatggaaatgggccaagagtttgctaaaatgtggcatcaataccattcaaaaatagacgaactaattgaagaaactgttaaagaaatgataacactcttggttgcaaagttcgttactatcttggaaggagtgctggcaaaattatccagatatgacgaagggactttgttttcttcttttctgtcatttaccgtgaaggcagcttccaaatatgtggatgtacctaaacccgggatggacgtggccgacgcctacgtgactttcgtccgccattctcaggatgtcctgcgtgataaggtcaatgaggagatgtacatagaaaggttatttgatcaatggtacaacagctccatgaacgtgatctgcacctggttgacggaccggatggacttacagcttcatatttatcagttgaaaacactaattaggatggtaaagaaaacctacagagatttccgattgcaaggggtcctggactccaccttaaacagcaagacctatgaaacgatccggaaccgtctcactgtggaggaagccacagcatcagtgagtgaaggtgggggactgcagggcatcagcatgaaggacagcgatgaggaagacgaagaagacgattagaccatttggtcctagagtctgctgggacagagtcctgtaatcagtgcatgtccttagtctgttagttaaacccattaggaattttctgtcaactaccatgcccatgagatgtttatcaatacaactgccattttagctatgtggtaccaagattagcaaatgaccttcatatccactgatttcctgatgtccatgtctatatgtttacaagcaatatggagcaccattctttaaatactgttcatggagaatacatagtctaaccactaggcgtgtccctgttatcagcaaagatcaatgatgcttcattcatgtactatgtatgcattggtggtaaatggatgtgagggcaagtacatcaagtacattcactctgtttcacgtatgtggatgccagttaattaaatgagtacgtaaataaattaattaaaacacatagatctgctttgtgtttttatttttattttttgaaaaacaaaaggcaagtctccaacaattaacttttgatgctttctgttcccctaaaaccaaaaaatgaaccccttgtgtcgttgttaacccatcctttcatttactcatataattagccaaaaaaaaaaggatggctacataccaatggattgattctcttaattgccacggcaagggggcgatcctatcatgacttaacatcaagcgcgcagttcaaaactactgtcttctgtcaaagttttctcctcttaaatgttattttgcttttacgtctcaactgtgtatgtaaaaaaaatgaatatttaaattacaaccctagactaaaaatgtgtttataataagatgtggatatttccttcagtagattgtaaccataatttaaattattttgttccacactgttttttatatctgtcatgtacattgcattttgatctgtaactgcacaaccctggggtttgctgcagagctatttctttccatgtaaagtagtggatccatcttgcttttgccttatataaagcctacagttatggaagtgtggaaaactgtggcttctcaataaatattcagatgtcctaagaata

SEQ ID NO: 2927 - DNA, 5190 bp, Homo sapiens
  source 1..5190: mol_type = unassigned DNA; mol_type = unassigned DNA
tcagcagccgcagatggcatccggctgcgggctcggggctcgcaattgattctcccccttgcccacctcgagtccacggacgcacctctcccttcccctcctcccttcgcgcttctgggtctgagcccagctcgcgaccgccgggcagaggatcagtcgcggcggccgaggctgagcagcagcgctctcgctccctgacctggggagaagcgcccacccgggagagctgatccccggctgcctccagcgccccccaccttttgcactccaagccgggggctccagagaccccgctccccaggcgccactatgctggacccttcgtccagcgaagaagaatcggatgagatcgtggaggaggagagcggcaaggaggtgctcggctcggccccgtccggcgcgcgcctgtctcccagccgtaccagcgagggctcggccggcagcgccgggctggggggcggcggcgccggcgccggagccggggtgggtgcaggcggcggcgggggcagcggcgcgagcagcggcggcggggccggggggctgcaacccagcagccgcgctggcggcggccggccctccagccccagcccgtcggtggtgagcgagaaggagaaggaagagttggagcggctgcagaaagaggaggaggagaggaagaagaggctgcagctgtatgtgttcgtgatgcgctgcatcgcctacccctttaatgccaagcagcccaccgacatggctcgccggcagcagaagatcagcaaacagcagctgcagacagtcaaggaccggtttcaggctttcctcaatggggaaacccagatcatggctgacgaagccttcatgaacgctgtgcagagttactatgaggtgttcctgaagagcgaccgtgtggcccgcatggttcagagtggaggctgttccgccaacgactcccgggaggtcttcaagaagcacattgagaagagagtgcgcagcctgcctgagattgacggcctcagcaaggagactgtgctgagctcctggatggccaaatttgatgccatctaccgtggagaagaggacccgcggaagcagcaggcccggatgacagccagcgcagcctccgagctgattctgagcaaggagcaactctatgagatgttccagaacattcttgggatcaagaagttcgaacatcagctcctttacaatgcctgccagctggacaatccagatgagcaagcagcccagatcagacgagagctggatggacgtctacaaatggcagaccaaatagccagggaacgcaaatttcccaagtttgtatccaaagaaatggaaaacatgtacattgaggagctgaagtcatctgtcaacctgctcatggccaacttggagagcatgccggtatccaaaggcggggagttcaagctccagaaactcaaacgcagccacaatgcttccatcatcgacatgggcgaggagagtgagaaccagctctccaagtcagatgtcgtgctgtctttctcattggaggtggtaattatggaagtccaaggcctcaaatctttggctccaaatcgcatcgtatattgcacaatggaggtggaaggaggagagaaactacagactgatcaggccgaggcttctaaaccaacctggggcacccagggtgacttctccacaacccatgcactgccagctgtgaaggtgaagctgttcacagagagcacaggcgtcctggcgttggaggacaaggagcttgggcgggttattctccatcccaccccgaacagccccaaacagtcagagtggcacaaaatgacagtctccaaaaactgccccgaccaagatctcaaaatcaaacttgctgtccgaatggataagcctcaaaacatgaagcattctgggtatttatgggccatcggtaagaatgtctggaagagatggaagaaaaggttttttgtattggtgcaggtcagtcagtacacgtttgccatgtgcagttatcgggagaagaaagcggagcctcaggaacttctacaattggatggctacactgtggattacaccgacccccagccaggtttggagggtggccgagccttcttcaatgctgtcaaggagggagacaccgtgatatttgccagtgacgatgaacaagaccgcatcctgtgggtccaggccatgtatcgggccacggggcagtcacacaagcctgtgcccccgacccaagtccagaaactcaacgccaagggaggaaatgtacctcagctggatgcccctatctctcaattttacgcagatagagctcaaaaacatggcatggatgaatttatctcttccaacccctgtaactttgaccacgcttccctctttgagatgggctggttcagtcctggccaggtgtttgtactagacgagtattgcgcccgaaatggagtccgggggtgtcaccgacatctctgctacctcagagacttgcttgaacgggcagaaaatggcgccatgatcgaccccacccttcttcactacagctttgccttctgtgcatcccatgtccatgggaacaggcctgatggaattggaactgtgactgttgaagaaaaggaacgttttgaagaaatcaaagagaggctccgagttctgctagaaaatcagattacacattttaggtattgctttccatttggtcgacctgaaggtgctttgaaagctactctctcactcttggaaagggttttgatgaaagatattgttaccccagtgccacaagaggaggtaaaaacagttatccgtaaatgtctggaacaggctgcgttagtcaactattctcggctctcagagtatgccaaaatcgaagaaaatgtaggccggttaatcactcctgccaaaaagcttgaagatacaatacgtcttgctgaactagtcattgaagttcttcagcaaaatgaggagcaccacgcagaggcctttgcgtggtggtcagatttaatggtggagcatgcggagacgttcctgtcactctttgcagtagacatggatgcagccttagaggtgcaacctccagacacatgggacagttttccactatttcagctgctgaatgattttctccgtactgactataatttgtgcaatggaaaatttcacaaacacctgcaagacctgtttgccccacttgttgttagatatgtggatctgatggagtcctcaattgcacaatccattcacaggggctttgagcgggagtcatgggaaccagtcaataatgggtcaggcacctcagaagatctgttttggaaacttgacgcccttcagaccttcattcgggacctgcactggcctgaagaagagtttggaaagcacctggaacaacggctgaagttgatggcaagtgacatgatcgaatcttgtgtcaaaagaaccaggattgcatttgaagttaagctgcaaaaaaccagtcgatcaacagattttcgagtcccacagtcaatatgcaccatgtttaatgttatggttgatgccaaagctcaatcaacaaaactttgcagcatggaaatgggccaagagcatcaataccattcaaaaatagacgaactaattgaagaaactgttaaagaaatgataacactcttggttgcaaagttcgttactatcttggaaggagtgctggcaaaattatccagatatgacgaagggactttgttttcttcttttctgtcatttaccgtgaaggcagcttccaaatatgtggatgtacctaaacccgggatggacgtggccgacgcctacgtgactttcgtccgccattctcaggatgtcctgcgtgataaggtcaatgaggagatgtacatagaaaggttatttgatcaatggtacaacagctccatgaacgtgatctgcacctggttgacggaccggatggacttacagcttcatatttatcagttgaaaacactaattaggatggtaaagaaaacctacagagatttccgattgcaaggggtcctggactccaccttaaacagcaagacctatgaaacgatccggaaccgtctcactgtggaggaagccacagcatcagtgagtgaaggtgggggactgcagggcatcagcatgaaggacagcgatgaggaagacgaagaagacgattagaccatttggtcctagagtctgctgggacagagtcctgtaatcagtgcatgtccttagtctgttagttaaacccattaggaattttctgtcaactaccatgcccatgagatgtttatcaatacaactgccattttagctatgtggtaccaagattagcaaatgaccttcatatccactgatttcctgatgtccatgtctatatgtttacaagcaatatggagcaccattctttaaatactgttcatggagaatacatagtctaaccactaggcgtgtccctgttatcagcaaagatcaatgatgcttcattcatgtactatgtatgcattggtggtaaatggatgtgagggcaagtacatcaagtacattcactctgtttcacgtatgtggatgccagttaattaaatgagtacgtaaataaattaattaaaacacatagatctgctttgtgtttttatttttattttttgaaaaacaaaaggcaagtctccaacaattaacttttgatgctttctgttcccctaaaaccaaaaaatgaaccccttgtgtcgttgttaacccatcctttcatttactcatataattagccaaaaaaaaaaggatggctacataccaatggattgattctcttaattgccacggcaagggggcgatcctatcatgacttaacatcaagcgcgcagttcaaaactactgtcttctgtcaaagttttctcctcttaaatgttattttgcttttacgtctcaactgtgtatgtaaaaaaaatgaatatttaaattacaaccctagactaaaaatgtgtttataataagatgtggatatttccttcagtagattgtaaccataatttaaattattttgttccacactgttttttatatctgtcatgtacattgcattttgatctgtaactgcacaaccctggggtttgctgcagagctatttctttccatgtaaagtagtggatccatcttgcttttgccttatataaagcctacagttatggaagtgtggaaaactgtggcttctcaataaatattcagatgtcctaagaa

SEQ ID NO: 2928 - DNA, 4371 bp, Homo sapiens
  source 1..4371: mol_type = unassigned DNA; mol_type = unassigned DNA
aatttaatagtatcagctgtctggtcaagtatattttccagctataactaagggttagcttgtttgtgaacagtttttcttttaattgttttgattggaaatctacttgaaatgcattacacaaccttcttgcctttttaaacagggtactgactataatcttttctcaatgactcaggatcaccattgtgaccatgtctttccccagtggctgcatagtgacccactcccctccagggcctcccaagatataggggaggcttgcccctgccctcgatagtcccaaaccccagcggttggtgagtctgcatgtctggtgttgcagttgggcagcctcctccctcaccgtcaggcataaggaaaaatgatagctctctcttatctgcacagttttttcaaacaatccccctcttccctatttctgctccatcaagggatggaaaccaaacttgttggaattggttgggagtgggagcttgaggactccattatgagaaaactacacatgttttgtgctgaggctttatcatttttattttgacgttggctcctctgaggcccccttttcttcttggttctagagtagattctaaaggtaggtaaggctgtggaatggtataatattatgggggggggggggaatcatagtaattcatgtttgtattacaatatatggctttcaaaacatttttacatacattattctagctgatgaccataacagtccgtggaggtaagtaggggagctgttagtaatcccattttatagatagcataactaaggcccagagaagtttttttttaactcttcttttacagaaaagtttaagtgatattcacaaattccaatttgtgggagatccagtaaaaatccatgcagtgtgactgaagagcttgaaaaaggaggagatggagaaaggatttgctcattcattcttgaatttgtccattcagcaaatatttactgggcccctactatatgctaggtaccattttgtatgctggggatgcaatagaaaacaggccaaacaaagttcctgggttcatggagcttatgttctagtgggataagagagaaaacaaatagtgtataatacaacatcagctattggtaagtgctattggaaaaagaagagtcaaaagggagcaaatcatggagtttcttaactacatgggtaagatgaaccacactgattttttaaaataccagagtttttaaaacttgaatgaagtgcccctttgaagacagtgaaacttcgtgaaaagagaaggagtggtgcaaatacgcatcattgtagattactgtttcttctaacattttgggttactgatagatctgccgcacttgactttgtaccttagctctaagatggttgcatgcgcccaggaaaaggccatattgccacaagcatcaccaggggagaaatagaaacaataataagtttctcaagtcccccaggtagagatccccatccctactgagaatgccctttgatgcacagttgccaaacggagagaaggagagaggtgcctgcttagaactgatagctatcacttacatctcattggagaacctctattgttttgtatcataaaactgcaacaattataggaccatcatggaacctgctcaatccattcgctgaaaattgtttgaaagtgtaacacttgactactgtggctttgggttgtcctcattgtttttcaaattaataccttgtcattgtttcagcaggtgttaagaaatgttactagcatcccaggggccaagcattggccctttgcatgataattgtttgctttgtatcaggaaaaaaaaatacagtcctactgtttctaaaccttcctcattttcaccctggaaattacacagaagtgttaactaacttcaatttacagtgcctgacagtcacgtctagtagagaaatgatactttgtgatctaaggtaaatcacagtaatgaaaactaatctttttagttattagcagacatatatatctactgtggaaatttgaggggtttgtggccactctcctaatgacctatattacagtgttttaataggtttctttggagataactttgattgtgacatctcaagcagagtgctttctgagtttctttttttttttacttccctacaataagtcatttcctaactgcaggatgaaccaccagcttacctttccagaaaatctgatttatttaaaaatcaaatcctctcctccttcccctgccttttgtttcttctcttcttcttcttctttttaatccttggactttaaggctgcactggaagcaaagacaaatggtttagtgtctcctctgagtgaactaattaattagcaaatactatatccactcaggttaagctatacacacacacacacacacacacacacacacacacacacacacaatgagacttgggtaggaagaggtatagattgaaacacaattttttttacttagtactttctcaatattttaaaagaggaaaaaggaatgggaagttccatcacccgtctgataatatattaaggacagtggaaaacagtatgtttggatattctttaatgcaggtttcaatccaaggcaaagtcagagaacatctatgggttatgcagtaaagatttatccattagataaatttgccaggaaaaaatttatcatagaaaaactatttataaaatcctacaatctcaatgcccttcttagccaggcttgatttctggaaagaggaagcagttctaatatcaattcctaccagcccaggctgtggacagcaatcccatgcctacaaagctgatccagcagaagcatctcagggtgtgtgagggcaagtagagggtacaagtgaatggtaaacaaggaagagtggctgtctgaaaattcgttttcatgttttcctgtttctttacagaaacccgggatggacgtggccgacgcctacgtgactttcgtccgccattctcaggatgtcctgcgtgataaggtcaatgaggagatgtacatagaaaggttatttgatcaatggtacaacagctccatgaacgtgatctgcacctggttgacggaccggatggacttacagcttcatatttatcagttgaaaacactaattaggatggtaaagaaaacctacagagatttccgattgcaaggggtcctggactccaccttaaacagcaagacctatgaaacgatccggaaccgtctcactgtggaggaagccacagcatcagtgagtgaaggtgggggactgcagggcatcagcatgaaggacagcgatgaggaagacgaagaagacgattagaccatttggtcctagagtctgctgggacagagtcctgtaatcagtgcatgtccttagtctgttagttaaacccattaggaattttctgtcaactaccatgcccatgagatgtttatcaatacaactgccattttagctatgtggtaccaagattagcaaatgaccttcatatccactgatttcctgatgtccatgtctatatgtttacaagcaatatggagcaccattctttaaatactgttcatggagaatacatagtctaaccactaggcgtgtccctgttatcagcaaagatcaatgatgcttcattcatgtactatgtatgcattggtggtaaatggatgtgagggcaagtacatcaagtacattcactctgtttcacgtatgtggatgccagttaattaaatgagtacgtaaataaattaattaaaacacatagatctgctttgtgtttttatttttattttttgaaaaacaaaaggcaagtctccaacaattaacttttgatgctttctgttcccctaaaaccaaaaaatgaaccccttgtgtcgttgttaacccatcctttcatttactcatataattagccaaaaaaaaaaggatggctacataccaatggattgattctcttaattgccacggcaagggggcgatcctatcatgacttaacatcaagcgcgcagttcaaaactactgtcttctgtcaaagttttctcctcttaaatgttattttgcttttacgtctcaactgtgtatgtaaaaaaaatgaatatttaaattacaaccctagactaaaaatgtgtttataataagatgtggatatttccttcagtagattgtaaccataatttaaattattttgttccacactgttttttatatctgtcatgtacattgcattttgatctgtaactgcacaaccctggggtttgctgcagagctatttctttccatgtaaagtagtggatccatcttgcttttgccttatataaagcctacagttatggaagtgtggaaaactgtggcttctcaataaatattcagatgtcctaag

SEQ ID NO: 2929 - DNA, 4591 bp, Homo sapiens
  source 1..4591: mol_type = unassigned DNA; mol_type = unassigned DNA
ctcctcccttcgcgcttctgggtctgagcccagctcgcgaccgccgggcagaggatcagtcgcggcggccgaggctgagcagcagcgctctcgctccctgacctggggagaagcgcccacccgggagagctgatccccggctgcctccagcgccccccaccttttgcactccaagccgggggctccagagaccccgctccccaggcgccactatgctggacccttcgtccagcgaagaagaatcggatgagatcgtggaggaggagagcggcaaggaggtgctcggctcggccccgtccggcgcgcgcctgtctcccagccgtaccagcgagggctcggccggcagcgccgggctggggggcggcggcgccggcgccggagccggggtgggtgcaggcggcggcgggggcagcggcgcgagcagcggcggcggggccggggggctgcaacccagcagccgcgctggcggcggccggccctccagccccagcccgtcggtggtgagcgagaaggagaaggaagagttggagcggctgcagaaagaggaggaggagaggaagaagaggctgcagctgtatgtgttcgtgatgcgctgcatcgcctacccctttaatgccaagcagcccaccgacatggctcgccggcagcagaagatcagcaaacagcagctgcagacagtcaaggaccggtttcaggctttcctcaatggggaaacccagatcatggctgacgaagccttcatgaacgctgtgcagagttactatgaggtgttcctgaagagcgaccgtgtggcccgcatggttcagagtggaggctgttccgccaacgactcccgggaggtcttcaagaagcacattgagaagagagtgcgcagcctgcctgagattgacggcctcagcaaggagactgtgctgagctcctggatggccaaatttgatgccatctaccgtggagaagaggacccgcggaagcagcaggcccggatgacagccagcgcagcctccgagctgattctgagcaaggagcaactctatgagatgttccagaacattcttgggatcaagaagttcgaacatcagctcctttacaatgcctgccagctggacaatccagatgagcaagcagcccagatcagacgagagctggatggacgtctacaaatggcagaccaaatagccagggaacgcaaatttcccaagtttgtatccaaagaaatggaaaacatgtacattgaggagctgaagtcatctgtcaacctgctcatggccaacttggagagcatgccggtatccaaaggcggggagttcaagctccagaaactcaaacgcagccacaatgcttccatcatcgacatgggcgaggagagtgagaaccagctctccaagtcagatgtcgtgctgtctttctcattggaggtggtaattatggaagtccaaggcctcaaatctttggctccaaatcgcatcgtatattgcacaatggaggtggaaggaggagagaaactacagactgatcaggccgaggcttctaaaccaacctggggcacccagggtgacttctccacaacccatgcactgccagctgtgaaggtgaagctgttcacagagagcacaggcgtcctggcgttggaggacaaggagcttgggcgggttattctccatcccaccccgaacagccccaaacagtcagagtggcacaaaatgacagtctccaaaaactgccccgaccaagatctcaaaatcaaacttgctgtccgaatggataagcctcaaaacatgaagcattctgggtatttatgggccatcggtaagaatgtctggaagagatggaagaaaaggttttttgtattggtgcaggtcagtcagtacacgtttgccatgtgcagttatcgggagaagaaagcggagcctcaggaacttctacaattggatggctacactgtggattacaccgacccccagccaggtttggagggtggccgagccttcttcaatgctgtcaaggagggagacaccgtgatatttgccagtgacgatgaacaagaccgcatcctgtgggtccaggccatgtatcgggccacggggcagtcacacaagcctgtgcccccgacccaagtccagaaactcaacgccaagggaggaaatgtacctcagctggatgcccctatctctcaattttacgcagatagagctcaaaaacatggcatggatgaatttatctcttccaacccctgtaactttgaccacgcttccctctttgagatggtacaacgccttactttggatcacagacttaatgattcctattcttgcctgggctggttcagtcctggccaggtgtttgtactagacgagtattgcgcccgaaatggagtccgggggtgtcaccgacatctctgctacctcagagacttgcttgaacgggcagaaaatggcgccatgatcgaccccacccttcttcactacagctttgccttctgtgcatcccatgtccatgggaacaggcctgatggaattggaactgtgactgttgaagaaaaggaacgttttgaagaaatcaaagagaggctccgagttctgctagaaaatcagattacacattttaggtattgctttccatttggtcgacctgaaggtgctttgaaagctactctctcactcttggaaagggttttgatgaaagatattgttaccccagtgccacaagaggaggtaaaaacagttatccgtaaatgtctggaacaggctgcgttagtcaactattctcggctctcagagtatgccaaaatcgaagggaaaaagagagaaatgtatgagcatcctgtcttctgcttggcctcccaagtgatggatttaaccattcaaaatgtaggccggttaatcactcctgccaaaaagcttgaagatacaatacgtcttgctgaactagtcattgaagttcttcagcaaaatgaggagcaccacgcagaggcctttgcgtggtggtcagatttaatggtggagcatgcggagacgttcctgtcactctttgcagtagacatggatgcagccttagaggtgcaacctccagacacatgggacagttttccactatttcagctgctgaatgattttctccgtactgactataatttgtgcaatggaaaatttcacaaacacctgcaagacctgtttgccccacttgttgttagatatgtggatctgatggagtcctcaattgcacaatccattcacaggggctttgagcgggagtcatgggaaccagtcaataatgggtcaggcacctcagaagatctgttttggaaacttgacgcccttcagaccttcattcgggacctgcactggcctgaagaagagtttggaaagcacctggaacaacggctgaagttgatggcaagtgacatgatcgaatcttgtgtcaaaagaaccaggattgcatttgaagttaagctgcaaaaaaccagtcgatcaacagattttcgagtcccacagtcaatatgcaccatgtttaatgttatggttgatgccaaagctcaatcaacaaaactttgcagcatggaaatgggccaagagcatcaataccattcaaaaatagacgaactaattgaagaaactgttaaagaaatgataacactcttggttgcaaagttcgttactatcttggaaggagtgctggcaaaattatccagatatgacgaagggactttgttttcttcttttctgtcatttaccgtgaaggcagcttccaaatatgtggatgtacctaaacccgggatggacgtggccgacgcctacgtgactttcgtccgccattctcaggatgtcctgcgtgataaggtcaatgaggagatgtacatagaaaggttatttgatcaatggtacaacagctccatgaacgtgatctgcacctggttgacggaccggatggacttacagcttcatatttatcagttgaaaacactaattaggatggtaaagaaaacctacagagatttccgattgcaaggggtcctggactccaccttaaacagcaagacctatgaaacgatccggaaccgtctcactgtggaggaagccacagcatcagtgagtgaaggtgggggactgcagggcatcagcatgaaggacagcgatgaggaagacgaagaagacgattagaccatttggtcctagagtctgctgggacagagtcctgtaatcagtgcatgtccttagtctgttagttaaacccattaggaattttctgtcaactaccatgcccatgagatgtttatcaatacaactgccattttagctatgtggtaccaagattagcaaatgaccttcatatccactgatttcctgatgtccatgtctatatgtttacaagcaatatggagcaccattctttaaatactgttcatggagaatacatagtctaaccactaggcgtgtccctgttatcagcaaagatcaatgatgcttcattcatgtactatgtatgcattggtggtaaatggatgtgagggcaagtacatcaagtacattcactctgtttcacgtatgtggatgccagttaattaaatgagtacgtaaataaattaattaaaaca

SEQ ID NO: 2930 - DNA, 570 bp, Homo sapiens
  source 1..570: mol_type = unassigned DNA; mol_type = unassigned DNA
aaagcacctggaacaacggctgaagttgatggcaagtgacatgatcgaatcttgtgtcaaaagaaccaggattgcatttgaagttaagctgcaaaaaaccagtcgatcaacagattttcgagtcccacagtcaatatgcaccatgtttaatgttatggttgatgccaaagctcaatcaacaaaactttgcagcatggaaatgggccaagagcatcaataccattcaaaaatagacgaactaattgaagaaactgttaaagaaatgataacactcttggttgcaaagttcgttactatcttggaaggagtgctggcaaaattatccagatatgacgaagggactttgttttcttcttttctgtcatttaccaaacccgggatggacgtggccgacgcctacgtgactttcgtccgccattctcaggatgtcctgcgtgataaggtcaatgaggagatgtacatagaaaggttatttgatcaatggtacaacagctccatgaacgtgatctgcacctggttgacggaccggatggacttacagcttcatatttatcagttgaaaacactaat

SEQ ID NO: 2931 - DNA, 427 bp, Homo sapiens
  source 1..427: mol_type = unassigned DNA; mol_type = unassigned DNA
tttgtaaaagtgtttaagtgtctacacacattagaagcatcgaaagccttgagtaaggaacaatgaacttggtaatatttttaagagcttcagatctctctctatcaaagaactggagtcaggatcttataaatatttctgggactaaggaaataaacggggtccgcaggccaggctttatttataaattaagttgtctaaaaattactgacggatgcagtgccatcacctcccaaacatgctaatatttgtctttctgtgttcttagcatcaataccattcaaaaatagacgaactaattgaagaaactgttaaagaaatgataacactcttggttgcaaagttcgttactatcttggaaggagtgctggcaaaattatccagatatgacgaagggactttgttttcttcttttctgtcatttacc

SEQ ID NO: 2932 - DNA, 288 bp, Homo sapiens
  source 1..288: mol_type = unassigned DNA; mol_type = unassigned DNA
ggtttttttcccaagccatcttagagagatctttcgtgacatttttccttagtataattgaatctgagacacttaaatgaccagctgtgggaaatgaggcttctttgaatgccaagtggctgagaacagcatcaataccattcaaaaatagacgaactaattgaagaaactgttaaagaaatgataacactcttggttgcaaagttcgttactatcttggaaggagtgctggcaaaattatccagatatgacgaagggactttgttttcttcttttctgtcatttacc

SEQ ID NO: 2933 - DNA, 669 bp, Homo sapiens
  source 1..669: mol_type = unassigned DNA
ctggaacaacggctgaagttgatggcaagtgacatgatcgaatcttgtgtcaaaagaaccaggattgcatttgaagttaagctgcaaaaaaccagtcgatcaacagattttcgagtcccacagtcaatatgcaccatgtttaatgttatggttgatgccaaagctcaatcaacaaaactttgcagcatggaaatgggccaagaggtaaaaaaaaaaaaaaaaatacagatttttttttccctcttcattgatcatgtagaagaaaacttcacaaattccttccatctaccctagtctgctagtttcagaaatacactctaacatttgtggattaagccatggatgagtgttcagtatctgtttgtcaagtagatttctaaggcatgtgctgatgagaatgtcagtcacttggaagtgattcttggctggagttggggtggccatatagttctctaagctaaatgaagtttgacgaccttatttattaggctggtgtctcgaacagatctgtgtttgccagaatgaaagtcattttcacatttgaagtgcattttatcactttgaacatctggacagcaagagaggcctttcttgcatcaaacaacttccaggatgtataatgttagatcaccctgctacccaatccccagccagcaggttctgaatttc

SEQ ID NO: 2934 - DNA, 2048 bp, Homo sapiens
  source 1..2048: mol_type = unassigned DNA; mol_type = unassigned DNA
tactaaatgatgtttatttcactatatcccatgtgctctgactctgagacttcaaggtttgaagggggctaaacatgaaatacaagttcccctggaattcagactggttgaatccaagcagtttcactggccaagaaaacctttatgttttggccgggcacagtggttcacgcctgtaatgccagcactttggaaggctgaggcgggcggatctcctgaggtaaggagtttgagaccatcctggccagcaaggtgaaactctgtctctactaaaaatacaaaaatcagcccggcgtggtggcgggtgcctgtaatcccagctactcaggaggctgaggcaggaggatcacttgaacccaggaggcagaggttgcagtgagctgagatcgcaccactgccctccagcctgggcaacagaataaatgagactccgtctccaaaaaaaacaagaaaaagaaaagaaagaaagaaaacctcctttatgttttaaatattactgttttcccaaaggaaaaaagtttgtaatttttggaacataatgacattgtcaaactcatgaactcagctctaaaaagaaggcaacataagccagggttcagattcttcttgagctgggtaaaaatacaacactttcagtttaagagaaactaaaaacaaagaaaacaattaagtacattgtttcagtttaactgataaaatttcaattgtaacaaccagtagcacaaactatcacaacccattcaataatctactcctaacacccttttaagaattattattcctgactaatggcccaggcatatccaatttttcttttctatctcctccctggacaacttgaagcagacatttgaatctgcattttcaaaatgagcgttccaacatacgcgagcctgcaatgaaaaattacgctgtagcatttaataactaatctaaaaaacaaatgtaacagcaatcaatattaaacttctgttaatcttcccacttcaggtagcataattacaatctagagagtggtatagtacatttatgctgtctttaaagaacatgtgtacaaaatgtcactaaatttgatatgggctgtcatagacttaatatagcttcatatgcaaatttgaagctggagcactgcttttttctaatatatattataataatggtgataataataaaatggctttatggtttgctcactactaattacatggcacttaacatttgcatgaattttttttaaaaaactgataactattctcaatttcttatccactagttctaatggccataaaagtagcctgccactttcgctgaattttaacacaaactcttgtactacagaaaatgtaggccggttaatcactcctgccaaaaagcttgaagatacaatacgtcttgctgaactagtcattgaagttcttcagcaaaatgaggagcaccacgcagaggcctttgcgtggtggtcagatttaatggtggagcatgcggagacgttcctgtcactctttgcagtagacatggatgcagccttagaggtgcaacctccagacacatgggacagttttccactatttcagctgctgaatgattttctccgtactgactataatttgtgcaatggaaaatttcacaaacacctgcaagacctgtttgccccacttgttgttagatatgtggatctgatggagtcctcaattgcacaatccattcacaggggctttgagcgggagtcatgggaaccagtcaataatgggtcaggcacctcagaagatctgttttggaaacttgacgcccttcagaccttcattcgggacctgcactggcctgaagaagagtttggaaagcacctggaacaacggctgaagttgatggcaagtgacatgatcgaatcttgtgtcaaaagaaccaggattgcatttgaagttaagctgcaaaaaaccagtcgatcaacagattttcgagtcccacagtcaatatgcaccatgtttaatgttatggttgatgccaaagctcaatcaacaaaactttgcagcatggaaatgggccaagag

SEQ ID NO: 2935 - DNA, 610 bp, Homo sapiens
  source 1..610: mol_type = unassigned DNA; mol_type = unassigned DNA
acacatgggacagttttccactatttcagctgctgaatgattttctccgtactgactataatttgtgcaatggaaaatttcacaaacacctgcaagacctgtttgccccacttgttgttagatatgtggatctgatggagtcctcaattgcacaatccattcacaggggctttgagcgggagtcatgggaaccagtcaataatgggtcaggcacctcagaagatctgttttggaaacttgacgcccttcagaccttcattcgggacctgcactggcctgaagaagagtttggaaagcacctggaacaacggctgaagttgatggcaagtgacatgatcgaatcttgtgtcaaaaggtaagtataggtggctggacaggttctgcacaccctccccaccatacacagactcagggaagggtagatggctgctctttcaattggctgtagtttgaaactaattggagaaggggattgcttgtcaaagtcagctggagtagtggctgtcaacgtctaacttccattcacctgccctccatctgtcccaaacccaaaataatctggctgccaattttttcatggttgttggctttaagaggaaaagatccctgt

SEQ ID NO: 2936 - DNA, 933 bp, Homo sapiens
  source 1..933: mol_type = unassigned DNA; mol_type = unassigned DNA
taatgattcctattcttgcctgggctggttcagtcctggccaggtgtttgtactagacgagtattgcgcccgaaatggagtccgggggtgtcaccgacatctctgctacctcagagacttgcttgaacgggcagaaaatggcgccatgatcgaccccacccttcttcactacagctttgccttctgtgcatcccatgtccatgggaacaggcctgatggaattggaactgtgactgttgaagaaaaggaacgttttgaagaaatcaaagagaggctccgagttctgctagaaaatcagattacacattttaggtattgctttccatttggtcgacctgaaggtgctttgaaagctactctctcactcttggaaagggttttgatgaaagatattgttaccccagtgccacaagaggaggtaaaaacagttatccgtaaatgtctggaacaggctgcgttagtcaactattctcggctctcagagtatgccaaaatcgaagagaatcaaaaggatgcagaaaatgtaggccggttaatcactcctgccaaaaagcttgaagatacaatacgtcttgctgaactagtcattgaagttcttcagcaaaatgaggagcaccacgcagaggggaaagaggcctttgcgtggtggtcagatttaatggtggagcatgcggagacgttcctgtcactctttgcagtagacatggatgcagccttagaggtgcaacctccagacacatgggacagttttccactatttcagctgctgaatgattttctccgtactgactataatttgtgcaatggaaaatttcacaaacacctgcaagacctgtttgccccacttgttgttagatatgtggatctgatggagtcctcaattgcacaatccattcacaggggctttgagcgggagtcatgggaaccagtcaa

SEQ ID NO: 2937 - DNA, 719 bp, Homo sapiens
  source 1..719: mol_type = unassigned DNA; mol_type = unassigned DNA
acgcagatagagctcaaaaacatggcatggatgaatttatctcttccaacccctgtaactttgaccacgcttccctctttgagatggtacaacgccttactttggatcacagacttaatgattcctattcttgcctgggctggttcagtcctggccaggtgtttgtactagacgagtattgcgcccgaaatggagtccgggggtgtcaccgacatctctgctacctcagagacttgcttgaacgggcagaaaatggcgccatgatcgaccccacccttcttcactacagctttgccttctgtgcatcccatgtccatgggaacagtcaacaaatgcatgtgtaccttagtgggctgccaccaaatacagaccctgaagggagcaaaactccctccccacctgaaccagaagctaaaaaagataccaaaaaggaatccaaaaaaagaaaagattccaaaacccaggcaaatcaagagctgaaaaggcctgatggaattggaactgtgactgttgaagaaaaggaacgttttgaagaaatcaaagagaggctccgagttctgctagaaaatcagattacacattttaggtattgctttccatttggtcgacctgaaggtgctttgaaagctactctctcactcttggaaagggttttgatgaaagatattgttaccccagtgccacaagaggaggtaaaaacagttatccgtaaatgtctg

SEQ ID NO: 2938 - DNA, 535 bp, Homo sapiens
  source 1..535: mol_type = unassigned DNA; mol_type = unassigned DNA
aaagaaagcatcttgaagagaagggagtgcaaatgctgctgataggtttggagggtggccgagccttcttcaatgctgtcaaggagggagacaccgtgatatttgccagtgacgatgaacaagaccgcatcctgtgggtccaggccatgtatcgggccacggggcagtcacacaagcctgtgcccccgacccaagtccagaaactcaacgccaagggaggaaatgtacctcagctggatgcccctatctctcaattttacgcagatagagctcaaaaacatggcatggatgaatttatctcttccaacccctgtaactttgaccacgcttccctctttgagatggtacaacgccttactttggatcacagacttaatgattcctattcttgcctgggctggttcagtcctggccaggtgtttgtactagacgagtattgcgcccgaaatggagtccgggggtgtcaccgacatctctgctacctcagagacttgcttgaacgggcagaaaatggcgccatgatcgaccccaccct

SEQ ID NO: 2939 - DNA, 637 bp, Homo sapiens
  source 1..637: mol_type = unassigned DNA; mol_type = unassigned DNA
caagatctcaaaatcaaacttgctgtccgaatggataagcctcaaaacatgaagcattctgggtatttatgggccatcggtaagaatgtctggaagagatggaagaaaaggttttttgtattggtgcaggtcagtcagtacacgtttgccatgtgcagttatcgggagaagaaagcggagcctcaggaacttctacaattggatggctacactgtggattacaccgacccccagccaggtttggagggtggccgagccttcttcaatgctgtcaaggagggagacaccgtgatatttgccagtgacgatgaacaagaccgcatcctgtgggtccaggccatgtatcgggccacggggcagtcacacaagcctgtgcccccgacccaagtccagaaactcaacgccaagggaggaaatgtacctcagctggatgcccctatctctcaattttctggactgaaggacgcagatagagctcaaaaacatggcatggatgaatttatctcttccaacccctgtaactttgaccacgcttccctctttgagatggtacaacgccttactttggatcacagacttaatgattcctattcttgcctgggctggttcagtcctggccaggtgtttgtactagacg

SEQ ID NO: 2940 - DNA, 778 bp, Homo sapiens
  source 1..778: mol_type = unassigned DNA; mol_type = unassigned DNA
tttggagggtggccgagccttcttcaatgctgtcaaggagggagacaccgtgatatttgccagtgacgatgaacaagaccgcatcctgtgggtccaggccatgtatcgggccacggggcagtcacacaagcctgtgcccccgacccaagtccagaaactcaacgccaagggaggaaatgtacctcagctggatgcccctatctctcaattttacgcagatagagctcaaaaacatggcatggatgaatttatctcttccaacccctgtaactttgaccacgcttccctctttgagatggtacaacgccttactttggatcacagacttaatgattcctattcttgcctggcaagtatattctttggtctacagcaatttaaacataacattttttttcatttaaatatttctctacctttatgtcagaagctcttttctccattacagaatccctttaacaattataaatgtgttcccgatttcctgggttgagatagttttacttaccaaagaaacaagactgagcgggaggaagttatcagtagaaacagatccaattccccagcctccctatcttagcttcccccttttcagctgctacatgagaaatattcccaagagggtaatcgagtttggcacctgcttgtggagaacttgtaaaaattgcctcagtagcttagagtttaagatgcccttccctccccatcccagatctggtaatcctatctcattacatgaatgtattctctttgtgtattttcttaaaggttaaaatga

SEQ ID NO: 2941 - DNA, 2669 bp, Homo sapiens
  source 1..2669: mol_type = unassigned DNA; mol_type = unassigned DNA
atgctggacccttcgtccagcgaagaagaatcggatgagatcgtggaggaggagagcggcaaggaggtgctcggctcggccccgtccggcgcgcgcctgtctcccagccgtaccagcgagggctcggccggcagcgccgggctggggggcggcggcgccggcgccggagccggggtgggtgcaggcggcggcgggggcagcggcgcgagcagcggcggcggggccggggggctgcaacccagcagccgcgctggcggcggccggccctccagccccagcccgtcggtggtgagcgagaaggagaaggaagagttggagcggctgcagaaagaggaggaggagaggaagaagaggctgcagctgtatgtgttcgtgatgcgctgcatcgcctacccctttaatgccaagcagcccaccgacatggctcgccggcagcagaagatcagcaaacagcagctgcagacagtcaaggaccggtttcaggctttcctcaatggggaaacccagatcatggctgacgaagccttcatgaacgctgtgcagagttactatgaggtgttcctgaagagcgaccgtgtggcccgcatggttcagagtggaggctgttccgccaacgactcccgggaggtcttcaagaagcacattgagaagagagtgcgcagcctgcctgagattgacggcctcagcaaggagactgtgctgagctcctggatggccaaatttgatgccatctaccgtggagaagaggacccgcggaagcagcaggcccggatgacagccagcgcagcctccgagctgattctgagcaaggagcaactctatgagatgttccagaacattcttgggatcaagaagttcgaacatcagctcctttacaatgcctgccagctggacaatccagatgagcaagcagcccagatcagacgagagctggatggacgtctacaaatggcagaccaaatagccagggaacgcaaatttcccaagtttgtatccaaagaaatggaaaacatgtacattgaggagctgaagtcatctgtcaacctgctcatggccaacttggagagcatgccggtatccaaaggcggggagttcaagctccagaaactcaaacgcagccacaatgcttccatcatcgacatgggcgaggagagtgagaaccagctctccaagtcagatgtcgtgctgtctttctcattggaggtggtaattatggaagtccaaggcctcaaatctttggctccaaatcgcatcgtatattgcacaatggaggtggaaggaggagagaaactacagactgatcaggccgaggcttctaaaccaacggtaatcaggagaaacagaagagaacaactgcctcacagtgccatttgatgtcccgtctttgtgccatgtcaaatcatctccaggggtacaagatttgtgcttgaagagtcacagtacccaatctctgtttactgaataatttcactatagtctgtgtatttccctggtttacactcatccttttgggtgtttttcctagagcattccatggtttcttttctgtttagtaaatccgtgccagcttgcaaagtgacgtgaatgagaaagatggaattagtaatgttgttgaatgtgaacactcaagacaaaagaaagaaaacattttcccccttagctggctttgtcttctcaatgaccggaatgaaatgtcaagtgaacgtgttaattcttaatggggataccaatgaaagcttcaggggaagagaacatttaacagaggctctcacttttctctgaattttatttggatagacattagcattttattacagccttggaaaagatgagatgacaattattgacaaggttcccaggacacaaataaataaaatgaataaattgtttatttgataaatttcaattatctacaaggtgtaaaacactatagatgcgaatgattaaaaaataaagagcaaagaccctgttttcaggatgcagcatacttacagggaaataaatcatgtacatttagtagtgaatataaaaaagtaaagattccattctggggaaaactgcagattgcttctgttgagaaaaccaaagaatggtcctggagaagatggctcttgaaaatggcccttgaatttggctagaaagcatttgcaagtacagaaagggtggcaagggcattccagcaaaacgaagtggtatccgccaacacctatagtctcagaagtgctgtactgtgtagggaacgtaggttctaaaaaggaggtataaaaggaggaagagaaaagaaagaaatctataaatataggctgagtcaaggtataaaagagctttgcggacgaaactaagaggaagagagcttaaagaaacaagtacatttagcagggataggataaacactggggacagagagctcctgaaccagtgtgacccggctccagtggtgtcctgtttctgtgcctctccattcatgtgaacatgtgtgtgcatgtgtgtgcgtgtgtgtgtgtgtgtgtgtgtgtgaaaaacttttatgacaaaattgaaatgacattgttagtcatacattttgacattgaattttacaatgtttatgcatctaagcttgcagccgttatacttggataatctatgtctttgtttctgctataaaaccatgttttctcttggtgtgg

SEQ ID NO: 2942 - DNA, 1804 bp, Homo sapiens
  source 1..1804: mol_type = unassigned DNA; mol_type = unassigned DNA
aatagaaccaggattgcatttgaagttaagctgcaaaaaaccagtcgatcaacagattttcgagtcccacagtcaatatgcaccatgtttaatgttatggttgatgccaaagctcaatcaacaaaactttgcagcatggaaatgggccaagagtttgctaaaatgtggcatcaataccattcaaaaatagacgaactaattgaagaaactgttaaagaaatgataacactcttggttgcaaagttcgttactatcttggaaggagtgctggcaaaattatccagatatgacgaagggactttgttttcttcttttctgtcatttaccgtgaaggcagcttccaaatatgtggatgtacctaaacccgggatggacgtggccgacgcctacgtgactttcgtccgccattctcaggatgtcctgcgtgataaggtcaatgaggagatgtacatagaaaggttatttgatcaatggtacaacagctccatgaacgtgatctgcacctggttgacggaccggatggacttacagcttcatatttatcagttgaaaacactaattaggatggtaaagaaaacctacagagatttccgattgcaaggggtcctggactccaccttaaacagcaagacctatgaaacgatccggaaccgtctcactgtggaggaagccacagcatcagtgagtgaaggtgggggactgcagggcatcagcatgaaggacagcgatgaggaagacgaagaagacgattagaccatttggtcctagagtctgctgggacagagtcctgtaatcagtgcatgtccttagtctgttagttaaacccattaggaattttctgtcaactaccatgcccatgagatgtttatcaatacaactgccattttagctatgtggtaccaagattagcaaatgaccttcatatccactgatttcctgatgtccatgtctatatgtttacaagcaatatggagcaccattctttaaatactgttcatggagaatacatagtctaaccactaggcgtgtccctgttatcagcaaagatcaatgatgcttcattcatgtactatgtatgcattggtggtaaatggatgtgagggcaagtacatcaagtacattcactctgtttcacgtatgtggatgccagttaattaaatgagtacgtaaataaattaattaaaacacatagatctgctttgtgtttttatttttattttttgaaaaacaaaaggcaagtctccaacaattaacttttgatgctttctgttcccctaaaaccaaaaaatgaaccccttgtgtcgttgttaacccatcctttcatttactcatataattagccaaaaaaaaaaggatggctacataccaatggattgattctcttaattgccacggcaagggggcgatcctatcatgacttaacatcaagcgcgcagttcaaaactactgtcttctgtcaaagttttctcctcttaaatgttattttgcttttacgtctcaactgtgtatgtaaaaaaaatgaatatttaaattacaaccctagactaaaaatgtgtttataataagatgtggatatttccttcagtagattgtaaccataatttaaattattttgttccacactgttttttatatctgtcatgtacattgcattttgatctgtaactgcacaaccctggggtttgctgcagagctatttctttccatgtaaagtagtggatccatcttgcttttgccttatataaagcctacagttatggaagtgtggaaaactgtggcttctcaataaatattcagatgtcct

SEQ ID NO: 2943 - DNA, 5455 bp, Homo sapiens
  source 1..5455: mol_type = unassigned DNA; mol_type = unassigned DNA
ggctgcatcgacagcttgcaacactcggcatcttttctggaggcgcctccttcagcagccgcagatggcatccggctgcgggctcggggctcgcaattgattctcccccttgcccacctcgagtccacggacgcacctctcccttcccctcctcccttcgcgcttctgggtctgagcccagctcgcgaccgccgggcagaggatcagtcgcggcggccgaggctgagcagcagcgctctcgctccctgacctggggagaagcgcccacccgggagagctgatccccggctgcctccagcgccccccaccttttgcactccaagccgggggctccagagaccccgctccccaggcgccactatgctggacccttcgtccagcgaagaagaatcggatgagatcgtggaggaggagagcggcaaggaggtgctcggctcggccccgtccggcgcgcgcctgtctcccagccgtaccagcgagggctcggccggcagcgccgggctggggggcggcggcgccggcgccggagccggggtgggtgcaggcggcggcgggggcagcggcgcgagcagcggcggcggggccggggggctgcaacccagcagccgcgctggcggcggccggccctccagccccagcccgtcggtggtgagcgagaaggagaaggaagagttggagcggctgcagaaagaggaggaggagaggaagaagaggctgcagctgtatgtgttcgtgatgcgctgcatcgcctacccctttaatgccaagcagcccaccgacatggctcgccggcagcagaagatcagcaaacagcagctgcagacagtcaaggaccggtttcaggctttcctcaatggggaaacccagatcatggctgacgaagccttcatgaacgctgtgcagagttactatgaggtgttcctgaagagcgaccgtgtggcccgcatggttcagagtggaggctgttccgccaacgactcccgggaggtcttcaagaagcacattgagaagagagtgcgcagcctgcctgagattgacggcctcagcaaggagactgtgctgagctcctggatggccaaatttgatgccatctaccgtggagaagaggacccgcggaagcagcaggcccggatgacagccagcgcagcctccgagctgattctgagcaaggagcaactctatgagatgttccagaacattcttgggatcaagaagttcgaacatcagctcctttacaatgcctgccagctggacaatccagatgagcaagcagcccagatcagacgagagctggatggacgtctacaaatggcagaccaaatagccagggaacgcaaatttcccaagtttgtatccaaagaaatggaaaacatgtacattgaggagctgaagtcatctgtcaacctgctcatggccaacttggagagcatgccggtatccaaaggcggggagttcaagctccagaaactcaaacgcagccacaatgcttccatcatcgacatgggcgaggagagtgagaaccagctctccaagtcagatgtcgtgctgtctttctcattggaggtggtaattatggaagtccaaggcctcaaatctttggctccaaatcgcatcgtatattgcacaatggaggtggaaggaggagagaaactacagactgatcaggccgaggcttctaaaccaacctggggcacccagggtgacttctccacaacccatgcactgccagctgtgaaggtgaagctgttcacagagagcacaggcgtcctggcgttggaggacaaggagcttgggcgggttattctccatcccaccccgaacagccccaaacagtcagagtggcacaaaatgacagtctccaaaaactgccccgaccaagatctcaaaatcaaacttgctgtccgaatggataagcctcaaaacatgaagcattctgggtatttatgggccatcggtaagaatgtctggaagagatggaagaaaaggttttttgtattggtgcaggtcagtcagtacacgtttgccatgtgcagttatcgggagaagaaagcggagcctcaggaacttctacaattggatggctacactgtggattacaccgacccccagccaggtttggagggtggccgagccttcttcaatgctgtcaaggagggagacaccgtgatatttgccagtgacgatgaacaagaccgcatcctgtgggtccaggccatgtatcgggccacggggcagtcacacaagcctgtgcccccgacccaagtccagaaactcaacgccaagggaggaaatgtacctcagctggatgcccctatctctcaattttacgcagatagagctcaaaaacatggcatggatgaatttatctcttccaacccctgtaactttgaccacgcttccctctttgagatggtacaacgccttactttggatcacagacttaatgattcctattcttgcctgggctggttcagtcctggccaggtgtttgtactagacgagtattgcgcccgaaatggagtccgggggtgtcaccgacatctctgctacctcagagacttgcttgaacgggcagaaaatggcgccatgatcgaccccacccttcttcactacagctttgccttctgtgcatcccatgtccatgggaacagtcaacaaatgcatgtgtaccttagtgggctgccaccaaatacagaccctgaagggagcaaaactccctccccacctgaaccagaagctaaaaaagataccaaaaaggaatccaaaaaaagaaaagattccaaaacccaggcaaatcaagagctgaaaaggcctgatggaattggaactgtgactgttgaagaaaaggaacgttttgaagaaatcaaagagaggctccgagttctgctagaaaatcagattacacattttaggtattgctttccatttggtcgacctgaaggtgctttgaaagctactctctcactcttggaaagggttttgatgaaagatattgttaccccagtgccacaagaggaggtaaaaacagttatccgtaaatgtctggaacaggctgcgttagtcaactattctcggctctcagagtatgccaaaatcgaagaaaatgtaggccggttaatcactcctgccaaaaagcttgaagatacaatacgtcttgctgaactagtcattgaagttcttcagcaaaatgaggagcaccacgcagaggcctttgcgtggtggtcagatttaatggtggagcatgcggagacgttcctgtcactctttgcagtagacatggatgcagccttagaggtgcaacctccagacacatgggacagttttccactatttcagctgctgaatgattttctccgtactgactataatttgtgcaatggaaaatttcacaaacacctgcaagacctgtttgccccacttgttgttagatatgtggatctgatggagtcctcaattgcacaatccattcacaggggctttgagcgggagtcatgggaaccagtcaataatgggtcaggcacctcagaagatctgttttggaaacttgacgcccttcagaccttcattcgggacctgcactggcctgaagaagagtttggaaagcacctggaacaacggctgaagttgatggcaagtgacatgatcgaatcttgtgtcaaaagaaccaggattgcatttgaagttaagctgcaaaaaaccagtcgatcaacagattttcgagtcccacagtcaatatgcaccatgtttaatgttatggttgatgccaaagctcaatcaacaaaactttgcagcatggaaatgggccaagagcatcaataccattcaaaaatagacgaactaattgaagaaactgttaaagaaatgataacactcttggttgcaaagttcgttactatcttggaaggagtgctggcaaaattatccagatatgacgaagggactttgttttcttcttttctgtcatttaccgtgaaggcagcttccaaatatgtggatgtacctaaacccgggatggacgtggccgacgcctacgtgactttcgtccgccattctcaggatgtcctgcgtgataaggtcaatgaggagatgtacatagaaaggttatttgatcaatggtacaacagctccatgaacgtgatctgcacctggttgacggaccggatggacttacagcttcatatttatcagttgaaaacactaattaggatggtaaagaaaacctacagagatttccgattgcaaggggtcctggactccaccttaaacagcaagacctatgaaacgatccggaaccgtctcactgtggaggaagccacagcatcagtgagtgaaggtgggggactgcagggcatcagcatgaaggacagcgatgaggaagacgaagaagacgattagaccatttggtcctagagtctgctgggacagagtcctgtaatcagtgcatgtccttagtctgttagttaaacccattaggaattttctgtcaactaccatgcccatgagatgtttatcaatacaactgccattttagctatgtggtaccaagattagcaaatgaccttcatatccactgatttcctgatgtccatgtctatatgtttacaagcaatatggagcaccattctttaaatactgttcatggagaatacatagtctaaccactaggcgtgtccctgttatcagcaaagatcaatgatgcttcattcatgtactatgtatgcattggtggtaaatggatgtgagggcaagtacatcaagtacattcactctgtttcacgtatgtggatgccagttaattaaatgagtacgtaaataaattaattaaaacacatagatctgctttgtgtttttatttttattttttgaaaaacaaaaggcaagtctccaacaattaacttttgatgctttctgttcccctaaaaccaaaaaatgaaccccttgtgtcgttgttaacccatcctttcatttactcatataattagccaaaaaaaaaaggatggctacataccaatggattgattctcttaattgccacggcaagggggcgatcctatcatgacttaacatcaagcgcgcagttcaaaactactgtcttctgtcaaagttttctcctcttaaatgttattttgcttttacgtctcaactgtgtatgtaaaaaaaatgaatatttaaattacaaccctagactaaaaatgtgtttataataagatgtggatatttccttcagtagattgtaaccataatttaaattattttgttccacactgttttttatatctgtcatgtacattgcattttgatctgtaactgcacaaccctggggtttgctgcagagctatttctttccatgtaaagtagtggatccatcttgcttttgccttatataaagcctacagttatggaagtgtggaaaactgtggcttctcaataaatattcagatgtcctaagaatata

SEQ ID NO: 2944 - DNA, 2238 bp, Homo sapiens
  source 1..2238: mol_type = unassigned DNA; mol_type = unassigned DNA
attacactagactcacagaatatgccaaaatagaaggcccagcagaaaaggaaacagagaccatgaaccaggcatctcctgctagaaagctggaagagattcttcatctggcagagctctgcatagaagtcttacagcagaatgaagagcatcatgcagagggaagagaggcatttgcctggtggcctgatttattggctgaacatgcagagaaattttgggctttatttacagtggatatggacactgcactagaggctcaaccgcaagactcctgggatagttttcctcttttccaactgcttaataatttcctccgaaatgacacacttttgtgtaatggaaaatttcacaaacacttgcaagaaatctttgtacccttggttgtccgctatgtggatctcatggagtcttccatcgcccagtcaattcacagaggttttgagcaggagacatggcagcctgtcaagaatatcgccaacagtcttcccaatgtagctcttccaaaagttccaagtctgcctcttaatcttccacagattcctaacatttctactgcttcgtggatgccttctttatatgagtccaccaatggctcagcaacatcagaagaccttttttggaagcttgatgcactgcaaatgtttgtctttgatctgcactggccagaacaggaatttgcccaccacttagagcaaagacttaaactaatggccagtgatatgctagaggcctgtgtcaaaagaacaagaactgcatttgaactcaagctacaaaaggcaagcaaaacaactgacttgcgcattccagcttccgtttgcactatgtttaatgtattagtcgatgccaaaaagcaaagcaccaaactctgtgccctggatggaggacaagagcaacagtaccattcaaaaatagatgatctgatcgacaacagtgtaaaagaaatcatttcactgttagtttcaaagtttgtttcagtgttggaaggcgtgttgtctaagctgtcaaggtatgatgaaggcactttcttttcatccattctgtcattcactgtgaaagcagctgcaaaatatgttgatgttccaaaaccaggaatggatctggcagacacctatattatgtttgttcggcaaaaccaagatattcttcgagaaaaggtcaatgaggaaatgtatatagaaaagttatttgatcaatggtacagcagttccatgaaagtcatttgcgtgtggttgactgatagattagacctccaactccatatttaccagctgaagacgctcatcaagattgtgaagaaaacctacagggactttcgattgcagggtgtgttggaaggaacactgaacagtaagacttatgatactgtgcacagacgtttaacagtagaggaggccacagcctctgtttcagaaggaggaggacttcagggcattactatgaaagacagtgacgaagaagaagaaggctgatatcacacagctttgcagaaggaaggaagaccttgatcgacattgttttttatttttttaaccttgtccttgtaattacattcattgtttgttttggccaaataaaaatgcttgtatttctttaaaaagtaagcctgaatgtagagtaaaaggggaaatgccaagattttggggtttttttgtttcctttttttgtttgtttgtttgtttgtttttttggagaagagcatcctcttttgtgtagtttgacctaaaaatgaaccttggctctgcttgtgatcagaacatgaacttttttttttaaagaagatttgagcatttttctgtaatcacatcaaaatgatgttttctgtgtaaagcgagatacatatttctcataatgcagcattgtgagaagtcagttcggaccactgcaccaacactgtcgtatccttgttaaaatggtgtgtaccttacaaattataatttatgtgccaggttcgttttgtacttaatttgctattattgtgatgtgtataaaatctttaatcttggttcttagtactttgaattggtctacaggtatattcctgggatgaaaggattgccaaacccaaatatagactagattatccaatgggtttgtgtctttgttccattctcaacatttcttctttcaactataagtaatccccaggtgtggggtagcaagtgtgcttccgtcaagataccatattctcctgctccagtataacagcttgcaggcaataaaaatctatttgctcat

SEQ ID NO: 2945 - DNA, 4308 bp, Homo sapiens
  source 1..4308: mol_type = unassigned DNA; mol_type = unassigned DNA
ttttcctttcgttctgcggccgctgcagccagccccgcggctccctcagacccgcgggcgcagccgccgggggtgaggcgcttggggaccgcgggccgagcggcggggatccccgagcaccatgctggacccgtcttccagcgaagaggagtcggacgaggggctggaagaggaaagccgcgatgtgctggtggcagccggcagctcgcagcgagctcctccagccccgactcgggaagggcggcgggacgcgccggggcgcgcgggcggcggcggcgcggccagatctgtgagcccgagcccctctgtgctcagcgaggggcgagacgagccccagcggcagctggacgatgagcaggagcggaggatccgcctgcagctctacgtcttcgtcgtgaggtgcatcgcgtaccccttcaacgccaagcagcccaccgacatggcccggaggcagcagaagcttaacaaacaacagttgcagttactgaaagaacggttccaggccttcctcaatggggaaacccaaattgtagctgacgaagcattttgcaacgcagttcggagttattatgaggtttttctaaagagtgaccgagtggccagaatggtacagagtggagggtgttctgctaatgacttcagagaagtatttaagaaaaacatagaaaaacgtgtgcggagtttgccagaaatagatggcttgagcaaagagacagtgttgagctcatggatagccaaatatgatgccatttacagaggtgaagaggacttgtgcaaacagccaaatagaatggccctaagtgcagtgtctgaacttattctgagcaaggaacaactctatgaaatgtttcagcagattctgggtattaaaaaactggaacaccagctcctttataatgcatgtcagctggataacgcagatgaacaagcagcccagatcagaagggaacttgatggccggctgcaattggcagataaaatggcaaaggaaagaaaattccccaaatttatagcaaaagatatggagaatatgtatatagaagagttgcggtcttcagtgaatttgctaatggccaatttggaaagtcttccagtttcgaaaggtggtccggaatttaaattacaaaaattaaaacgttcacagaactctgcatttttggacataggagatgagaatgagattcagctgtcaaagtccgacgtggtactgtcattcaccttagagattgtcataatggaagtgcaaggcctgaagtcagttgctcccaatcgaattgtttactgtacaatggaagtggaaggagaaaaacttcagacagaccaggccgaagcctcaaggccacaatgggggactcaaggagatttcaccaccacccatcctcggcctgtggtcaaagtgaaactcttcacagaaagcactggagttctggccctggaagataaagaactgggaagggtgatattatacccaacttctaatagctccaaatcagctgaattacaccgaatggtagttccaaaaaatagccaggattctgacttaaaaatcaaactggcagtgcgaatggataaaccagcacatatgaagcatagtggatatctgtatgcccttggacagaaggtttggaaaagatggaaaaaacgttactttgttctagttcaggttagccaatatacctttgctatgtgcagttatagagaaaagaagtctgaaccacaagaattaatgcagcttgaaggctatactgtggattataccgatccccacccaggccttcagggtggttgtatgttctttaatgctgttaaagaaggagatactgtaatctttgccagtgatgatgaacaggacagaatattatgggttcaagccatgtatagggccacaggtcaatcatataaaccagttcctgcaattcaaacccagaaactgaatcctaaaggaggaactctccatgcagatgctcagctttatgcagatcgttttcagaaacatggtatggatgagtttatttctgcaaacccctgcaagcttgatcatgccttcctttttagaatactccagaggcagactttggatcacagactgaatgattcctattcttgcttgggatggtttagccctggccaagtctttgtgttagatgagtactgtgcccgttatggtgtgagaggctgtcacagacatctctgctaccttgcagaactgatggaacattcagaaaatggtgctgtcattgaccctaccctgctccattacagctttgcattctgtgcctctcatgtgcacggcaacaggcctgatggaattgggactgtttcagtggaagaaaaagaaagatttgaggagataaaagagagactctcttcccttttagaaaatcagataagccatttcagatactgttttccctttggacgacctgaaggtgctctaaaagctacactttcattacttgaaagggttttaatgaaagatattgccactcccataccagcagaagaggtgaagaaagtggtcagaaaatgtctcgagaaagctgccttgatcaattacactagactcacagaatatgccaaaatagaagagaccatgaaccaggcatctcctgctagaaagctggaagagattcttcatctggcagagctctgcatagaagtcttacagcagaatgaagagcatcatgcagaggcatttgcctggtggcctgatttattggctgaacatgcagagaaattttgggctttatttacagtggatatggacactgcactagaggctcaaccgcaagactcctgggatagttttcctcttttccaactgcttaataatttcctccgaaatgacacacttttgtgtaatggaaaatttcacaaacacttgcaagaaatctttgtacccttggttgtccgctatgtggatctcatggagtcttccatcgcccagtcaattcacagaggttttgagcaggagacatggcagcctgtcaacaatggctcagcaacatcagaagaccttttttggaagcttgatgcactgcaaatgtttgtctttgatctgcactggccagaacaggaatttgcccaccacttagagcaaagacttaaactaatggccagtgatatgctagaggcctgtgtcaaaagaacaagaactgcatttgaactcaagctacaaaaggcaagcaaaacaactgacttgcgcattccagcttccgtttgcactatgtttaatgtattagtcgatgccaaaaagcaaagcaccaaactctgtgccctggatggaggacaagagtttggtagtcaatggcaacagtaccattcaaaaatagatgatctgatcgacaacagtgtaaaagaaatcatttcactgttagtttcaaagtttgtttcagtgttggaaggcgtgttgtctaagctgtcaaggtatgatgaaggcactttcttttcatccattctgtcattcactgtgaaagcagctgcaaaatatgttgatgttccaaaaccaggaatggatctggcagacacctatattatgtttgttcggcaaaaccaagatattcttcgagaaaaggtcaatgaggaaatgtatatagaaaagttatttgatcaatggtacagcagttccatgaaagtcatttgcgtgtggttgactgatagattagacctccaactccatatttaccagctgaagacgctcatcaagattgtgaagaaaacctacagggactttcgattgcagggtgtgttggaaggaacactgaacagtaagacttatgatactgtgcacagacgtttaacagtagaggaggccacagcctctgtttcagaaggaggaggacttcagggcattactatgaaagacagtgacgaagaagaagaaggctgatatcacacagctttgcagaaggaaggaagaccttgatcgacattgttttttatttttttaaccttgtccttgtaattacattcattgtttgttttggccaaataaaaatgcttgtatttctttaaaaagtaagcctgaatgtagagtaaaaggggaaatgccaagattttggggtttttttgtttcctttttttgtttgtttgtttgtttgtttttttggagaagagcatcctcttttgtgtagtttgacctaaaaatgaaccttggctctgcttgtgatcagaacatgaacttttttttttaaagaagatttgagcatttttctgtaatcacatcaaaatgatgttttctgtgtaaagcgagatacatatttctcataatgcagcattgtgagaagtcagttcggaccactgcaccaa

SEQ ID NO: 2946 - DNA, 4073 bp, Homo sapiens
  source 1..4073: mol_type = unassigned DNA; mol_type = unassigned DNA
ggcggggatccccgagcaccatgctggacccgtcttccagcgaagaggagtcggacgaggggctggaagaggaaagccgcgatgtgctggtggcagccggcagctcgcagcgagctcctccagccccgactcgggaagggcggcgggacgcgccggggcgcgcgggcggcggcggcgcggccagatctgtgagcccgagcccctctgtgctcagcgaggggcgagacgagccccagcggcagctggacgatgagcaggagcggaggatccgcctgcagctctacgtcttcgtcgtgaggtgcatcgcgtaccccttcaacgccaagcagcccaccgacatggcccggaggcagcagaagcttaacaaacaacagttgcagttactgaaagaacggttccaggccttcctcaatggggaaacccaaattgtagctgacgaagcattttgcaacgcagttcggagttattatgaggtttttctaaagagtgaccgagtggccagaatggtacagagtggagggtgttctgctaatgacttcagagaagtatttaagaaaaacatagaaaaacgtgtgcggagtttgccagaaatagatggcttgagcaaagagacagtgttgagctcatggatagccaaatatgatgccatttacagaggtgaagaggacttgtgcaaacagccaaatagaatggccctaagtgcagtgtctgaacttattctgagcaaggaacaactctatgaaatgtttcagcagattctgggtattaaaaaactggaacaccagctcctttataatgcatgtcagctggataacgcagatgaacaagcagcccagatcagaagggaacttgatggccggctgcaattggcagataaaatggcaaaggaaagaaaattccccaaatttatagcaaaagatatggagaatatgtatatagaagagttgcggtcttcagtgaatttgctaatggccaatttggaaagtcttccagtttcgaaaggtggtccggaatttaaattacaaaaattaaaacgttcacagaactctgcatttttggacataggagatgagaatgagattcagctgtcaaagtccgacgtggtactgtcattcaccttagagattgtcataatggaagtgcaaggcctgaagtcagttgctcccaatcgaattgtttactgtacaatggaagtggaaggagaaaaacttcagacagaccaggccgaagcctcaaggccacaatgggggactcaaggagatttcaccaccacccatcctcggcctgtggtcaaagtgaaactcttcacagaaagcactggagttctggccctggaagataaagaactgggaagggtgatattatacccaacttctaatagctccaaatcagctgaattacaccgaatggtagttccaaaaaatagccaggattctgacttaaaaatcaaactggcagtgcgaatggataaaccagcacatatgaagcatagtggatatctgtatgcccttggacagaaggtttggaaaagatggaaaaaacgttactttgttctagttcaggttagccaatatacctttgctatgtgcagttatagagaaaagaagtctgaaccacaagaattaatgcagcttgaaggctatactgtggattataccgatccccacccaggccttcagggtggttgtatgttctttaatgctgttaaagaaggagatactgtaatctttgccagtgatgatgaacaggacagaatattatgggttcaagccatgtatagggccacaggtcaatcatataaaccagttcctgcaattcaaacccagaaactgaatcctaaaggaggaactctccatgcagatgctcagctttctggtaaagatgcagatcgttttcagaaacatggtatggatgagtttatttctgcaaacccctgcaagcttgatcatgccttcctttttagaatactccagaggcagactttggatcacagactgaatgattcctattcttgcttgggatggtttagccctggccaagtctttgtgttagatgagtactgtgcccgttatggtgtgagaggctgtcacagacatctctgctaccttgcagaactgatggaacattcagaaaatggtgctgtcattgaccctaccctgctccattacagctttgcattctgtgcctctcatgtgcacggcaacaggcctgatggaattgggactgtttcagtggaagaaaaagaaagatttgaggagataaaagagagactctcttcccttttagaaaatcagataagccatttcagatactgttttccctttggacgacctgaaggtgctctaaaagctacactttcattacttgaaagggttttaatgaaagatattgccactcccataccagcagaagaggtgaagaaagtggtcagaaaatgtctcgagaaagctgccttgatcaattacactagactcacagaatatgccaaaatagaagagaccatgaaccaggcatctcctgctagaaagctggaagagattcttcatctggcagagctctgcatagaagtcttacagcagaatgaagagcatcatgcagagggaagagaggcatttgcctggtggcctgatttattggctgaacatgcagagaaattttgggctttatttacagtggatatggacactgcactagaggctcaaccgcaagactcctgggatagttttcctcttttccaactgcttaataatttcctccgaaatgacacacttttgtgtaatggaaaatttcacaaacacttgcaagaaatctttgtacccttggttgtccgctatgtggatctcatggagtcttccatcgcccagtcaattcacagaggttttgagcaggagacatggcagcctgtcaagaatatcgccaacagtcttcccaatgtagctcttccaaaagttccaagtctgcctcttaatcttccacagattcctaacatttctactgcttcgtggatgccttctttatatgagtccaccaatggctcagcaacatcagaagaccttttttggaagcttgatgcactgcaaatgtttgtctttgatctgcactggccagaacaggaatttgcccaccacttagagcaaagacttaaactaatggccagtgatatgctagaggcctgtgtcaaaagaacaagaactgcatttgaactcaagctacaaaaggcaagcaaaacaactgacttgcgcattccagcttccgtttgcactatgtttaatgtattagtcgatgccaaaaagcaaagcaccaaactctgtgccctggatggaggacaagagcaacagtaccattcaaaaatagatgatctgatcgacaacagtgtaaaagaaatcatttcactgttagtttcaaagtttgtttcagtgttggaaggcgtgttgtctaagctgtcaaggtatgatgaaggcactttcttttcatccattctgtcattcactgtgaaagcagctgcaaaatatgttgatgttccaaaaccaggaatggatctggcagacacctatattatgtttgttcggcaaaaccaagatattcttcgagaaaaggtcaatgaggaaatgtatatagaaaagttatttgatcaatggtacagcagttccatgaaagtcatttgcgtgtggttgactgatagattagacctccaactccatatttaccagctgaagacgctcatcaagattgtgaagaaaacctacagggactttcgattgcagggtgtgttggaaggaacactgaacagtaagacttatgatactgtgcacagacgtttaacagtagaggaggccacagcctctgtttcagaaggaggaggacttcagggcattactatgaaagacagtgacgaagaagaagaaggctgatatcacacagctttgcagaaggaaggaagaccttgatcgacattgttttttatttttttaaccttgtccttgtaattacattcattgtttgttttggccaaataaaaatgcttgtatttctttaaaaagtaagcctgaatgtagagtaaaaggggaaatgcc

SEQ ID NO: 2947 - DNA, 2826 bp, Homo sapiens
  source 1..2826: mol_type = unassigned DNA; mol_type = unassigned DNA
tgagattcagctgtcaaagtccgacgtggtactgtcattcaccttagagattgtcataatggaagtgcaaggcctgaagtcagttgctcccaatcgaattgtttactgtacaatggaagtggaaggagaaaaacttcagacagaccaggccgaagcctcaaggccacaatgggggactcaaggagatttcaccaccacccatcctcggcctgtggtcaaagtgaaactcttcacagaaagcactggagttctggccctggaagataaagaactgggaagggtgatattatacccaacttctaatagctccaaatcagctgaattacaccgaatggtagttccaaaaaatagccaggattctgacttaaaaatcaaactggcagtgcgaatggataaaccagcacatatgaagcatagtggatatctgtatgcccttggacagaaggtttggaaaagatggaaaaaacgttactttgttctagttcaggttagccaatatacctttgctatgtgcagttatagagaaaagaagtctgaaccacaagaattaatgcagcttgaaggctatactgtggattataccgatccccacccaggccttcagggtggttgtatgttctttaatgctgttaaagaaggagatactgtaatctttgccagtgatgatgaacaggacagaatattatgggttcaagccatgtatagggccacaggtcaatcatataaaccagttcctgcaattcaaacccagaaactgaatcctaaaggaggaactctccatgcagatgctcagctttatgcagatcgttttcagaaacatggtatggatgagtttatttctgcaaacccctgcaagcttgatcatgccttcctttttagaatactccagaggcagactttggatcacagactgaatgattcctattcttgcttgggatggtttagccctggccaagtctttgtgttagatgagtactgtgcccgttatggtgtgagaggctgtcacagacatctctgctaccttgcagaactgatggaacattcagaaaatggtgctgtcattgaccctaccctgctccattacagctttgcattctgtgcctctcatgtgcacggcaacaggcctgatggaattgggactgtttcagtggaagaaaaagaaagatttgaggagataaaagagagactctcttcccttttagaaaatcagataagccatttcagatactgttttccctttggacgacctgaaggtgctctaaaagctacactttcattacttgaaagggttttaatgaaagatattgccactcccataccagcagaagaggtgaagaaagtggtcagaaaatgtctcgagaaagctgccttgatcaattacactagactcacagaatatgccaaaatagaagagaccatgaaccaggcatctcctgctagaaagctggaagagattcttcatctggcagagctctgcatagaagtcttacagcagaatgaagagcatcatgcagaggcatttgcctggtggcctgatttattggctgaacatgcagagaaattttgggctttatttacagtggatatggacactgcactagaggctcaaccgcaagactcctgggatagttttcctcttttccaactgcttaataatttcctccgaaatgacacacttttgtgtaatggaaaatttcacaaacacttgcaagaaatctttgtacccttggttgtccgctatgtggatctcatggagtcttccatcgcccagtcaattcacagaggttttgagcaggagacatggcagcctgtcaacaatggctcagcaacatcagaagaccttttttggaagcttgatgcactgcaaatgtttgtctttgatctgcactggccagaacaggaatttgcccaccacttagagcaaagacttaaactaatggccagtgatatgctagaggcctgtgtcaaaagaacaagaactgcatttgaactcaagctacaaaaggcaagcaaaacaactgacttgcgcattccagcttccgtttgcactatgtttaatgtattagtcgatgccaaaaagcaaagcaccaaactctgtgccctggatggaggacaagagcaacagtaccattcaaaaatagatgatctgatcgacaacagtgtaaaagaaatcatttcactgttagtttcaaagtttgtttcagtgttggaaggcgtgttgtctaagctgtcaaggtatgatgaaggcactttcttttcatccattctgtcattcactgtgaaagcagctgcaaaatatgttgatgttccaaaaccaggaatggatctggcagacacctatattatgtttgttcggcaaaaccaagatattcttcgagaaaaggtcaatgaggaaatgtatatagaaaagttatttgatcaatggtacagcagttccatgaaagtcatttgcgtgtggttgactgatagattagacctccaactccatatttaccagctgaagacgctcatcaagattgtgaagaaaacctacagggactttcgattgcagggtgtgttggaaggaacactgaacagtaagacttatgatactgtgcacagacgtttaacagtagaggaggccacagcctctgtttcagaaggaggaggacttcagggcattactatgaaagacagtgacgaagaagaagaaggctgatatcacacagctttgcagaaggaaggaagaccttgatcgacattgttttttatttttttaaccttgtccttgtaattacattcattgtttgttttggccaaataaaaatgcttgtatttctttaaaaa

SEQ ID NO: 2948 - DNA, 572 bp, Homo sapiens
  source 1..572: mol_type = unassigned DNA; mol_type = unassigned DNA
aaaggtgctttgtagatttttattcattcgaacatttaccttggaattctgaatcctcataaataatacattcagagaagtggagaaaggcaatacgttttgagtcaacacaaaatgacagcaagataatgtattcttttgtcataaaatattgagaaaatgggaagacaataactggtattaattaccgacagggtttaaatatgccaattaagtagaaaataaggagatgtcttggtgaatattgaagatgggggactcaaggagatttcaccaccacccatcctcggcctgtggtcaaagtgaaactcttcacagaaagcactggagttctggccctggaagataaagaactgggaagggtgatattatacccaacttctaatagctccaaatcagctgaattacaccgaatggtagttccaaaaaatagccaggattctgacttaaaaatcaaactggcagtgcgaatggataaaccagcacatatgaagcatagtggatatctgtatgcccttggacagaaggtttggaaaagatggaaaaaacgttactttgttctagttcaggtt

SEQ ID NO: 2949 - DNA, 6045 bp, Homo sapiens
  source 1..6045: mol_type = unassigned DNA; mol_type = unassigned DNA
attcaattccacgtgttgcttgttgtaggcgccacaggttccccacctgcgtccgggcgctcgggcggctccgcctctgccggcgggctctggggaaccgctgggtcggcgcgcccggggctggcggagcaattcctgaggcgcccaagctcacccccaacgctaactccgcctattcagtcccggcggctccccctctcccccctcccaatcctcctcccggctcctgcccgcccctttcgccctggtggtaggaaacactcctgaatctaactcgacgtgtccggaaagccctggccagttttcctttcgttctgcggccgctgcagccagccccgcggctccctcagacccgcgggcgcagccgccgggggtgaggcgcttggggaccgcgggccgagcggcggggatccccgagcaccatgctggacccgtcttccagcgaagaggagtcggacgaggggctggaagaggaaagccgcgatgtgctggtggcagccggcagctcgcagcgagctcctccagccccgactcgggaagggcggcgggacgcgccggggcgcgcgggcggcggcggcgcggccagatctgtgagcccgagcccctctgtgctcagcgaggggcgagacgagccccagcggcagctggacgatgagcaggagcggaggatccgcctgcagctctacgtcttcgtcgtgaggtgcatcgcgtaccccttcaacgccaagcagcccaccgacatggcccggaggcagcagaagcttaacaaacaacagttgcagttactgaaagaacggttccaggccttcctcaatggggaaacccaaattgtagctgacgaagcattttgcaacgcagttcggagttattatgaggtttttctaaagagtgaccgagtggccagaatggtacagagtggagggtgttctgctaatgacttcagagaagtatttaagaaaaacatagaaaaacgtgtgcggagtttgccagaaatagatggcttgagcaaagagacagtgttgagctcatggatagccaaatatgatgccatttacagaggtgaagaggacttgtgcaaacagccaaatagaatggccctaagtgcagtgtctgaacttattctgagcaaggaacaactctatgaaatgtttcagcagattctgggtattaaaaaactggaacaccagctcctttataatgcatgtcagctggataacgcagatgaacaagcagcccagatcagaagggaacttgatggccggctgcaattggcagataaaatggcaaaggaaagaaaattccccaaatttatagcaaaagatatggagaatatgtatatagaagagttgcggtcttcagtgaatttgctaatggccaatttggaaagtcttccagtttcgaaaggtggtccggaatttaaattacaaaaattaaaacgttcacagaactctgcatttttggacataggagatgagaatgagattcagctgtcaaagtccgacgtggtactgtcattcaccttagagattgtcataatggaagtgcaaggcctgaagtcagttgctcccaatcgaattgtttactgtacaatggaagtggaaggagaaaaacttcagacagaccaggccgaagcctcaaggccacaatgggggactcaaggagatttcaccaccacccatcctcggcctgtggtcaaagtgaaactcttcacagaaagcactggagttctggccctggaagataaagaactgggaagggtgatattatacccaacttctaatagctccaaatcagctgaattacaccgaatggtagttccaaaaaatagccaggattctgacttaaaaatcaaactggcagtgcgaatggataaaccagcacatatgaagcatagtggatatctgtatgcccttggacagaaggtttggaaaagatggaaaaaacgttactttgttctagttcaggttagccaatatacctttgctatgtgcagttatagagaaaagaagtctgaaccacaagaattaatgcagcttgaaggctatactgtggattataccgatccccacccaggccttcagggtggttgtatgttctttaatgctgttaaagaaggagatactgtaatctttgccagtgatgatgaacaggacagaatattatgggttcaagccatgtatagggccacaggtcaatcatataaaccagttcctgcaattcaaacccagaaactgaatcctaaaggaggaactctccatgcagatgctcagctttctgaatttacagatgcagatcgttttcagaaacatggtatggatgagtttatttctgcaaacccctgcaagcttgatcatgccttcctttttagaatactccagaggcagactttggatcacagactgaatgattcctattcttgcttgggatggtttagccctggccaagtctttgtgttagatgagtactgtgcccgttatggtgtgagaggctgtcacagacatctctgctaccttgcagaactgatggaacattcagaaaatggtgctgtcattgaccctaccctgctccattacagctttgcattctgtgcctctcatgtgcacggcaacaggcctgatggaattgggactgtttcagtggaagaaaaagaaagatttgaggagataaaagagagactctcttcccttttagaaaatcagataagccatttcagatactgttttccctttggacgacctgaaggtgctctaaaagctacactttcattacttgaaagggttttaatgaaagatattgccactcccataccagcagaagaggtgaagaaagtggtcagaaaatgtctcgagaaagctgccttgatcaattacactagactcacagaatatgccaaaatagaagagaccatgaaccaggcatctcctgctagaaagctggaagagattcttcatctggcagagctctgcatagaagtcttacagcagaatgaagagcatcatgcagaggcatttgcctggtggcctgatttattggctgaacatgcagagaaattttgggctttatttacagtggatatggacactgcactagaggctcaaccgcaagactcctgggatagttttcctcttttccaactgcttaataatttcctccgaaatgacacacttttgtgtaatggaaaatttcacaaacacttgcaagaaatctttgtacccttggttgtccgctatgtggatctcatggagtcttccatcgcccagtcaattcacagaggttttgagcaggagacatggcagcctgtcaagaatatcgccaacagtcttcccaatgtagctcttccaaaagttccaagtctgcctcttaatcttccacagattcctaacatttctactgcttcgtggatgccttctttatatgagtccaccaatggctcagcaacatcagaagaccttttttggaagcttgatgcactgcaaatgtttgtctttgatctgcactggccagaacaggaatttgcccaccacttagagcaaagacttaaactaatggccagtgatatgctagaggcctgtgtcaaaagaacaagaactgcatttgaactcaagctacaaaaggcaagcaaaacaactgacttgcgcattccagcttccgtttgcactatgtttaatgtattagtcgatgccaaaaagcaaagcaccaaactctgtgccctggatggaggacaagagcaacagtaccattcaaaaatagatgatctgatcgacaacagtgtaaaagaaatcatttcactgttagtttcaaagtttgtttcagtgttggaaggcgtgttgtctaagctgtcaaggtatgatgaaggcactttcttttcatccattctgtcattcactgtgaaagcagctgcaaaatatgttgatgttccaaaaccaggaatggatctggcagacacctatattatgtttgttcggcaaaaccaagatattcttcgagaaaaggtcaatgaggaaatgtatatagaaaagttatttgatcaatggtacagcagttccatgaaagtcatttgcgtgtggttgactgatagattagacctccaactccatatttaccagctgaagacgctcatcaagattgtgaagaaaacctacagggactttcgattgcagggtgtgttggaaggaacactgaacagtaagacttatgatactgtgcacagacgtttaacagtagaggaggccacagcctctgtttcagaaggaggaggacttcagggcattactatgaaagacagtgacgaagaagaagaaggctgatatcacacagctttgcagaaggaaggaagaccttgatcgacattgttttttatttttttaaccttgtccttgtaattacattcattgtttgttttggccaaataaaaatgcttgtatttctttaaaaagtaagcctgaatgtagagtaaaaggggaaatgccaagattttggggtttttttgtttcctttttttgtttgtttgtttgtttgtttttttggagaagagcatcctcttttgtgtagtttgacctaaaaatgaaccttggctctgcttgtgatcagaacatgaacttttttttttaaagaagatttgagcatttttctgtaatcacatcaaaatgatgttttctgtgtaaagcgagatacatatttctcataatgcagcattgtgagaagtcagttcggaccactgcaccaacactgtcgtatccttgttaaaatggtgtgtaccttacaaattataatttatgtgccaggttcgttttgtacttaatttgctattattgtgatgtgtataaaatctttaatcttggttcttagtactttgaattggtctacaggtatattcctgggatgaaaggattgccaaacccaaatatagactagattatccaatgggtttgtgtctttgttccattctcaacatttcttctttcaactataagtaatccccaggtgtggggtagcaagtgtgcttccgtcaagataccatattctcctgctccagtataacagcttgcaggcaataaaaatctatttgctcataactacttctgtatttattagacttatatagagcaaatgcagtaaaagaggtttgcagtgtttcaaacatcccaactatctgactctgtgtttttgtttcttgagttttttgtttgttttgtttgtaatattttgtttttaatcaaatgagtaaaagatagtaacactgactgttctttgtacctaataggcacatacattgttaaaagaattactatgacagcatatttccatagcagaggaaatatatatttcatatattattagttaatattagtaatcaatgttaactaataattagtaatgttagtaatattaactagtaattcacattattagtggttctctcaaaatattttcttgctagggtttgagagataattgtattatgttgcgtaagttctctatgaattatttttgtgatatttcccaaaacatattggcagattgtgctactgcatttattaataagtaatttttaaatgaaggcagttaatgcagaataagtggaggtatccctgcatttatgaaaacgtttattctgaaactttagaaatgaaacaacttggacctccagattcgttctcccatggtgtaataagtggtcgttaggtacctagactagccttaaaaatctatttaatctacagttactatttagcattgttttggctcattttctgggccctagggctaagataacaaacaaggaaatttcttccttcttccgggattaaagactaactctaccaactcactatctttgaaaggcagtttgggaatgttctccctccttttcttctctattcacacaccaaatactattttctccaaaccctcaaatgtccagtcatgctatcccaaactctccaatggcaccatccccaagcttgctgttccacgacacattgctctgtacttagtaattacccacccttcttttcctttcaataaaatgtccatttccttgat

SEQ ID NO: 2950 - DNA, 6066 bp, Homo sapiens
  source 1..6066: mol_type = unassigned DNA; mol_type = unassigned DNA
attcaattccacgtgttgcttgttgtaggcgccacaggttccccacctgcgtccgggcgctcgggcggctccgcctctgccggcgggctctggggaaccgctgggtcggcgcgcccggggctggcggagcaattcctgaggcgcccaagctcacccccaacgctaactccgcctattcagtcccggcggctccccctctcccccctcccaatcctcctcccggctcctgcccgcccctttcgccctggtggtaggaaacactcctgaatctaactcgacgtgtccggaaagccctggccagttttcctttcgttctgcggccgctgcagccagccccgcggctccctcagacccgcgggcgcagccgccgggggtgaggcgcttggggaccgcgggccgagcggcggggatccccgagcaccatgctggacccgtcttccagcgaagaggagtcggacgaggggctggaagaggaaagccgcgatgtgctggtggcagccggcagctcgcagcgagctcctccagccccgactcgggaagggcggcgggacgcgccggggcgcgcgggcggcggcggcgcggccagatctgtgagcccgagcccctctgtgctcagcgaggggcgagacgagccccagcggcagctggacgatgagcaggagcggaggatccgcctgcagctctacgtcttcgtcgtgaggtgcatcgcgtaccccttcaacgccaagcagcccaccgacatggcccggaggcagcagaagcttaacaaacaacagttgcagttactgaaagaacggttccaggccttcctcaatggggaaacccaaattgtagctgacgaagcattttgcaacgcagttcggagttattatgaggtttttctaaagagtgaccgagtggccagaatggtacagagtggagggtgttctgctaatgacttcagagaagtatttaagaaaaacatagaaaaacgtgtgcggagtttgccagaaatagatggcttgagcaaagagacagtgttgagctcatggatagccaaatatgatgccatttacagaggtgaagaggacttgtgcaaacagccaaatagaatggccctaagtgcagtgtctgaacttattctgagcaaggaacaactctatgaaatgtttcagcagattctgggtattaaaaaactggaacaccagctcctttataatgcatgtcagctggataacgcagatgaacaagcagcccagatcagaagggaacttgatggccggctgcaattggcagataaaatggcaaaggaaagaaaattccccaaatttatagcaaaagatatggagaatatgtatatagaagagttgcggtcttcagtgaatttgctaatggccaatttggaaagtcttccagtttcgaaaggtggtccggaatttaaattacaaaaattaaaacgttcacagaactctgcatttttggacataggagatgagaatgagattcagctgtcaaagtccgacgtggtactgtcattcaccttagagattgtcataatggaagtgcaaggcctgaagtcagttgctcccaatcgaattgtttactgtacaatggaagtggaaggagaaaaacttcagacagaccaggccgaagcctcaaggccacaatgggggactcaaggagatttcaccaccacccatcctcggcctgtggtcaaagtgaaactcttcacagaaagcactggagttctggccctggaagataaagaactgggaagggtgatattatacccaacttctaatagctccaaatcagctgaattacaccgaatggtagttccaaaaaatagccaggattctgacttaaaaatcaaactggcagtgcgaatggataaaccagcacatatgaagcatagtggatatctgtatgcccttggacagaaggtttggaaaagatggaaaaaacgttactttgttctagttcaggttagccaatatacctttgctatgtgcagttatagagaaaagaagtctgaaccacaagaattaatgcagcttgaaggctatactgtggattataccgatccccacccaggccttcagggtggttgtatgttctttaatgctgttaaagaaggagatactgtaatctttgccagtgatgatgaacaggacagaatattatgggttcaagccatgtatagggccacaggtcaatcatataaaccagttcctgcaattcaaacccagaaactgaatcctaaaggaggaactctccatgcagatgctcagctttctgaatttacagatgcagatcgttttcagaaacatggtatggatgagtttatttctgcaaacccctgcaagcttgatcatgccttcctttttagaatactccagaggcagactttggatcacagactgaatgattcctattcttgcttgggatggtttagccctggccaagtctttgtgttagatgagtactgtgcccgttatggtgtgagaggctgtcacagacatctctgctaccttgcagaactgatggaacattcagaaaatggtgctgtcattgaccctaccctgctccattacagctttgcattctgtgcctctcatgtgcacggcaacaggcctgatggaattgggactgtttcagtggaagaaaaagaaagatttgaggagataaaagagagactctcttcccttttagaaaatcagataagccatttcagatactgttttccctttggacgacctgaaggtgctctaaaagctacactttcattacttgaaagggttttaatgaaagatattgccactcccataccagcagaagaggtgaagaaagtggtcagaaaatgtctcgagaaagctgccttgatcaattacactagactcacagaatatgccaaaatagaaggcccagcagaaaaggaaacagagaccatgaaccaggcatctcctgctagaaagctggaagagattcttcatctggcagagctctgcatagaagtcttacagcagaatgaagagcatcatgcagaggcatttgcctggtggcctgatttattggctgaacatgcagagaaattttgggctttatttacagtggatatggacactgcactagaggctcaaccgcaagactcctgggatagttttcctcttttccaactgcttaataatttcctccgaaatgacacacttttgtgtaatggaaaatttcacaaacacttgcaagaaatctttgtacccttggttgtccgctatgtggatctcatggagtcttccatcgcccagtcaattcacagaggttttgagcaggagacatggcagcctgtcaagaatatcgccaacagtcttcccaatgtagctcttccaaaagttccaagtctgcctcttaatcttccacagattcctaacatttctactgcttcgtggatgccttctttatatgagtccaccaatggctcagcaacatcagaagaccttttttggaagcttgatgcactgcaaatgtttgtctttgatctgcactggccagaacaggaatttgcccaccacttagagcaaagacttaaactaatggccagtgatatgctagaggcctgtgtcaaaagaacaagaactgcatttgaactcaagctacaaaaggcaagcaaaacaactgacttgcgcattccagcttccgtttgcactatgtttaatgtattagtcgatgccaaaaagcaaagcaccaaactctgtgccctggatggaggacaagagcaacagtaccattcaaaaatagatgatctgatcgacaacagtgtaaaagaaatcatttcactgttagtttcaaagtttgtttcagtgttggaaggcgtgttgtctaagctgtcaaggtatgatgaaggcactttcttttcatccattctgtcattcactgtgaaagcagctgcaaaatatgttgatgttccaaaaccaggaatggatctggcagacacctatattatgtttgttcggcaaaaccaagatattcttcgagaaaaggtcaatgaggaaatgtatatagaaaagttatttgatcaatggtacagcagttccatgaaagtcatttgcgtgtggttgactgatagattagacctccaactccatatttaccagctgaagacgctcatcaagattgtgaagaaaacctacagggactttcgattgcagggtgtgttggaaggaacactgaacagtaagacttatgatactgtgcacagacgtttaacagtagaggaggccacagcctctgtttcagaaggaggaggacttcagggcattactatgaaagacagtgacgaagaagaagaaggctgatatcacacagctttgcagaaggaaggaagaccttgatcgacattgttttttatttttttaaccttgtccttgtaattacattcattgtttgttttggccaaataaaaatgcttgtatttctttaaaaagtaagcctgaatgtagagtaaaaggggaaatgccaagattttggggtttttttgtttcctttttttgtttgtttgtttgtttgtttttttggagaagagcatcctcttttgtgtagtttgacctaaaaatgaaccttggctctgcttgtgatcagaacatgaacttttttttttaaagaagatttgagcatttttctgtaatcacatcaaaatgatgttttctgtgtaaagcgagatacatatttctcataatgcagcattgtgagaagtcagttcggaccactgcaccaacactgtcgtatccttgttaaaatggtgtgtaccttacaaattataatttatgtgccaggttcgttttgtacttaatttgctattattgtgatgtgtataaaatctttaatcttggttcttagtactttgaattggtctacaggtatattcctgggatgaaaggattgccaaacccaaatatagactagattatccaatgggtttgtgtctttgttccattctcaacatttcttctttcaactataagtaatccccaggtgtggggtagcaagtgtgcttccgtcaagataccatattctcctgctccagtataacagcttgcaggcaataaaaatctatttgctcataactacttctgtatttattagacttatatagagcaaatgcagtaaaagaggtttgcagtgtttcaaacatcccaactatctgactctgtgtttttgtttcttgagttttttgtttgttttgtttgtaatattttgtttttaatcaaatgagtaaaagatagtaacactgactgttctttgtacctaataggcacatacattgttaaaagaattactatgacagcatatttccatagcagaggaaatatatatttcatatattattagttaatattagtaatcaatgttaactaataattagtaatgttagtaatattaactagtaattcacattattagtggttctctcaaaatattttcttgctagggtttgagagataattgtattatgttgcgtaagttctctatgaattatttttgtgatatttcccaaaacatattggcagattgtgctactgcatttattaataagtaatttttaaatgaaggcagttaatgcagaataagtggaggtatccctgcatttatgaaaacgtttattctgaaactttagaaatgaaacaacttggacctccagattcgttctcccatggtgtaataagtggtcgttaggtacctagactagccttaaaaatctatttaatctacagttactatttagcattgttttggctcattttctgggccctagggctaagataacaaacaaggaaatttcttccttcttccgggattaaagactaactctaccaactcactatctttgaaaggcagtttgggaatgttctccctccttttcttctctattcacacaccaaatactattttctccaaaccctcaaatgtccagtcatgctatcccaaactctccaatggcaccatccccaagcttgctgttccacgacacattgctctgtacttagtaattacccacccttcttttcctttcaataaaatgtccatttccttgat

SEQ ID NO: 2951 - DNA, 6065 bp, Homo sapiens
  source 1..6065: mol_type = unassigned DNA; mol_type = unassigned DNA
attcaattccacgtgttgcttgttgtaggcgccacaggttccccacctgcgtccgggcgctcgggcggctccgcctctgccggcgggctctggggaaccgctgggtcggcgcgcccggggctggcggagcaattcctgaggcgcccaagctcacccccaacgctaactccgcctattcagtcccggcggctccccctctcccccctcccaatcctcctcccggctcctgcccgcccctttcgccctggtggtaggaaacactcctgaatctaactcgacgtgtccggaaagccctggccagttttcctttcgttctgcggccgctgcagccagccccgcggctccctcagacccgcgggcgcagccgccgggggtgaggcgcttggggaccgcgggccgagcggcggggatccccgagcaccatgctggacccgtcttccagcgaagaggagtcggacgaggggctggaagaggaaagccgcgatgtgctggtggcagccggcagctcgcagcgagctcctccagccccgactcgggaagggcggcgggacgcgccggggcgcgcgggcggcggcggcgcggccagatctgtgagcccgagcccctctgtgctcagcgaggggcgagacgagccccagcggcagctggacgatgagcaggagcggaggatccgcctgcagctctacgtcttcgtcgtgaggtgcatcgcgtaccccttcaacgccaagcagcccaccgacatggcccggaggcagcagaagcttaacaaacaacagttgcagttactgaaagaacggttccaggccttcctcaatggggaaacccaaattgtagctgacgaagcattttgcaacgcagttcggagttattatgaggtttttctaaagagtgaccgagtggccagaatggtacagagtggagggtgttctgctaatgacttcagagaagtatttaagaaaaacatagaaaaacgtgtgcggagtttgccagaaatagatggcttgagcaaagagacagtgttgagctcatggatagccaaatatgatgccatttacagaggtgaagaggacttgtgcaaacagccaaatagaatggccctaagtgcagtgtctgaacttattctgagcaaggaacaactctatgaaatgtttcagcagattctgggtattaaaaaactggaacaccagctcctttataatgcatgtcagctggataacgcagatgaacaagcagcccagatcagaagggaacttgatggccggctgcaattggcagataaaatggcaaaggaaagaaaattccccaaatttatagcaaaagatatggagaatatgtatatagaagagttgcggtcttcagtgaatttgctaatggccaatttggaaagtcttccagtttcgaaaggtggtccggaatttaaattacaaaaattaaaacgttcacagaactctgcatttttggacataggagatgagaatgagattcagctgtcaaagtccgacgtggtactgtcattcaccttagagattgtcataatggaagtgcaaggcctgaagtcagttgctcccaatcgaattgtttactgtacaatggaagtggaaggagaaaaacttcagacagaccaggccgaagcctcaaggccacaatgggggactcaaggagatttcaccaccacccatcctcggcctgtggtcaaagtgaaactcttcacagaaagcactggagttctggccctggaagataaagaactgggaagggtgatattatacccaacttctaatagctccaaatcagctgaattacaccgaatggtagttccaaaaaatagccaggattctgacttaaaaatcaaactggcagtgcgaatggataaaccagcacatatgaagcatagtggatatctgtatgcccttggacagaaggtttggaaaagatggaaaaaacgttactttgttctagttcaggttagccaatatacctttgctatgtgcagttatagagaaaagaagtctgaaccacaagaattaatgcagcttgaaggctatactgtggattataccgatccccacccaggccttcagggtggttgtatgttctttaatgctgttaaagaaggagatactgtaatctttgccagtgatgatgaacaggacagaatattatgggttcaagccatgtatagggccacaggtcaatcatataaaccagttcctgcaattcaaacccagaaactgaatcctaaaggaggaactctccatgcagatgctcagctttctggtaaagatgcagatcgttttcagaaacatggtatggatgagtttatttctgcaaacccctgcaagcttgatcatgccttcctttttagaatactccagaggcagactttggatcacagactgaatgattcctattcttgcttgggatggtttagccctggccaagtctttgtgttagatgagtactgtgcccgttatggtgtgagaggctgtcacagacatctctgctaccttgcagaactgatggaacattcagaaaatggtgctgtcattgaccctaccctgctccattacagctttgcattctgtgcctctcatgtgcacggcaacaggcctgatggaattgggactgtttcagtggaagaaaaagaaagatttgaggagataaaagagagactctcttcccttttagaaaatcagataagccatttcagatactgttttccctttggacgacctgaaggtgctctaaaagctacactttcattacttgaaagggttttaatgaaagatattgccactcccataccagcagaagaggtgaagaaagtggtcagaaaatgtctcgagaaagctgccttgatcaattacactagactcacagaatatgccaaaatagaaggcccagcagaaaaggaaacagagaccatgaaccaggcatctcctgctagaaagctggaagagattcttcatctggcagagctctgcatagaagtcttacagcagaatgaagagcatcatgcagaggcatttgcctggtggcctgatttattggctgaacatgcagagaaattttgggctttatttacagtggatatggacactgcactagaggctcaaccgcaagactcctgggatagttttcctcttttccaactgcttaataatttcctccgaaatgacacacttttgtgtaatggaaaatttcacaaacacttgcaagaaatctttgtacccttggttgtccgctatgtggatctcatggagtcttccatcgcccagtcaattcacagaggttttgagcaggagacatggcagcctgtcaagaatatcgccaacagtcttcccaatgtagctcttccaaaagttccaagtctgcctcttaatcttccacagattcctaacatttctactgcttcgtggatgccttctttatatgagtccaccaatggctcagcaacatcagaagaccttttttggaagcttgatgcactgcaaatgtttgtctttgatctgcactggccagaacaggaatttgcccaccacttagagcaaagacttaaactaatggccagtgatatgctagaggcctgtgtcaaaagaacaagaactgcatttgaactcaagctacaaaaggcaagcaaaacaactgacttgcgcattccagcttccgtttgcactatgtttaatgtattagtcgatgccaaaaagcaaagcaccaaactctgtgccctggatggaggacaagagcaacagtaccattcaaaaatagatgatctgatcgacaacagtgtaaaagaaatcatttcactgttagtttcaaagtttgtttcagtgttggaaggcgtgttgtctaagctgtcaaggtatgatgaaggcactttcttttcatccattctgtcattcactgtgaaagcagctgcaaaatatgttgatgttccaaaaccaggaatggatctggcagacacctatattatgtttgttcggcaaaaccaagatattcttcgagaaaaggtcaatgaggaaatgtatatagaaaagttatttgatcaatggtacagcagttccatgaaagtcatttgcgtgtggttgactgatagattagacctccaactccatatttaccagctgaagacgctcatcaagattgtgaagaaaacctacagggactttcgattgcagggtgtgttggaaggaacactgaacagtaagacttatgatactgtgcacagacgtttaacagtagaggaggccacagcctctgtttcagaaggaggaggacttcagggcattactatgaaagacagtgacgaagaagaagaaggctgatatcacacagctttgcagaaggaaggaagaccttgatcgacattgttttttatttttttaaccttgtccttgtaattacattcattgtttgttttggccaaataaaaatgcttgtatttctttaaaaagtaagcctgaatgtagagtaaaaggggaaatgccaagattttggggtttttttgtttcctttttttgtttgtttgtttgtttgtttttttggagaagagcatcctcttttgtgtagtttgacctaaaaatgaaccttggctctgcttgtgatcagaacatgaacttttttttttaaagaagatttgagcatttttctgtaatcacatcaaaatgatgttttctgtgtaaagcgagatacatatttctcataatgcagcattgtgagaagtcagttcggaccactgcaccaacactgtcgtatccttgttaaaatggtgtgtaccttacaaattataatttatgtgccaggttcgttttgtacttaatttgctattattgtgatgtgtataaaatctttaatcttggttcttagtactttgaattggtctacaggtatattcctgggatgaaaggattgccaaacccaaatatagactagattatccaatgggtttgtgtctttgttccattctcaacatttcttctttcaactataagtaatccccaggtgtggggtagcaagtgtgcttccgtcaagataccatattctcctgctccagtataacagcttgcaggcaataaaaatctatttgctcataactacttctgtatttattagacttatatagagcaaatgcagtaaaagaggtttgcagtgtttcaaacatcccaactatctgactctgtgtttttgtttcttgagttttttgtttgttttgtttgtaatattttgtttttaatcaaatgagtaaaagatagtaacactgactgttctttgtacctaataggcacatacattgttaaaagaattactatgacagcatatttccatagcagaggaaatatatatttcatatattattagttaatattagtaatcaatgttaactaataattagtaatgttagtaatattaactagtaattcacattattagtggttctctcaaaatattttcttgctagggtttgagagataattgtattatgttgcgtaagttctctatgaattatttttgtgatatttcccaaaacatattggcagattgtgctactgcatttattaataagtaatttttaaatgaaggcagttaatgcagaataagtggaggtatccctgcatttatgaaaacgtttattctgaaactttagaaatgaaacaacttggacctccagattcgttctcccatggtgtaataagtggtcgttaggtacctagactagccttaaaaatctatttaatctacagttactatttagcattgttttggctcattttctgggccctagggctaagataacaaacaaggaaatttcttccttcttccgggattaaagactaactctaccaactcactatctttgaaaggcagtttgggaatgttctccctccttttcttctctattcacacaccaaatactattttctccaaaccctcaaatgtccagtcatgctatcccaaactctccaatggcaccatccccaagcttgctgttccacgacacattgctctgtacttagtaattacccacccttcttttcctttcaataaaatgtccatttccttgatac

SEQ ID NO: 2952 - DNA, 5392 bp, Homo sapiens
  source 1..5392: mol_type = unassigned DNA; mol_type = unassigned DNA
aattaatcgagagctaattaaaatttaaatatatatgttgggaaatatttccccatgggcacaaaactaagtaatcgagctgtccagtatcttggtaggtagtgtgacaatatcagaatttatggtcaatggattataaaatgttttgtcagcatgggatcctgaaaaaaatctgcctcctacaaaagattcttagaatacctcgaaccacagaatgcccttcctttccttcttaaaaagatgtcactaaatctatatccattataacactggacacattctgttctttaaaaacaaaaataatgttaatttttcacatatttagtgttcatttagtatacacattttatatatttaatgtaattcatatatactactttggtataacatattatagcaatagttgctactatctaaaaaggtgaatgcttcccaaatacgggtatgagtgtgtttacatctggatgtgtctttgtgaatgacgtatatataagtgcagtggagagttggagagctttatggagtttctaatacccaatagaaaataaaacaattcaaaattattcaaaaattctgttctgtaaggatttatttgtcatctgttttctgcttctgtttgtggtattctatgctctaaaagggtgaaataaatatttattttcttattggagagattccagatgtgcaaaaactgtcagacaccatccctcccacatcttgatacacatatgaacgtatttgcaataaaaaagtgacagtattctagaaacatagctaaaaccactatttctctgtttgactattctatattatcctgataaactctagcaatggacacattacagaattgaaaatttgcattgaaagttttaaaaatgctagtttttaaaattttactgcatatatacaagtagttgataactcaaacagctttattttgaagttcatctccttcatgcaataaattattcctcaaatagctagaataatggcattctgtctttcagctgaaactatttgattcaaataatgatgggaagctggaattaactgagatggccaggtgagtttaggaaccatgaaaaatattgtaagtggatccttttcaaaaaatgtaatatattaatataatgtttttctctcaaaaggttactaccagtgcaggagaattttcttcttaaattccagggaatcaaaatgtgtgggaaagagttcaataaggcttttgagctgtatgatcaggtaaaagtttgttactttttcctttcttttttattgaagtaagaacacaacataagatcctcttaacaaaatttaagtataaaatacagtactgcaaactatagagacaatcttgacagcagatctttagaatttatccatcttatataattgagactttatgcccattgatgagtaactcgtcatttctccttcccccagccctggcaataacattctactttatgagtgtgactattttagatacctcatacaagtggcatcatgcagaatttgtcttgtgctgagattgattgatcatatgcagttctatttttaattttttgagggctctccatactgtttttcatagtggatgcaccatttttgcattcccaccaatgtatacaagagttccaattttcttcattctcactaacacttgtcttttatctttttgataatagccattctaataggtgtgaggagatatcttattgttaatttttatttctctgattagtgatgttaagcattttttcattacctgttggccatttatataccttctttggataagtgtctactcaagtcattaacccattttttaaattgaattattcattttttgctattgagttacaggagttctttataaattttggaaattaaccctttttgggatgtggtttacaaatattttctcccattctgtaggctgcttttgcactctgttgattgtttcctttgctgtgcagctttttagtttgatgtagtctcgcttgtctatttttgcttgtgttgtccttgcttatggtttcatatccacaatatcattgctaagaacaatgtcataaaggtttcccttatgtttgtttgcttctaggagttttacagttttagatcttatatttaagtttttaatctatcttgaatttattttttatatggtgtaagctaagggtccaatttcattattttgcatgtgtctgtatagtttacctaacaccatttgttgaaaaaagctatccttgtcccattttgtgtttttggcacccttatcaaagatcagttgactataacatgtgaaactgagagctcattagtctatgtttcgatttttgtttcagagctatactgttttaatcattgtagctttgtaatatattttgaaatcaagaagtgtgatgtctccaggtttattcttttttctcaagatggtttttggctatttgggatcttttgtggttacatatgaattttagggtttttttatttctataaatattgccattgggattttggaagtgattacactgaatctgtagatgtgtttgagtaatatagacattttaacaatattaagccttccaattcataaacacaggacgtctttccatttgtttgtgtctctgttaacttctttcatcagtattttatgatttttagtgtataagtttttcctctcagttaactttattcctaagtattttattcttttggtgctcttgtaaatgggattttctaatttccatttcagatagtttatcatcataactaatttctgattgttaattttgcatcctacaactttatggaatttgtttattaattccaacagtttttgtgaggtctttagggttttctctctataaaaataatatctgcaaacagggataatttaacttctctctttccaatttggatgccttaaaattttgttcttatctataatttgattcttcagaatttggaaaaaacgattatgaaaattacacaaataactccttcttttcataggaaaggtaatacggtatgcccaaattacacaaactcctgattcgaatcccacactatcatttacctgctttgagactttgaacaagataccaaactcatgtgagcctcaatttcttcatttgtaaacaagagataataataacaccactttgcaggattgaatgaggattaagctaggtgaaaatatccagcaaaataaaggttatttgtgatgtcactaggtcacatcctttgcttctaatttgtttactcctggacctgtgagctctagcagaactctgccacaccctggtgtgacatagagccacataccttcctcagccctcagtttcctcacttgtcctagaagatattattaacattaagtgaattacatgtgtaagtactttgaaaagttcaagatcttttacaaatgtaaggtgttgaatgagaagtaactaataccttgcatattttacagctttggagcagctaaaaacttgggtggcctgacataacagattatctgccaagtatgcagttgggagactttctaaggattccaattatttccattttacttcatttcccactactgtagatggagttggttgtatactattttatttctcctcccccaggacggcaatggatacatagatgaaaatgaactggatgctttactgaaggatctgtgcgagaagaataaacaggatctggatattaataatattacaacatacaagaagaacataatggctttgtcggatggagggaagctgtaccgaacggatcttgctcttattctctgtgctggggataactagagttggtggccgcaaccacttgctagtgatacactgtatctaaaaaataactgtgcactataagggagtaggctgtattttcttttatatctgtaaatttaactgcatatagataattatccaggatgtgtggctcattcttttcagcttgtttctatactgtttgtaatatacagtttttgtaaccatatgattgaaaagaagaaagtctatgcttaggccagtcagtacacccaattttaaaaaataacatattcttgctttcacaaatatagttgaacaagatttccctaaaaattccaccaggattaatctctaaaattctagtctctgatttgcaaatgcacatttgtcactgaataatggaattatgtataacaagccaaacattcttattttagacaaccatagaactgtcccacaaaatatttctaagcttatttctaactattaggaggaatgtgcttttccatctaaaatactcaccaaaatatagttaattgtggctttatgaagttaacagtctcattacagatttagtttaccaatcaacagcatgtctactgcttggatccatacaaaactatcggttcaagttgatgtgacaagggaagggagcaccagatgacacataaatctgtctgattctatgcctgtatttccaacaaacttactgtcagagaatatgacctaaatccattttctaaactgttttcatgtgttgcaaattattctagtcaactgctgttttatgtcatactctgtgtaatctctgattaaatttaatatactgcatatcctggtgtctagtttgcatacttcctggattttctttctatgtagaactgttcatttccaccaagggtatctgctgcctctgaaaatatttttttctagctataacaactctattttttactacataattaaattttaatgtaaaattcatagcatcctgattattgaatgttatatcatcaatacttttgtgtattctgtggattctatatttcatattgagatcagcattcaaaatagttctatttctatctgcaaatagtttcaaatgagtttaaaaaaataacatctgaaaagaaatgctaatgtaatcatttatcttatctagcaagaagattctaaaacattctttaacatacatctaagtcagtttcacatatttgtagctagaatatcctatactggttatagttgatatgtaacagttggtgattttagatttctttgattgtgaaacagggagctatgagagatgtgtccatgtgaaatttacagttactgcctaggagttaatgatcgttctgggtcagcttgaatgtccccattctataaattcaacacttattttctgaattcataaaaataaccaaaaaatgtgagctataatgtttccctcaagaacaaacagaaacgagatttgccaaaaactaaaattcaacaaatgatgttgagtgggagattggctttgcctttagcgtgtaaatggaagcactgccattagactgaatttaactactaagaataaataaagaagaaaataaccttaa

SEQ ID NO: 2953 - DNA, 2533 bp, Homo sapiens
  source 1..2533: mol_type = unassigned DNA; mol_type = unassigned DNA
agggagagaactctggaggaacgctgagctgagcagcaccgaggacagcgcccggcagcgcccgcgcccaggtctccctccgcagccctgactcgcgcacacgctgagcttttgctcactccccctcgcgcggacacagacacacgcatattcacacacccagacacacaccccgctgtacaatggcagaatcccacctgcagtcatccctcatcacagcctcacagtttttcgagatctggctccatttcgacgctgacggaagtggttacctggaaggaaaggagctgcagaacttgatccaggagctccagcaggcgcgaaagaaggctggattggagttatcacctgaaatgaaaacttttgtggatcagtatgggcaaagagatgatggaaaaataggaattgtagagttggctcacgtattacccacagaagagaatttcctgctgctcttccgatgccagcagctgaagtcctgtgaggaattcatgaagacatggagaaaatatgatactgaccacagtggcttcatagaaactgaggagcttaagaactttctaaaggacctgctagaaaaagcaaacaagactgttgatgacacaaaattagccgagtatacagacctaatgctgaaactatttgattcaaataatgatgggaagctggaattaactgagatggccaggttactaccagtgcaggagaattttcttcttaaattccagggaatcaaaatgtgtgggaaagagttcaataaggcttttgagctgtatgatcaggacggcaatggatacatagatgaaaatgaactggatgctttactgaaggatctgtgcgagaagaataaacaggatctggatattaataatattacaacatacaagaagaacataatggctttgtcggatggagggaagctgtaccgaacggatcttgctcttattctctgtgctggggataactagagttggtggccgcaaccacttgctagtgatacactgtatctaaaaaataactgtgcactataagggagtaggctgtattttcttttatatctgtaaatttaactgcatatagataattatccaggatgtgtggctcattcttttcagcttgtttctatactgtttgtaatatacagtttttgtaaccatatgattgaaaagaagaaagtctatgcttaggccagtcagtacacccaattttaaaaaataacatattcttgctttcacaaatatagttgaacaagatttccctaaaaattccaccaggattaatctctaaaattctagtctctgatttgcaaatgcacatttgtcactgaataatggaattatgtataacaagccaaacattcttattttagacaaccatagaactgtcccacaaaatatttctaagcttatttctaactattaggaggaatgtgcttttccatctaaaatactcaccaaaatatagttaattgtggctttatgaagttaacagtctcattacagatttagtttaccaatcaacagcatgtctactgcttggatccatacaaaactatcggttcaagttgatgtgacaagggaagggagcaccagatgacacataaatctgtctgattctatgcctgtatttccaacaaacttactgtcagagaatatgacctaaatccattttctaaactgttttcatgtgttgcaaattattctagtcaactgctgttttatgtcatactctgtgtaatctctgattaaatttaatatactgcatatcctggtgtctagtttgcatacttcctggattttctttctatgtagaactgttcatttccaccaagggtatctgctgcctctgaaaatatttttttctagctataacaactctattttttactacataattaaattttaatgtaaaattcatagcatcctgattattgaatgttatatcatcaatacttttgtgtattctgtggattctatatttcatattgagatcagcattcaaaatagttctatttctatctgcaaatagtttcaaatgagtttaaaaaaataacatctgaaaagaaatgctaatgtaatcatttatcttatctagcaagaagattctaaaacattctttaacatacatctaagtcagtttcacatatttgtagctagaatatcctatactggttatagttgatatgtaacagttggtgattttagatttctttgattgtgaaacagggagctatgagagatgtgtccatgtgaaatttacagttactgcctaggagttaatgatcgttctgggtcagcttgaatgtccccattctataaattcaacacttattttctgaattcataaaaataaccaaaaaatgtgagctataatgtttccctcaagaacaaacagaaacgagatttgccaaaaactaaaattcaacaaatgatgttgagtgggagattggctttgcctttagcgtgtaaatggaagcactgccattagactgaatttaactactaagaataaataaagaagaaaataaccttaa

SEQ ID NO: 2954 - DNA, 1490 bp, Homo sapiens
  source 1..1490: mol_type = unassigned DNA; mol_type = unassigned DNA
aagaaacagatctgcagattatggatctcttactctatcaccaattattattgttgtgatgttgatgtagttggggagatgagaaaacatcttgtcctcactaagggagttatcacctgaaatgaaaacttttgtggatcagtatgggcaaagagatgatggaaaaataggaattgtagagttggctcacgtattacccacagaagagaatttcctgctgctcttccgatgccagcagctgaagtcctgtgaggaattcatgaagacatggagaaaatatgatactgaccacagtggcttcatagaaactgaggagcttaagaactttctaaaggacctgctagaaaaagcaaacaagactgttgatgacacaaaattagccgagtatacagacctaatgctgaaactatttgattcaaataatgatgggaagctggaattaactgagatggccaggttactaccagtgcaggagaattttcttcttaaattccagggaatcaaaatgtgtgggaaagagttcaataaggcttttgagctgtatgatcaggacggcaatggatacatagatgaaaatgaactggatgctttactgaaggatctgtgcgagaagaataaacaggatctggatattaataatattacaacatacaagaagaacataatggctttgtcggatggagggaagctgtaccgaacggatcttgctcttattctctgtgctggggataactagagttggtggccgcaaccacttgctagtgatacactgtatctaaaaaataactgtgcactataagggagtaggctgtattttcttttatatctgtaaatttaactgcatatagataattatccaggatgtgtggctcattcttttcagcttgtttctatactgtttgtaatatacagtttttgtaaccatatgattgaaaagaagaaagtctatgcttaggccagtcagtacacccaattttaaaaaataacatattcttgctttcacaaatatagttgaacaagatttccctaaaaattccaccaggattaatctctaaaattctagtctctgatttgcaaatgcacatttgtcactgaataatggaattatgtataacaagccaaacattcttattttagacaaccatagaactgtcccacaaaatatttctaagcttatttctaactattaggaggaatgtgcttttccatctaaaatactcaccaaaatatagttaattgtggctttatgaagttaacagtctcattacagatttagtttaccaatcaacagcatgtctactgcttggatccatacaaaactatcggttcaagttgatgtgacaagggaagggagcaccagatgacacataaatctgtctgattctatgcctgtatttccaacaaacttactgtcagagaatatgacctaaatccattttctaaactgttttcatgtgttgcaaattattctagtcaactgctgttttatg

SEQ ID NO: 2955 - DNA, 801 bp, Homo sapiens
  source 1..801: mol_type = unassigned DNA; mol_type = unassigned DNA
atacggtatgcccaaattacacaaactcctgattcgaatcccacactatcatttacctgctttgagactttgaacaagataccaaactcatgtgagcctcaatttcttcatttgtaaacaagagataataataacaccactttgcaggattgaatgaggattaagctaggtgaaaatatccagcaaaataaaggttatttgtgatgtcactaggtcacatcctttgcttctaatttgtttactcctggacctgtgagctctagcagaactctgccacaccctggtgtgacatagagccacataccttcctcagccctcagtttcctcacttgtcctagaagatattattaacattaagtgaattacatgtgtaagtactttgaaaagttcaagatcttttacaaatgtaaggtgttgaatgagaagtaactaataccttgcatattttacagctttggagcagctaaaaacttgggtggcctgacataacagattatctgccaagtatgcagttgggagactttctaaggattccaattatttccattttacttcatttcccactactgtagatggagttggttgtatactattttatttctcctcccccaggacggcaatggatacatagatgaaaatgaactggatgctttactgaaggatctgtgcgagaagaataaacaggatctggatattaataatattacaacatacaagaagaacataatggctttgtcggatggagggaagctgtaccgaacggatcttgctcttattctctgtgctggggataactagagt

SEQ ID NO: 2956 - DNA, 591 bp, Homo sapiens
  source 1..591: mol_type = unassigned DNA; mol_type = unassigned DNA
agctggaattaactgagatggccaggttactaccagtgcaggagaattttcttcttaaattccagggaatcaaaatgtgtgggaaagagttcaataaggcttttgagctgtatgatcaggtaaaagtttgttactttttcctttcttttttattgaagtaagaacacaacataagatcctcttaacaaaatttaagtataaaatacagtactgcaaactatagagacaatcttgacagcagatctttagaatttatccatcttatataattgagactttatgcccattgatgagtaactcgtcatttctccttcccccagccctggcaataacattctactttatgagtgtgactattttagatacctcatacaagtggcatcatgcagaatttgtcttgtgctgagattgattgatcatatgcagttctatttttaattttttgagggctctccatactgtttttcatagtggatgcaccatttttgcattcccaccaatgtatacaagagttccaattttcttcattctcactaacacttgtcttttatctttttgataatagccattctaataggtgtgaggagatat

SEQ ID NO: 2957 - DNA, 636 bp, Homo sapiens
  source 1..636: mol_type = unassigned DNA; mol_type = unassigned DNA
aaagcctgtttggtggtctcttcacatggacgcacatgaaatttggtgccgtgactcagatcaggggacctcccttgggagataaatcccctgtcctcctgctctttgctctgtgagaaagatccacctacgacctcaggtcctcagaccgaccagcccaagaaacatctcaccaatttcaaatctggaagtggttacctggaaggaaaggagctgcagaacttgatccaggagctccagcaggcgcgaaagaaggctggattggagttatcacctgaaatgaaaacttttgtggatcagtatgggcaaagagatgatggaaaaataggaattgtagagttggctcacgtattacccacagaagagaatttcctgctgctcttccgatgccagcagctgaagtcctgtgaggaattcatgaagacatggagaaaatatgatactgaccacagtggcttcatagaaactgaggagcttaagaactttctaaaggacctgctagaaaaagcaaacaagactgttgatgacacaaaattagccgagtatacagacctaatgctgaaactatttgattcaaataatgatgggaagctggaattaactgagatggccaggttactaccagtgcaggagaat

SEQ ID NO: 2958 - DNA, 548 bp, Homo sapiens
  source 1..548: mol_type = unassigned DNA; mol_type = unassigned DNA
cacctacgacctcaggtcctcagaccgaccagcccaagaaacatctcaccaatttcaaatctgcggctgaagattgatgctgcctcattgcctcagaagccccatagaccatcacggacgccaagcttccggtaactctcacagtggagggaagtggttacctggaaggaaaggagctgcagaacttgatccaggagctccagcaggcgcgaaagaaggctggattggagttatcacctgaaatgaaaacttttgtggatcagtatgggcaaagagatgatggaaaaataggaattgtagagttggctcacgtattacccacagaagagaatttcctgctgctcttccgatgccagcagctgaagtcctgtgaggaattcatgaagacatggagaaaatatgatactgaccacagtggcttcatagaaactgaggagcttaagaactttctaaaggacctgctagaaaaagcaaacaagactgttgatgacacaaaattagccgagtatacagacctaatgctgaaactatttgattcaaataatgat

SEQ ID NO: 2959 - DNA, 826 bp, Homo sapiens
  source 1..826: mol_type = unassigned DNA; mol_type = unassigned DNA
aactctggaggaacgctgagctgagcagcaccgaggacagcgcccggcagcgcccgcgcccaggtctccctccgcagccctgactcgcgcacacgctgagcttttgctcactccccctcgcgcggacacagacacacgcatattcacacacccagacacacaccccgctgtacaatggcagaatcccacctgcagtcatccctcatcacagcctcacagtttttcgagatctggctccatttcgacgctgacggaacggtaatggtaggagagagagagcagggattggggaatgctgcccccccaaagtttctgtggctgcgcttagcaccccaaccatcctcctttgtcctcagtggatctaaagtttgataccccaggaggggagcgcttcaccgtctgtacactttgctggttaatcaacgtccaggcaagagagagcctctcgggtcgccagaaagataactgtcttggaaagtgaacgggaaagacacttggaatgagatatctgacacctgggtgcctctttgtctttgcaggaagtggttacctggaaggaaaggagctgcagaacttgatccaggagctccagcaggcgcgaaagaaggctggattggagttatcacctgaaatgaaaacttttgtggatcagtatgggcaaagagatgatggaaaaataggaattgtagagttggctcacgtattacccacagaagagaatttcctgctgctcttccgatgccagcagctgaagtcctgtgaggaattcatgaagacatggagaaaatatgatactgaccacagtggcttcatagaaactgaggag

SEQ ID NO: 2960 - DNA, 534 bp, Homo sapiens
  source 1..534: mol_type = unassigned DNA; mol_type = unassigned DNA
caaaaccttaaacttttgtctttccaggaacggtaatggtaggagagagagagcagggattggggaatgctgcccccccaaagtttctgtggctgcgcttagcaccccaaccatcctcctttgtcctcagtggatctaaagtttgataccccaggaggggagcgcttcaccgtctgtacactttgctggttaatcaacgtccaggcaagagagagcctctcgggtcgccagaaagataactgtcttggaaagtgaacgggaaagacacttggaatgagatatctgacacctgggtgcctctttgtctttgcaggaagtggttacctggaaggaaaggagctgcagaacttgatccaggagctccagcaggcgcgaaagaaggctggattggagttatcacctgaaatgaaaacttttgtggatcagtatgggcaaagagatgatggaaaaataggaattgtagagttggctcacgtattacccacagaagagaatttcctgctgctcttccgatgccagcagctgaagtcctgt

SEQ ID NO: 2961 - DNA, 695 bp, Homo sapiens
  source 1..695: mol_type = unassigned DNA; mol_type = unassigned DNA
gtttccatgccccttcccattctttgcccttttctgagcctcctgatcccattatccctcctttctattctttacttcttcccccttctgcctaatcttatcttcttatctccccgactggccgccaaactgtcaacctgaaagtttatattgtttccaccgtaatcccaaaaccttaaacttttgtctttccaggaacggtaatggtaggagagagagagcagggattggggaatgctgcccccccaaagtttctgtggctgcgcttagcaccccaaccatcctcctttgtcctcagtggatctaaagtttgataccccaggaggggagcgcttcaccgtctgtacactttgctggttaatcaacgtccaggcaagagagagcctctcgggtcgccagaaagataactgtcttggaaagtgaacgggaaagacacttggaatgagatatctgacacctgggtgcctctttgtctttgcaggaagtggttacctggaaggaaaggagctgcagaacttgatccaggagctccagcaggcgcgaaagaaggctggattggagttatcacctgaaatgaaaacttttgtggatcagtatgggcaaagagatgatggaaaaataggaattgtagaggtaaggaatttatgcatttttctgatttaattttaataaatgagtttcaattttgaagttgt

SEQ ID NO: 2962 - DNA, 561 bp, Homo sapiens
  source 1..561: mol_type = unassigned DNA; mol_type = unassigned DNA
ctgtttggtggtctcttcacatggacgcacatgaaatttggtgccgtgactcagatcaggggacctcccttgggagataaatcccctgtcctcctgctctttgctctgtgagaaagatccacctacgacctcaggtcctcagaccgaccagcccaagaaacatctcaccaatttcaaatctggagcttgctacaagtgccagaaatctgaccaccaggccaaggaatgcctgcagcccaggattcctcctaagccatgtcccatctgtgcgggaccacactggaaatcggactgttcaactcacctggcagccactcccagagcccctggaactctggcccaaggctctctgactgactccttcttggcttagcggctgaagattgatgctgcctcattgcctcagaagccccatagaccatcacggacgccaagcttccggtaactctcacagtggagggaagtggttacctggaaggaaaggagctgcagaacttgatccaggagctccagcaggcgcgaaagaaggctggattggagttatcacctgaaatgaaaact

SEQ ID NO: 2963 - DNA, 1466 bp, Homo sapiens
  source 1..1466: mol_type = unassigned DNA; mol_type = unassigned DNA
caaccccagcgcgagtgccagagcccagccggcgcggagcgggagcggtgcaggctgaggtctccgagcggctcgccatggctggcccgcagcagcagcccccttacctgcacctggccgagctgacggcgtcccagttcctggaaatatggaagcactttgacgcagacggaaatgggtatattgaaggtaaagagctagaaaactttttccaagagctggagaaggcaaggaaaggctctggcatgatgtcaaagagtgacaactttggagaaaagatgaaggagttcatgcagaagtatgataaaaactcagatgggaaaatcgagatggcagagctggcgcagatcctgccaaccgaagagaacttccttctgtgcttcaggcagcacgtgggctccagcgccgagtttatggaggcttggcggaagtacgacacagacaggagtggctacatcgaagccaatgagctcaagggattcctgtcagacctgctgaagaaggcgaaccggccgtacgatgagcccaagctccaggaatacacccaaaccatactacggatgtttgacttgaacggggatggcaaattgggcctctcagagatgtcccgactcctgcctgtccaggaaaacttcctgcttaaatttcagggcatgaagctgacctcagaggagtttaacgcgatcttcacattttacgacaaggatagaagcggctacattgacgagcatgagctggatgcccttttgaaggatctgtacgagaaaaacaaaaaggaaatgaatattcaacagctcaccaactacagaaagagcgtcatgtccttggcagaggcagggaagctctaccgcaaggacctggagattgtgctctgcagcgagccccccatgtaaagtggggacgggggctgcttctccacctcccccaaaccctgcttctgctgccctgatgcgtctacccagactcagagaccgtgagcgccccgcccccacccctacagcctgcacacacctgcctgcagagcaggaaatgagagatagaggatgggcagctggggggctgtcctgagccccctgcacccacccctgcccaggcagtctttgctcagtggatcacacacatggaaggtgatgggggcatgggtggagggtccctaattctcttcgctgtgatgcatgagctccctcgctgtatgatttaggcttctatgtccaacagagtggactcttccctctcgctcccctctgccggtcccccatgccaccacccaccccaaacttccaggttccatccaccaccttgccaatggtgtagctgtcctctcagaactcctgtgtgtggaaggcacccgccctttccttgccttctttactcggcgtgctccttttctctttgggtttcttgtttaccaaagaagagtttacagacaataaaatggaaaggtcctgctgtggaaacttacccaa

SEQ ID NO: 2964 - DNA, 704 bp, Homo sapiens
  source 1..704: mol_type = unassigned DNA; mol_type = unassigned DNA
tggctggcccgcagcagcagcccccttacctgcacctggccgagctgacggcgtcccagttcctggaaatatggaagcactttgacgcagacggaaatgggtatattgaaggtaaagagctagaaaactttttccaagagctggagaaggcaaggaaaggctctggcatgatgtcaaagagtgacaactttggagaaaagatgaaggagttcatgcagaagtatgataaaaactcagatgggaaaatcgagatggcagagctggcgcagatcctgccaaccgaagagaacttccttctgtgcttcaggcagcacgtgggctccagcgccgagtttatggaggcttggcggaagtacgacacagacaggagtggctacatcgaagccaatgagctcaagggattcctgtcagacctgctgaagaaggcgaaccggccgtacgatgagcccaagctccaggaatacacccaaaccatactacggatgtttgacttgaacggggatggcaaattgggcctctcagagatgtcccgactcctgcctgtccaggaaaacttcctgcttaaatttcagggcatgaagctgacctcagaggagtttaacgcgatcttcacattttacgacaaggaaatgaatattcaacagctcaccaactacagaaagagcgtcatgtccttggcagaggcagggaagctctaccgcaag

SEQ ID NO: 2965 - DNA, 472 bp, Homo sapiens
  source 1..472: mol_type = unassigned DNA; mol_type = unassigned DNA
gctagaaaactttttccaagagctggagaaggcaaggaaaggctctggcatgctggcgcagatcctgccaaccgaagagaacttccttctgtgcttcaggcagcacgtgggctccagcgccgagtttatggaggcttggcggaagtacgacacagacaggagtggctacatcgaagccaatgagctcaagggattcctgtcagacctgctgaagaaggcgaaccggccgtacgatgagcccaagctccaggaatacacccaaaccatactacggatgtttgacttgaacggggatggcaaattgggcctctcagagatactcctgcctgtccaggaaaacttcctgcttaaatttcagggcatgaagctgacctcagaggagtttaacgcgatcttcacattttacgacaaggatagaagcggctacattgacgagcatgagctggatgcccttttgaaggatctgtacgag

SEQ ID NO: 2966 - DNA, 424 bp, Homo sapiens
  source 1..424: mol_type = unassigned DNA; mol_type = unassigned DNA
aacgcacatgaaaagcaccacaatgaaaggctacccaaagcttgcacccactgccaccttcctgccatgactggttaaggcagaagggacacattattttgtcattacacgatctgaacacccccttttgcacagagtaatggagaggctagactcttagacatccctggaatgggtcgggacagcaggggcccaggctttagagctctgggttgactctgctcccatccccaggatagaagcggctacattgacgagcatgagctggatgcccttttgaaggatctgtacgagaaaaacaaaaaggaaatgaatattcaacagctcaccaactacagaaagagcgtcatgtccttggcagaggcagggaagctctaccgcaaggacctggagattgtgctctgcagcgagccccccatgtaaa

SEQ ID NO: 2967 - DNA, 1373 bp, Homo sapiens
  source 1..1373: mol_type = unassigned DNA; mol_type = unassigned DNA
gcacaaccccagcgcgagtgccagagcccagccggcgcggagcgggagcggtgcaggctgaggtctccgagcggctcgccatggctggcccgcagcagcagcccccttacctgcacctggccgagctgacggcgtcccagttcctggaaatatggaagcactttgacgcagacggaaatgggtatattgaaggtaaagagctagaaaactttttccaagagctggagaaggcaaggaaaggctctggcatgatgtcaaagagtgacaactttggagaaaagatgaaggagttcatgcagaagtatgataaaaactcagatgggaaaatcgagatggcagagctggcgcagatcctgccaaccgaagagaacttccttctgtgcttcaggcagcacgtgggctccagcgccgagtttatggaggcttggcggaagtacgacacagacaggagtggctacatcgaagccaatgagctcaagggattcctgtcagacctgctgaagaaggcgaaccggccgtacgatgagcccaagctccaggaatacacccaaaccatactacggatgtttgacttgaacggggatggcaaattgggcctctcagagatgtcccggatagaagcggctacattgacgagcatgagctggatgcccttttgaaggatctgtacgagaaaaacaaaaaggaaatgaatattcaacagctcaccaactacagaaagagcgtcatgtccttggcagaggcagggaagctctaccgcaaggacctggagattgtgctctgcagcgagccccccatgtaaagtggggacgggggctgcttctccacctcccccaaaccctgcttctgctgccctgatgcgtctacccagactcagagaccgtgagcgccccgcccccacccctacagcctgcacacacctgcctgcagagcaggaaatgagagatagaggatgggcagctggggggctgtcctgagccccctgcacccacccctgcccaggcagtctttgctcagtggatcacacacatggaaggtgatgggggcatgggtggagggtccctaattctcttcgctgtgatgcatgagctccctcgctgtatgatttaggcttctatgtccaacagagtggactcttccctctcgctcccctctgccggtcccccatgccaccacccaccccaaacttccaggttccatccaccaccttgccaatggtgtagctgtcctctcagaactcctgtgtgtggaaggcacccgccctttccttgccttctttactcggcgtgctccttttctctttgggtttcttgtttaccaaagaagagtttacagacaataaaatggaaaggtcctgctgtggaaacttaccc

SEQ ID NO: 2968 - DNA, 1373 bp, Homo sapiens; identical to SEQ ID NO: 2967
  source 1..1373: mol_type = unassigned DNA; mol_type = unassigned DNA

SEQ ID NO: 2969 - DNA, 1466 bp, Homo sapiens; identical to SEQ ID NO: 2963
  source 1..1466: mol_type = unassigned DNA; mol_type = unassigned DNA

SEQ ID NO: 2970 - DNA, 704 bp, Homo sapiens; identical to SEQ ID NO: 2964
  source 1..704: mol_type = unassigned DNA; mol_type = unassigned DNA

SEQ ID NO: 2971 - DNA, 472 bp, Homo sapiens; identical to SEQ ID NO: 2965
  source 1..472: mol_type = unassigned DNA; mol_type = unassigned DNA

SEQ ID NO: 2972 - DNA, 424 bp, Homo sapiens; identical to SEQ ID NO: 2966
  source 1..424: mol_type = unassigned DNA; mol_type = unassigned DNA

SEQ ID NO: 2973 - DNA, 5155 bp, Homo sapiens
  source 1..5155: mol_type = unassigned DNA; mol_type = unassigned DNA
acacagcctatgatctctctctgttcaggctgcttcttgctcttgtctcacaataagaaaggagtgctgctttcctggggtatgctatttgagaaagaaagtaacctaacactaactgcaggcggggtcagagtgatgtaacaggaagctctgatgtttcccttctgctgctgatcacttacaatctgacaacacttacaatctactcagaacaacctctctctctccagcagagagtgtcacctcctgctttaggaccatcaagctctgctaactgaatctcatcctaattgcaggatcacattgcaaagctttcactctttcccaccttgcttgtgggtaaatctcttctgcggaatctcagaaagtaaagttccatcctgagaatatttcacaaagaatttccttaagagctggactgggtcttgacccctgaatttaagaaattcttaaagacaatgtcaaatatgatccaagagaaaatgtgatttgagactggagacaattgtgcatatcgtctaataataaaaacccatactagcctatagaaaacaatatttgaaagattgctaccactaaaaagaaaactactacaacttgacaagactgctgcaaacttcaatttgtcaaccacaacttgacaaggttgctataaaacaagattgctacaacttctagtttatgttatacagcatatttcattttggcttaatgatggagaaaaagtgtaccctgtattttctggttctcttgcctttttttatgattcttgttacagcagaattagaagagagtcctgaggactcaattcagttgggagttactagaaataaaatcatgacagctcaatatgaatgttaccaaaagattatgcaagaccccattcaacaagcagaaggcgtttactgcaacagaacctgggatggatggctctgctggaacgatgttgcagcaggaactgaatcaatgcagctctgccctgattactttcaggactttgatccatcagaaaaagttacaaagatctgtgaccaagatggaaactggtttagacatccagcaagcaacagaacatggacaaattatacccagtgtaatgttaacacccacgagaaagtgaagactgcactaaatttgttttacctgaccataattggacacggattgtctattgcatcactgcttatctcgcttggcatattcttttatttcaagagcctaagttgccaaaggattaccttacacaaaaatctgttcttctcatttgtttgtaactctgttgtaacaatcattcacctcactgcagtggccaacaaccaggccttagtagccacaaatcctgttagttgcaaagtgtcccagttcattcatctttacctgatgggctgtaattacttttggatgctctgtgaaggcatttacctacacacactcattgtggtggccgtgtttgcagagaagcaacatttaatgtggtattattttcttggctggggatttccactgattcctgcttgtatacatgccattgctagaagcttatattacaatgacaattgctggatcagttctgatacccatctcctctacattatccatggcccaatttgtgctgctttactggtgaatctttttttcttgttaaatattgtacgcgttctcatcaccaagttaaaagttacacaccaagcggaatccaatctgtacatgaaagctgtgagagctactcttatcttggtgccattgcttggcattgaatttgtgctgattccatggcgacctgaaggaaagattgcagaggaggtatatgactacatcatgcacatccttatgcacttccagggtcttttggtctctaccattttctgcttctttaatggagaggttcaagcaattctgagaagaaactggaatcaatacaaaatccaatttggaaacagcttttccaactcagaagctcttcgtagtgcgtcttacacagtgtcaacaatcagtgatggtccaggttatagtcatgactgtcctagtgaacacttaaatggaaaaagcatccatgatattgaaaatgttctcttaaaaccagaaaatttatataattgaaaatagaaggatggttgtctcactgttttgtgcttctcctaactcaaggacttggacccatgactctgtagccagaagacttcaatattaaatgactttttgaatgtcataaagaagagccttcacatgaaattagtagtgtgttgataagagtgtaacatccagctctatgtgggaaaaaagaaatcctggtttgtaatgtttgtcagtaaatactcccactatgcctgatgtgacgctactaacctgacatcaccaagtgtggaattggagaaaagcacaatcaacttttctgagctggtgtaagccagttccagcacaccattgcatgaattcacaaacaaatggctgtaaaactaaacatacatgttgggcatgattctacccttattgccccaagagacctagctaaggtctataaacatgaagggaaaattagcttttagttttaaaactctttatcccatcttgattggggcagttgactttttttttgcccagagtgccgtagtcctttttgtaactaccctctcaaatggacaataccagaagtgaattatccctgctggctttcttttctctatgaaaagcaactgagtacaattgttatgatctactcatttgctgacacatcagttatatcttgtggcatatccattgtggaaactggatgaacaggatgtataatatgcaatcctacttctatatcattaggaaaacatcttagttgatgctacaaaacaccttgtcaacctcttcctgtcttaccaaacagtgggagggaattcctagctgtaaatataaattttgtcccttccatttctactgtataaacaaattagcaatcattttatataaagaaaatcaatgaaggatttcttattttcttggaattttgtaaaaagaaattgtgaaaaatgagcttgtaaatactccattattttattttatagtctcaaatcaaatacatacaacctatgtaatttttaaagcaaatatataatgcaacaatgtgtgtatgttaatatctgatactgtatctgggctgattttttaaataaaatagagtctggaatgctatatttggtaaatattttaaagacaaccagatgccagcatcagaagtctgtttgagaactaagagaacagaaacatctatcataagatatatttattttaaaaacacaaggtcactattttattgaatatatttgttttgataactcataccttaataataggtgtgtttgacatatttcttttttcattttgacaatgaactcacattctaatccagaaattttaaacaactactgtgataaataccaatctgctacttttatagattttaccccattaaaatattactttactgacttttactatgtgaagatatatagctttggaaatgtcccaggctattcaagaaatataaaaaactagaaggatactatatataccatatacaatgctttaatattttaatagagctactgtatataatacaaattagggaaatacttgaatatatcattgagaaaaaattattgtcagatcttactgaattattgtcagactttattaaataaagatagaagaaaaccttgctaatgaattaaagtgaaatttgcatgggattcagtttctctaatgttattttccgctgaaatctctaaagaacaagaatgacttcaattagtaaaagtcaattttgggaaaagtcatgggtatctgttttttaagtgtgtcaatctgattaaaatggatgaaacaaattactcatcataagttgtttcttaagctgtcaatatgtcaatagatggtgagttcagaacttatttcaaattgctaagacaaattatctaaattcgtaagaattaacatatagaatggtctggtcagtacatttataatttatctatgcatgaaaaagtattgttttgtttgaaacatgaatttcatagcaagctgccatagaaaggaacgcaggctgttctagaccttcaactgcctaaattatacaaaaattcattttaataaactcaattattagctatttattattcaaagacccatatttaaatcctttgctgaccatgttgacatatatcagccttcttctagacaaactgtcaactctcaaccatcttgacagtagaagtgacagtaaaaaatgttgaatgatcagagattatattaaaataaacatgtaattttcaagtatttttgttgtgcttttataatattaattctagatcagatttattttatagccagggtttgtctgttgtagagtcttgaggcgtagcagtcattcatgattaatcactgttagttttgtacccatatatttttagaatagttttaaatgttagatttctcaaaagctaaatgctacttaatatctttgtatcatactcataaagcaaagtaaatctgacactttttttaaagcaaacttctttgctgtcaaaaaaataaatttggggaaatttctagcttttaaaatgtagatctgcattttactgtgattacttgtgaaagtcatattttaattttctaaattctaatttgtcattttatttcctaaagttaatttccaatgcatttattcataaaatattcattctggaatgcagtgtttgtttaaatgtaatccaatgtatatagaattagtggtggctgtagtgctgtatttattgcttataattttttttaaatgtgaacttacttttaattttctcttggttttaatctgctagtagaaaccactagttatctgtaaaaatatattcaagatattctgatcaattataacaatttatgttatgcctagagtatatctctattttttgattgtatgaaaatattaaagttatgagttaaagtttattttcactgatatttactacagtgccaaataatctaatttataaacataattcttacagtaatcaatgggatacttctcaaaattaacaaatctcttaacaaaatatatcttttgccctctttaaagtcttcagtaaaccagtaaatgaattcaataaaccaa

SEQ ID NO: 2974 - DNA, 5223 bp, Homo sapiens
  source 1..5223: mol_type = unassigned DNA; mol_type = unassigned DNA
acacagcctatgatctctctctgttcaggctgcttcttgctcttgtctcacaataagaaaggagtgctgctttcctggggtatgctatttgagaaagaaagtaacctaacactaactgcaggcggggtcagagtgatgtaacaggaagctctgatgtttcccttctgctgctgatcacttacaatctgacaacacttacaatctactcagaacaacctctctctctccagcagagagtgtcacctcctgctttaggaccatcaagctctgctaactgaatctcatcctaattgcaggatcacattgcaaagctttcactctttcccaccttgcttgtgggtaaatctcttctgcggaatctcagaaagtaaagttccatcctgagaatatttcacaaagaatttccttaagagctggactggggtcctacgatgatacaccaaccacttgtgctaccatctgtcaaaactttggatggccctactttcaggtcttgacccctgaatttaagaaattcttaaagacaatgtcaaatatgatccaagagaaaatgtgatttgagactggagacaattgtgcatatcgtctaataataaaaacccatactagcctatagaaaacaatatttgaaagattgctaccactaaaaagaaaactactacaacttgacaagactgctgcaaacttcaatttgtcaaccacaacttgacaaggttgctataaaacaagattgctacaacttctagtttatgttatacagcatatttcattttggcttaatgatggagaaaaagtgtaccctgtattttctggttctcttgcctttttttatgattcttgttacagcagaattagaagagagtcctgaggactcaattcagttgggagttactagaaataaaatcatgacagctcaatatgaatgttaccaaaagattatgcaagaccccattcaacaagcagaaggcgtttactgcaacagaacctgggatggatggctctgctggaacgatgttgcagcaggaactgaatcaatgcagctctgccctgattactttcaggactttgatccatcagaaaaagttacaaagatctgtgaccaagatggaaactggtttagacatccagcaagcaacagaacatggacaaattatacccagtgtaatgttaacacccacgagaaagtgaagactgcactaaatttgttttacctgaccataattggacacggattgtctattgcatcactgcttatctcgcttggcatattcttttatttcaagagcctaagttgccaaaggattaccttacacaaaaatctgttcttctcatttgtttgtaactctgttgtaacaatcattcacctcactgcagtggccaacaaccaggccttagtagccacaaatcctgttagttgcaaagtgtcccagttcattcatctttacctgatgggctgtaattacttttggatgctctgtgaaggcatttacctacacacactcattgtggtggccgtgtttgcagagaagcaacatttaatgtggtattattttcttggctggggatttccactgattcctgcttgtatacatgccattgctagaagcttatattacaatgacaattgctggatcagttctgatacccatctcctctacattatccatggcccaatttgtgctgctttactggtgaatctttttttcttgttaaatattgtacgcgttctcatcaccaagttaaaagttacacaccaagcggaatccaatctgtacatgaaagctgtgagagctactcttatcttggtgccattgcttggcattgaatttgtgctgattccatggcgacctgaaggaaagattgcagaggaggtatatgactacatcatgcacatccttatgcacttccagggtcttttggtctctaccattttctgcttctttaatggagaggttcaagcaattctgagaagaaactggaatcaatacaaaatccaatttggaaacagcttttccaactcagaagctcttcgtagtgcgtcttacacagtgtcaacaatcagtgatggtccaggttatagtcatgactgtcctagtgaacacttaaatggaaaaagcatccatgatattgaaaatgttctcttaaaaccagaaaatttatataattgaaaatagaaggatggttgtctcactgttttgtgcttctcctaactcaaggacttggacccatgactctgtagccagaagacttcaatattaaatgactttttgaatgtcataaagaagagccttcacatgaaattagtagtgtgttgataagagtgtaacatccagctctatgtgggaaaaaagaaatcctggtttgtaatgtttgtcagtaaatactcccactatgcctgatgtgacgctactaacctgacatcaccaagtgtggaattggagaaaagcacaatcaacttttctgagctggtgtaagccagttccagcacaccattgcatgaattcacaaacaaatggctgtaaaactaaacatacatgttgggcatgattctacccttattgccccaagagacctagctaaggtctataaacatgaagggaaaattagcttttagttttaaaactctttatcccatcttgattggggcagttgactttttttttgcccagagtgccgtagtcctttttgtaactaccctctcaaatggacaataccagaagtgaattatccctgctggctttcttttctctatgaaaagcaactgagtacaattgttatgatctactcatttgctgacacatcagttatatcttgtggcatatccattgtggaaactggatgaacaggatgtataatatgcaatcctacttctatatcattaggaaaacatcttagttgatgctacaaaacaccttgtcaacctcttcctgtcttaccaaacagtgggagggaattcctagctgtaaatataaattttgtcccttccatttctactgtataaacaaattagcaatcattttatataaagaaaatcaatgaaggatttcttattttcttggaattttgtaaaaagaaattgtgaaaaatgagcttgtaaatactccattattttattttatagtctcaaatcaaatacatacaacctatgtaatttttaaagcaaatatataatgcaacaatgtgtgtatgttaatatctgatactgtatctgggctgattttttaaataaaatagagtctggaatgctatatttggtaaatattttaaagacaaccagatgccagcatcagaagtctgtttgagaactaagagaacagaaacatctatcataagatatatttattttaaaaacacaaggtcactattttattgaatatatttgttttgataactcataccttaataataggtgtgtttgacatatttcttttttcattttgacaatgaactcacattctaatccagaaattttaaacaactactgtgataaataccaatctgctacttttatagattttaccccattaaaatattactttactgacttttactatgtgaagatatatagctttggaaatgtcccaggctattcaagaaatataaaaaactagaaggatactatatataccatatacaatgctttaatattttaatagagctactgtatataatacaaattagggaaatacttgaatatatcattgagaaaaaattattgtcagatcttactgaattattgtcagactttattaaataaagatagaagaaaaccttgctaatgaattaaagtgaaatttgcatgggattcagtttctctaatgttattttccgctgaaatctctaaagaacaagaatgacttcaattagtaaaagtcaattttgggaaaagtcatgggtatctgttttttaagtgtgtcaatctgattaaaatggatgaaacaaattactcatcataagttgtttcttaagctgtcaatatgtcaatagatggtgagttcagaacttatttcaaattgctaagacaaattatctaaattcgtaagaattaacatatagaatggtctggtcagtacatttataatttatctatgcatgaaaaagtattgttttgtttgaaacatgaatttcatagcaagctgccatagaaaggaacgcaggctgttctagaccttcaactgcctaaattatacaaaaattcattttaataaactcaattattagctatttattattcaaagacccatatttaaatcctttgctgaccatgttgacatatatcagccttcttctagacaaactgtcaactctcaaccatcttgacagtagaagtgacagtaaaaaatgttgaatgatcagagattatattaaaataaacatgtaattttcaagtatttttgttgtgcttttataatattaattctagatcagatttattttatagccagggtttgtctgttgtagagtcttgaggcgtagcagtcattcatgattaatcactgttagttttgtacccatatatttttagaatagttttaaatgttagatttctcaaaagctaaatgctacttaatatctttgtatcatactcataaagcaaagtaaatctgacactttttttaaagcaaacttctttgctgtcaaaaaaataaatttggggaaatttctagcttttaaaatgtagatctgcattttactgtgattacttgtgaaagtcatattttaattttctaaattctaatttgtcattttatttcctaaagttaatttccaatgcatttattcataaaatattcattctggaatgcagtgtttgtttaaatgtaatccaatgtatatagaattagtggtggctgtagtgctgtatttattgcttataattttttttaaatgtgaacttacttttaattttctcttggttttaatctgctagtagaaaccactagttatctgtaaaaatatattcaagatattctgatcaattataacaatttatgttatgcctagagtatatctctattttttgattgtatgaaaatattaaagttatgagttaaagtttattttcactgatatttactacagtgccaaataatctaatttataaacataattcttacagtaatcaatgggatacttctcaaaattaacaaatctcttaacaaaatatatcttttgccctctttaaagtcttcagtaaaccagtaaatgaattcaataaaccaa

SEQ ID NO: 2975 - DNA, 1984 bp, Homo sapiens
  source 1..1984: mol_type = unassigned DNA; mol_type = unassigned DNA
agaacaacctctctctctccagcagagagtgtcacctcctgctttaggaccatcaagctctgctaactgaatctcatcctaattgcaggatcacattgcaaagctttcactctttcccaccttgcttgtgggtaaatctcttctgcggaatctcagaaagtaaagttccatcctgagaatatttcacaaagaatttccttaagagctggactgggtcttgacccctgaatttaagaaattcttaaagacaatgtcaaatatgatccaagagaaaatgtgatttgagactggagacaattgtgcattttatgttatacagcatatttcattttggcttaatgatggagaaaaagtgtaccctgtattttctggttctcttgcctttttttatgattcttgttacagcagaattagaagagagtcctgaggactcaattcagttgggagttactagaaataaaatcatgacagctcaatatgaatgttaccaaaagattatgcaagaccccattcaacaagcagaaggcgtttactgcaacagaacctgggatggatggctctgctggaacgatgttgcagcaggaactgaatcaatgcagctctgccctgattactttcaggactttgatccatcagaaaaagttacaaagatctgtgaccaagatggaaactggtttagacatccagcaagcaacagaacatggacaaattatacccagtgtaatgttaacacccacgagaaagtgaagactgcactaaatttgttttacctgaccataattggacacggattgtctattgcatcactgcttatctcgcttggcatattcttttatttcaagagcctaagttgccaaaggattaccttacacaaaaatctgttcttctcatttgtttgtaactctgttgtaacaatcattcacctcactgcagtggccaacaaccaggccttagtagccacaaatcctgttagttgcaaagtgtcccagttcattcatctttacctgatgggctgtaattacttttggatgctctgtgaaggcatttacctacacacactcattgtggtggccgtgtttgcagagaagcaacatttaatgtggtattattttcttggctggggatttccactgattcctgcttgtatacatgccattgctagaagcttatattacaatgacaattgctggatcagttctgatacccatctcctctacattatccatggcccaatttgtgctgctttactggtgaatctttttttcttgttaaatattgtacgcgttctcatcaccaagttaaaagttacacaccaagcggaatccaatctgtacatgaaagctgtgagagctactcttatcttggtgccattgcttggcattgaatttgtgctgattccatggcgacctgaaggaaagattgcagaggaggtatatgactacatcatgcacatccttatgcacttccagggtcttttggtctctaccattttctgcttctttaatggagaggttcaagcaattctgagaagaaactggaatcaatacaaaatccaatttggaaacagcttttccaactcagaagctcttcgtagtgcgtcttacacagtgtcaacaatcagtgatggtccaggttatagtcatgactgtcctagtgaacacttaaatggaaaaagcatccatgatattgaaaatgttctcttaaaaccagaaaatttatataattgaaaatagaaggatggttgtctcactgttttgtgcttctcctaactcaaggacttggacccatgactctgtagccagaagacttcaatattaaatgactttttgaatgtcataaagaagagccttcacatgaaattagtagtgtgttgataagagtgtaacatccagctctatgtgggaaaaaagaaatcctggtttgtaatgtttgtcagtaaatactcccactatgcctgatgtgacgctactaacctgacatcacc

SEQ ID NO: 2976 - DNA, 642 bp, Homo sapiens
  source 1..642: mol_type = unassigned DNA; mol_type = unassigned DNA
agaacaacctctctctctccagcagagagtgtcacctcctgctttaggaccatcaagctctgctaactgaatctcatcctaattgcaggatcacattgcaaagctttcactctttcccaccttgcttgtgggtaaatctcttctgcggaatctcagaaagtaaagttccatcctgagaatatttcacaaagaatttccttaagagctggactggggtcctacgatgatacaccaaccacttgtgctaccatctgtcaaaactttggatggccctactttcaggtcttgacccctgaatttaagaaattcttaaagacaatgtcaaatatgatccaagagaaaatgtgatttgagactggagacaattgtgcattttatgttatacagcatatttcattttggcttaatgatggagaaaaagtgtaccctgtattttctggttctcttgcctttttttatgattcttgttacagcagaattagaagagagtcctgaggactcaattcagttgggagttactagaaataaaatcatgacagctcaatatgaatgttaccaaaagattatgcaagaccccattcaacaagcagaaggcgtttactgcaacagaacctgggatggatggctctgctggaacgatgt

SEQ ID NO: 2977 - DNA, 591 bp, Homo sapiens
  source 1..591: mol_type = unassigned DNA; mol_type = unassigned DNA
agaacaacctctctctctccagcagagagtgtcacctcctgctttaggaccatcaagctctgctaactgaatctcatcctaattgcaggatcacattgcaaagctttcactctttcccaccttgcttgtgggtaaatctcttctgcggaatctcagaaagtaaagttccatcctgagaatatttcacaaagaatttccttaagagctggactgggtcttgacccctgaatttaagaaattcttaaagacaatgtcaaatatgatccaagagaaaatgtgatttgagactggagacaattgtgcatcctatagaaaacaatatttgaaagattgctaccactaaaaagaaaactactacaacttgacaagactgctgcaaacttcaatttgtcaaccacaacttgacaaggttgctataaaacaagattgctacaacttctagtttatgttatacagcatatttcattttggcttaatgatggagaaaaagtgtaccctgtattttctggttctcttgcctttttttatgattcttgttacagcagaattagaagagagtcctgaggactcaattcagttgggagttactag

SEQ ID NO: 2978 - DNA, 588 bp, Homo sapiens
  source 1..588: mol_type = unassigned DNA; mol_type = unassigned DNA
agaacaacctctctctctccagcagagagtgtcacctcctgctttaggaccatcaagctctgctaactgaatctcatcctaattgcaggatcacattgcaaagctttcactctttcccaccttgcttgtgggtaaatctcttctgcggaatctcagaaagtaaagttccatcctgagaatatttcacaaagaatttccttaagagctggactgggtgcttggtgtaaacttttggatggtaaagccttatctgccttttcgactgggacaatgggtcctacgatgatacaccaaccacttgtgctaccatctgtcaaaactttggatggccctactttcaggtcttgacccctgaatttaagaaattcttaaagacaatgtcaaatatgatccaagagaaaatgtgatttgagactggagacaattgtgcatatcgtctaataataaaaacccatactagcctatagaaaacaatatttgaaagattgctaccactaaaaagaaaactactacaacttgacaagactgctgcaaacttcaatttgtcaaccacaacttgacaaggttgctataaaacaagattgctac

SEQ ID NO: 2979 - DNA, 573 bp, Homo sapiens
  source 1..573: mol_type = unassigned DNA; mol_type = unassigned DNA
cagaacaacctctctctctccagcagagagtgtcacctcctgctttaggaccatcaagctctgctaactgaatctcatcctaattgcaggatcacattgcaaagctttcactctttcccaccttgcttgtgggtaaatctcttctgcggaatctcagaaagtaaagttccatcctgagaatatttcacaaagaatttccttaagagctggactgggtcttgacccctgaatttaagaaattcttaaagacaatgtcaaatatgatccaagagaaaatgtgatttgagactggagacaattgtgcatgtaagtattgggaaattaaattttctcatggtaaaatttaataaaaactaaaatattaacttattaattactgaattaaataaactgactcattgttttctgtctataacaacactacttttattaaaattaatacaatgattcatggtattttggttatatttttctcaagatcgtctaataataaaaacccatactagcctatagaaaacaatatttgaaagattgctaccactaaaaagaaaactactacaacttgacaagact

SEQ ID NO: 2980 - DNA, 569 bp, Homo sapiens
  source 1..569: mol_type = unassigned DNA; mol_type = unassigned DNA
agaacaacctctctctctccagcagagagtgtcacctcctgctttaggaccatcaagctctgctaactgaatctcatcctaattgcaggatcacattgcaaagctttcactctttcccaccttgcttgtgggtaaatctcttctgcggaatctcagaaagtaaagttccatcctgagaatatttcacaaagaatttccttaagagctggactggccacctcagatacttttatagatcaaggagtaaggaacagaattcaaaagacagacatggacatcagaaacaaatggccaagagttttcccagcagacagacagcatgagttgcagggcgttaggaaaaactatacagtgcttggtgtaaacttttggatggtaaagccttatctgccttttcgactgggacaatgggtcctacgatgatacaccaaccacttgtgctaccatctgtcaaaactttggatggccctactttcaggtcttgacccctgaatttaagaaattcttaaagacaatgtcaaatatgatccaagagaaaatgtgatttgagactggagacaattgtgcat

SEQ ID NO: 2981 - DNA, 729 bp, Homo sapiens
  source 1..729: mol_type = unassigned DNA; mol_type = unassigned DNA
tcactctttcccaccttgcttgtgggtaaatctcttctgcggaatctcagaaagtaaagttccatcctgagaatatttcacaaagaatttccttaagagctggactggggtcctacgatgatacaccaaccacttgtgctaccatctgtcaaaactttggatggccctactttcaggcggagtcttgctctgtcgcccaggctggagtgcagtggcgcgaccttggctcactgcaagctccacctcccgtgttcacgccattctcctgcctcagcctcccgagtagctgggactacaggcacccaccaccacgcccagctaattgtttgtatttttagtagagatggggtttctccgtgttagccaggatggtctcaatctcccgacctcgtgatccacccgccttggcctcccaaaatgctgggattacaggcgtgagccactgtacctggctgcttatagtattttgaagtgttgcttaatgaatcaattttatgaatgatcatcttatcatctctttaaaattttatagcacactgtcctatttctcagagttcaaattaggtatactcccatgtgtatgagagacacaattaatgacttgtaggtcataattaaagattcaaaagattcatttttgttaatagaatgtttacaaatacttattctcattttgctgtataatgagcagtgtctccaattaaagtaattaaaattcaaccaaatgag

SEQ ID NO: 2982 - DNA, 1652 bp, Homo sapiens
  source 1..1652: mol_type = unassigned DNA; mol_type = unassigned DNA
gcctgtccctgccttaagtgcctactggatcccgggagcctgggctggggcctgggcactgcttcctccttggcccctcaggcccttggaagcagagagagaacctcttgcagatcccaggctcgtccccagcacagcagacaccaggaaggtggccagagcctcactgagccgaaccgacggccgcccacccacccaggctggagccatggataaattccgcatgctcttccagcacttccagtcaagctcggagtcggtgatgaatggcatctgcctgctgctggctgcggtcaccgtcaagctgtactcctcctttgacttcaactgtccctgcctggtgcactacaatgcactctacggcctgggcctgctgctgacgcccccgctcgccctgtttctctgcggcctcctcgccaaccggcagtctgtggtgatggtcgaggagtggcgccggcccgcagggcaccggaggaaggacccaggcatcatcaggtacatgtgctcctctgtgctgcagagggcgctggccgcccccctggtctggatcctgctggccctccttgacgggaagtgcttcgtgtgtgccttcagcagctctgtggaccctgagaagtttctggactttgccaacatgacccccagccaggtacagctcttcctggccaaggttccctgcaaggaggatgagctggtcagggatagccctgctcggaaggcagtgtctcgctacctgcggtgcctgtcacaggccatcggctggagcgtcaccctgctgctgatcatcgcggccttcctggcccgctgcctgaggccctgcttcgaccagacagtcttcctgcagcgcagatactggagcaactacgtggacctggagcagaagctcttcgacgagacctgctgtgagcatgcgcgggacttcgcgcaccgctgcgtgctgcacttctttgccagcatgcggagtgagctgcaggcgcgggggctgcgccggggcaatgcaggcaggagactcgagctccccgcagtgcctgagcccccagaaggcctggatagtggaagtgggaaggcccacctgcgcgcaatctccagccgggagcaggtggaccgcctcctaagcacgtggtactccagcaagccgccgctggacctggctgcatcccccgggctctgcgggggtggccttagccaccgcgcccctaccttggcactgggcacgaggctgtcacaacacaccgacgtgtagggtcctggccaggcttgaagcggcagtgttcgcaggtgaaatgccgcgctgacaaagttctggagtctttccaggccgtggggaccccacggcaggcaccctaagtcttgttagcctcctttttaaagtagcccaatctctgcctagtttctgggtgtggcctccagcgcgcttcacaaactttaatgtggactcggttcaccgagggccttgttaaatacaggttcagacagtgtagccaggaccgagtctgagattctgcattttaaacaagctcctggaggctgatgtgcttttggtcagtgaaccaaactttgagtagcaagaatctaagtaaatctgccatgggttctgggttctagatgtcaattctaaataataataatgaccttagtctgctgcctcgata

SEQ ID NO: 2983 - DNA, 9243 bp, Homo sapiens
  source 1..9243: mol_type = unassigned DNA; mol_type = unassigned DNA
gacaaggacagggaggcacgcgcccagatcgcgctccgagtcgacgagggggctcgtgcaggtcccggcgcgcgcgtggggagcggcccgggggcgccgagggagccggcggcagcgaggatgccggcacggggacgcggctgcctgctgggggtgtgagcgagaggctgagcgctgcccgctcggcgcatccattccgcaccgccccctccctgcgggcctcggaggaagccccccgcgctgtgcggaggcgcctcggctgccgggctgcggagccccggcccagcaagagggaaaagatgccgttccaccatgtgaccgccggcttgttgtacaaggggaattacctcaaccgatcgctctctgctggcagtgacagcgaacagctggctaatatctccgtggaggagctcgatgaaatccgagaggcctttcgggttctggaccgggatgggaacggcttcatctccaagcaggagctgggcatggccatgcgctctttggggtacatgccaagcgaggtggagctggccatcatcatgcagcgcttggacatggacggggatggccaggtggattttgatgaattcatgaccattcttggccccaaactggtgtcttcagaaggtcgcgatggttttcttgggaacacgatagacagcatattctggcagtttgacatgcaaaggataactctggaagagttgaagcacattctctatcatgccttccgagaccacctaacgatgaaggacattgagaacatcattatcaatgaggaagagagcctgaatgagacctcggggaactgccaaacagagtttgaaggagtgcattcccagaagcagaacagacagacctgcgtccggaagagcctcatatgcgcctttgctatggccttcatcatcagtgtcatgctgattgcagccaaccagatactccggagcggcatggagtagcagcctcccgccagccacactgtgttgcagctcaccgcgcatgtgcatgccgtgcgggcagactcttcctccacacagcagacacggacctatggactatggatggatgcggacgatggaaccgttcagtaaagaacccaaggttgagtgcaactggggttgcacttcagcttcatctccttggcagggacactaaagggctgtcttcagtgctttaatggttttgttttctaatgcaataaatcgccaggatttccaaattattgcttcaaccatcagtcataactctagagaaaaacttcatcttcatctcggaattccagcagccatccaggtataatggtgagagagcaagagagaggcatgaacacacagtcacctccactccccattctttcaacccaagggtcaacaggagactctctgctgaggtcaaccctcagttccaagaggctgacttcagggttgccacagaagagggggctttccatcccaccctggcttccttcctccacccagtggagacccccccaaggcatgaggggaaagccattaagtggggtgcagccctggcggtcttcagctgcacccctcaccgcttccgttcttactgccttttctagaggactgccattggtagagctggggtgctctcagtttccgtcggcacttggctttctgttcctagagcccatcccgcaccagcattttggaacctgcagagagcctttctcccagctttgccgcctgtgctgccattagagaaaaaaagaagcataatcgtgggcatctctataacatagacagatatatatatttggcttcttcgtgtgtgatgtcattcttccctaatcgcttacacctaatataagcttgtcctccctcccacactcatccctgcttctttggggcaggggtgaggcaggttgaggggggaggggactgggactggcggtgaggttttgatacccacacccagccatctggagtcatggagacccaccacgtctctatgccggatgacctttgtaagttaaggtccttgtgcatcttacctttcccttaccttggagtttgctttgttagtcttccccagctaaaaagagaaatgcaatccaaaatggaaagatggagagatcaaacgactgtattttcacataagatcttctggccttcagattctgcaactgactcattttcaggaggttgggggaaaagatgtttatgagtttagccaacagaacaggtaatttactcctgcctgcagaatacttttcgttggggaagagaactgaatccaaggatctgttttcaacaccattccaagtctgtaatttcctgacttttcctagatgtcagccactactatgaattcaagcttgtgtagtcagattagccagtaatctctagatgtaatagttccctttgtacttttccaagctcaggtctttattttgtaatggaattaccttgctcctacttcttttgattacatcctaaaactacatgcttccccccttccagtagcgagccaccagaagctttcttgtctctatgcagtgggtaggattttttggtgcgttgtgtgttcctgatctccctccctgtcttcctgctcagctttctccctactgccttttcagacttggagcacccaaggtctccaatgaaagttttctcattcacctctgcaagtgctactggcaacagcctgagggcagctgtagaaactttccctctgtgggagactatgaatattcctgatgagcacaagtaaaactaaggcttcagccataatatggaggagggagcagatgtaagctcccaagagcctgggggatcacaggtccctctgcaaaacttcctggagttcagcccagcaaggccagaccaaggaggcagcaacctgcctttcccccttacctgccctgctgcctgcacactgcatgcctgccccttctgctgctcctgttggctgactcaccactgtccccttaggattggaattctcaactagaaccggtccaaatgcagaatattaatacatcgaacaacttcatccttaatctctgccctgggcagtttgccctctcccatctggacttagatgggagggcatagcagatcttgaagggatatactttcctgtttttccctgacccccgaaccacccaaccacatccataggggtgcaggaccctaagtagactgggtagaaaccccagggatgattcttcaaagccccctcctccatgagaggggactgaaatgctgcagctgaggctggtcttcagggcagaaaatgagtacttctttgaaggtggcttttctgcgagttcttctgcctcctgctggagaacagagacccttcaagaggtgagggttagatttcattggcagagagattagccactgtgcaggagtagggaggaaaaggagttctggagaggcgccgccatcctgttttctggaaaggctgcaggattcctttcctaacggtgaccttcttcttgctcccagtgacctggaagcaagcccaccctccccaggggaaaatctaggagaatgcattcctctgcagactgctagagagagatggcaagaaggaagacacagaattctttctgacagcctaggagttatcttcccactgtggtaaccccccatgtggcacccagggactgaaggacacagtgcgtggagacggccctgagctagcggcattccttagacttcaggagctcagagtttgtcccggtgacttgcaccctggctgctttgcttggacagtttgtcttgggtatagggaagccttccttgtcaggcagccaactcccagccctgttcacacaaattttatgctagggccccatgccagtcagtgtccccatcatggtggctatgaagctcacggctgaagattccagaaggtcctggtctcccatgcccaagggatgccatgtagccccagctggaagtgacttccgcaggaattgagagggaatagctcacccctcattctgtcctccggacttaggaaccagtgaccttggctgcccaactgtgtggaggctgagtgattgacaaacacaggttggctcattcttgctgcaagagcaggtaccccccgccgcccccctggaaagcacaagtgatgagcaagaaggcattttccttgggagagaaggggaaatggaccctgacccccttgatccccaaagaagctgcgccccacctttccagatacccacaaagcccccagacagaatctagcatcgggactattagcaatggcttccagaatgtgcttgggtcccacgtgactgatctgacaaaaaaaaaagagggatattaccatggcaacccttgcattccaccctgagtttgccaaggcacacaaaaatagggaacattttcttaaagaacactccaattcagcctgagtgcaacctgactctctgcatctgtatcctgctgggagaggcaattacccttaaagaatctgggtggtatctctgcctttttgtctggcatttgaacttgtccttctatttactcaggagagcaggagctacctgtaagccctggtatctccccatccctactcccagccccttctcccagggtccagagccaggaccccttaatctaggtaaattgacagaaatatcatcttggaaggcaaacaagatattaagcctccaatctttaaaagtatcggtttgcctgttgagcacactcctgcaagccaaacacgtgaactttggtgaactgaggtttaggtgtggtcttaggcaaacccagtggtttcagaaatgtctgggtgttttatttgcagagaacaagatgtgtcttatgagtcttctttctcaatacctgccctgtctcaaatctcacttgacaaatggtctacgatcttgcagttatccaaaagagcctatgaaaaatggacagctgcttttgacaataatgcccctcccaacttcccattcatagaatcataaagcgatatgtttcagaactgagagagaaaagtttaccttttattccaaatgcctcgtactcggtttaagtccagactcaggtcataaatcaaagacagttttgcacgttgctcttcacctaaatctagcagtttccctgaggccctatgagggcatggacagaaaatgaaggatgcaaccacccaggacagctccctggtttgggctggcctggccacgtgtggtcacatgtcctgggatctgtgtttactgtgtccttgctctccttccttgcagaagctgctaagctctgctcctcctaactgcaggtctcaaaccctattgggtcattttgccacactatttctccaaaggcccatagtcattacattttttaccatttcaccaagataacagggggggtctggaattcccctgctaggaagggccccttttcctatatcaccgtgatggtacagatgaactgagatgaaacttttagacttcagcacgtcacacatcctggttgtataaccaggaggtctgcagagctgcaacccctgaagaacatctgtcttaaaagacctcaaatcagaacattctcattggcctcttcagtgatccccatggagctaagagtccgtaacctaaaggccttaccatagccatcttccctccacacctgattgctcaactgccccagaaggggagaatctatctgaaatagaaaagaagcattaaggaccaggtgcggtggctcacacctataatcccagcactttgggaggccaaggcaggtggatcacttaagatcaggagttcaagaccagcctggccaacgtggtgaaaccccatctctactaaaaaaaaaaaatacaaaaattagccaagcatggtgtcgggcacctgtaatcctagctactctggaggctgaggagggagaatcacttgaaccctggaggcggaggctgcagtgagctgagatcgcgccactgcactccagcctgggcaacagagcaaaacttcatctcaaaaaataattttaaaaaagaaacattattcaccagctaagacttttcaatttaaattatttaaagtgacagcaacatagaggagaatttgggctgcctcttaccgacccagtctccatgataatttgagtgtcacaactgttcagcttcacttcatacttgctttgactaagtcactcgggattgtcctcaattttttggccctgccataaataggtgtatgttagtccgttttgcattgctataaaggaataccttaacactgggtaatttataaagaaaagaggtttatttggctcgcagttctgcaggctgtttgagcaaggtatcaacatctgcttggcttctggtgagacctcagaaagctttgacccatggtggaaggtgaagggggagcaggcacgtcacacagcaagaacaggagcaagagagaggagaagaggtgccagtctccttttcttaacaacccgcaattgcatgaactaataaagtaagaattcactcattactacagggagggcaccgagtcattcatgaggaatctgtccctatgacccaaatatctcccagcaggccccacctccagcactggagatcaacatgaaatttggggggaacaaatatccagcctctatgattggtttggagcaatgagatcaattacaccaacaagccaagcatttctcttagtatcctatggtcattgctaatgcatatggtcattttgacagctgtggtttctccttcatattcatttgggactcttcatagggtctcgagagacatgacaatactgttcaaaacgtctccaaggcaaaattaattttattccgttgactggaaatatatcacaaagaatgaggtttttccagtcccacccacaagacagtcctctgaaagtggaaaagcttgcccggccacctgcccctaccctgaccttggggtagttcatcagttgagcacaacccccatgccgggcatagactcacccatctcttttcctcaggtgtgatgggttggctttcaaactagtgtttctcgcactgttagaagttattgtccaagtggaaaggatgcagaggctggaattttccagtgggatagaagagcaggctaattaggaaggaatattccagggaatgcaaggtgcaactgcgatattgctccatccctggacctgagggagacaaagaaagttcttaaagggctgcagatgctgtcctctgaaggtcttctctggatcgctggcctactttggaaacatgcaggccattgagtgccatggggctgcccatcagtctgatccacacgaaaggctctgtgcatttcaagagcaggctggtagctcgccattcctgggaggatgctgacatctgtcaagcccagaatgcctctctcagggctctcagacctgttaaactgaggccaggagagcagaagaaagaactcaaagtgtggacggtactaccagctggagaaagcccaggagccaggactcttccacccactatctaggttatgttgagtgacattcctccctggcttcaggtttctctaaagccagaggaaaagtaaaccagacaagccctcccatctattttgtctgaaacaagatggagtgaatgctccctactgagagggtctggatttcacccatgaattgcactaggaactgggagctcctttttgaacacaagtcccaagaggcagttgtgataaagtctctcttttggtgtccgctgtctgtaaatgaaacaatgcaaattggtgtatgttaaatgtgtcacagcttgcaggcaagaggttttgtttattctctaaggacttgctgactcgagggagcatcaaagatgagctttctgtctgtcttggcaagtgtgaaaataaagggagtcagtcacctccccaaaggtcatgtgaatcagaattcaggagaaagttggaggaaacaatggcagattccaagaagagatgcttgtttctccatttgagaaagccttactgaaagctactgaataaagagcacaatttccagttatttctttctttgcttttttttttttctggccactataacagcacttccagtatatgttgatagtagcttgtaattattcctaataccccagaaagaagagagtcgtgatctttggtgattgtgaggaattagattaacagtcgcgggggaccggctacctgcgacagccctttaaatggctaatgagggatgctgagtgctgagcggtgcctgcttttgatgtggcccacccatgaccagggagagagggcaggaagagagcagctgcaggatccacaagtctctaacccttctgccccaggcaacataaaaccctagattcttgttctttttccctcttcctaaagtagactgacgtcccagtaattgtttttctaacaagccctgttgttctccctgggaaagacctagattggccaagaaaggatcctgtcagctcctggtggagagttgcacaagccagtggctctcaactctctccaaggaaaattaaagcatattttctctttcttagctcaaaatcagctttcaggggtccttattggggtctgattttcttccccagttctgaatccaggaagaagctttttctccaaggaccaaccaaaaacaatgactttggagaaaaattagactcagaaagtctgtccaggcattgggttggtgaactgtcaactgttggatggggaggaggggtcgctgtgatcgtagcggtcattagacttgggacgtgagttgtctctcaaagcacagtagtaaatgactgtattttgtatattgcccccaatatgttgggtgtaaatagaagcacagctggggattgatcatggccaggacgattggagcttggcagctctcatatccagaataagccactaagacggaactcatcaatcaccatcttcccatttacctcattagcatcccattttctctcattcagtattagttgatgatttctgctattaagtgatgagaaagtcagcagactagtcaaaaaagaatctttatataaaatgtacatattaatataaattaacttagcatgcaacttaccgatcaaatgaagtatatattattaatatgttatcttagtgtataaaggaaaactgccatatttaccagatgttttctttaaccgaacttgtctgtaaatatataatctgtataaaaagagtctaatttaccattatttatgcaatagaaaaaataaaagtttttttttcttttga

SEQ ID NO: 2984 - DNA, 9459 bp, Homo sapiens
  source 1..9459: mol_type = unassigned DNA; mol_type = unassigned DNA
aagagaataaaagctggctccccgagcccgctggggaagctcgctggggtgctatccgcttgagtttgtgtttttttctttcctgcttcttaataaagcttactgcttactctgggtccgcgccacctttaaagctcacggccgcggtctgcgtcttcgttcttgaagtcagcaagaccgcaagcccaccgggaggagcagacgactccggacgcgccatctttaagagctgtaacactcaccgcgaggtccgtggttttattcttaaagtcggcgagaccaacaacccagcagaaggaataaattccgcacacagagtctcagtgccttcgctgacgttcctttgatgagcttctaactctctctgagaacatcgccctggacccccgatgcggctgccagagcaacccggagaggggaagcccgagaatgagaaaaagggggacggaggagccctcggagggggagaggagccgccgaggagccaggcccccgacttccccacctgggaaaagatgccgttccaccatgtgaccgccggcttgttgtacaaggggaattacctcaaccgatcgctctctgctggcagtgacagcgaacagctggctaatatctccgtggaggagctcgatgaaatccgagaggcctttcgggttctggaccgggatgggaacggcttcatctccaagcaggagctgggcatggccatgcgctctttggggtacatgccaagcgaggtggagctggccatcatcatgcagcgcttggacatggacggggatggccaggtggattttgatgaattcatgaccattcttggccccaaactggtgtcttcagaaggtcgcgatggttttcttgggaacacgatagacagcatattctggcagtttgacatgcaaaggataactctggaagagttgaagcacattctctatcatgccttccgagaccacctaacgatgaaggacattgagaacatcattatcaatgaggaagagagcctgaatgagacctcggggaactgccaaacagagtttgaaggagtgcattcccagaagcagaacagacagacctgcgtccggaagagcctcatatgcgcctttgctatggccttcatcatcagtgtcatgctgattgcagccaaccagatactccggagcggcatggagtagcagcctcccgccagccacactgtgttgcagctcaccgcgcatgtgcatgccgtgcgggcagactcttcctccacacagcagacacggacctatggactatggatggatgcggacgatggaaccgttcagtaaagaacccaaggttgagtgcaactggggttgcacttcagcttcatctccttggcagggacactaaagggctgtcttcagtgctttaatggttttgttttctaatgcaataaatcgccaggatttccaaattattgcttcaaccatcagtcataactctagagaaaaacttcatcttcatctcggaattccagcagccatccaggtataatggtgagagagcaagagagaggcatgaacacacagtcacctccactccccattctttcaacccaagggtcaacaggagactctctgctgaggtcaaccctcagttccaagaggctgacttcagggttgccacagaagagggggctttccatcccaccctggcttccttcctccacccagtggagacccccccaaggcatgaggggaaagccattaagtggggtgcagccctggcggtcttcagctgcacccctcaccgcttccgttcttactgccttttctagaggactgccattggtagagctggggtgctctcagtttccgtcggcacttggctttctgttcctagagcccatcccgcaccagcattttggaacctgcagagagcctttctcccagctttgccgcctgtgctgccattagagaaaaaaagaagcataatcgtgggcatctctataacatagacagatatatatatttggcttcttcgtgtgtgatgtcattcttccctaatcgcttacacctaatataagcttgtcctccctcccacactcatccctgcttctttggggcaggggtgaggcaggttgaggggggaggggactgggactggcggtgaggttttgatacccacacccagccatctggagtcatggagacccaccacgtctctatgccggatgacctttgtaagttaaggtccttgtgcatcttacctttcccttaccttggagtttgctttgttagtcttccccagctaaaaagagaaatgcaatccaaaatggaaagatggagagatcaaacgactgtattttcacataagatcttctggccttcagattctgcaactgactcattttcaggaggttgggggaaaagatgtttatgagtttagccaacagaacaggtaatttactcctgcctgcagaatacttttcgttggggaagagaactgaatccaaggatctgttttcaacaccattccaagtctgtaatttcctgacttttcctagatgtcagccactactatgaattcaagcttgtgtagtcagattagccagtaatctctagatgtaatagttccctttgtacttttccaagctcaggtctttattttgtaatggaattaccttgctcctacttcttttgattacatcctaaaactacatgcttccccccttccagtagcgagccaccagaagctttcttgtctctatgcagtgggtaggattttttggtgcgttgtgtgttcctgatctccctccctgtcttcctgctcagctttctccctactgccttttcagacttggagcacccaaggtctccaatgaaagttttctcattcacctctgcaagtgctactggcaacagcctgagggcagctgtagaaactttccctctgtgggagactatgaatattcctgatgagcacaagtaaaactaaggcttcagccataatatggaggagggagcagatgtaagctcccaagagcctgggggatcacaggtccctctgcaaaacttcctggagttcagcccagcaaggccagaccaaggaggcagcaacctgcctttcccccttacctgccctgctgcctgcacactgcatgcctgccccttctgctgctcctgttggctgactcaccactgtccccttaggattggaattctcaactagaaccggtccaaatgcagaatattaatacatcgaacaacttcatccttaatctctgccctgggcagtttgccctctcccatctggacttagatgggagggcatagcagatcttgaagggatatactttcctgtttttccctgacccccgaaccacccaaccacatccataggggtgcaggaccctaagtagactgggtagaaaccccagggatgattcttcaaagccccctcctccatgagaggggactgaaatgctgcagctgaggctggtcttcagggcagaaaatgagtacttctttgaaggtggcttttctgcgagttcttctgcctcctgctggagaacagagacccttcaagaggtgagggttagatttcattggcagagagattagccactgtgcaggagtagggaggaaaaggagttctggagaggcgccgccatcctgttttctggaaaggctgcaggattcctttcctaacggtgaccttcttcttgctcccagtgacctggaagcaagcccaccctccccaggggaaaatctaggagaatgcattcctctgcagactgctagagagagatggcaagaaggaagacacagaattctttctgacagcctaggagttatcttcccactgtggtaaccccccatgtggcacccagggactgaaggacacagtgcgtggagacggccctgagctagcggcattccttagacttcaggagctcagagtttgtcccggtgacttgcaccctggctgctttgcttggacagtttgtcttgggtatagggaagccttccttgtcaggcagccaactcccagccctgttcacacaaattttatgctagggccccatgccagtcagtgtccccatcatggtggctatgaagctcacggctgaagattccagaaggtcctggtctcccatgcccaagggatgccatgtagccccagctggaagtgacttccgcaggaattgagagggaatagctcacccctcattctgtcctccggacttaggaaccagtgaccttggctgcccaactgtgtggaggctgagtgattgacaaacacaggttggctcattcttgctgcaagagcaggtaccccccgccgcccccctggaaagcacaagtgatgagcaagaaggcattttccttgggagagaaggggaaatggaccctgacccccttgatccccaaagaagctgcgccccacctttccagatacccacaaagcccccagacagaatctagcatcgggactattagcaatggcttccagaatgtgcttgggtcccacgtgactgatctgacaaaaaaaaaagagggatattaccatggcaacccttgcattccaccctgagtttgccaaggcacacaaaaatagggaacattttcttaaagaacactccaattcagcctgagtgcaacctgactctctgcatctgtatcctgctgggagaggcaattacccttaaagaatctgggtggtatctctgcctttttgtctggcatttgaacttgtccttctatttactcaggagagcaggagctacctgtaagccctggtatctccccatccctactcccagccccttctcccagggtccagagccaggaccccttaatctaggtaaattgacagaaatatcatcttggaaggcaaacaagatattaagcctccaatctttaaaagtatcggtttgcctgttgagcacactcctgcaagccaaacacgtgaactttggtgaactgaggtttaggtgtggtcttaggcaaacccagtggtttcagaaatgtctgggtgttttatttgcagagaacaagatgtgtcttatgagtcttctttctcaatacctgccctgtctcaaatctcacttgacaaatggtctacgatcttgcagttatccaaaagagcctatgaaaaatggacagctgcttttgacaataatgcccctcccaacttcccattcatagaatcataaagcgatatgtttcagaactgagagagaaaagtttaccttttattccaaatgcctcgtactcggtttaagtccagactcaggtcataaatcaaagacagttttgcacgttgctcttcacctaaatctagcagtttccctgaggccctatgagggcatggacagaaaatgaaggatgcaaccacccaggacagctccctggtttgggctggcctggccacgtgtggtcacatgtcctgggatctgtgtttactgtgtccttgctctccttccttgcagaagctgctaagctctgctcctcctaactgcaggtctcaaaccctattgggtcattttgccacactatttctccaaaggcccatagtcattacattttttaccatttcaccaagataacagggggggtctggaattcccctgctaggaagggccccttttcctatatcaccgtgatggtacagatgaactgagatgaaacttttagacttcagcacgtcacacatcctggttgtataaccaggaggtctgcagagctgcaacccctgaagaacatctgtcttaaaagacctcaaatcagaacattctcattggcctcttcagtgatccccatggagctaagagtccgtaacctaaaggccttaccatagccatcttccctccacacctgattgctcaactgccccagaaggggagaatctatctgaaatagaaaagaagcattaaggaccaggtgcggtggctcacacctataatcccagcactttgggaggccaaggcaggtggatcacttaagatcaggagttcaagaccagcctggccaacgtggtgaaaccccatctctactaaaaaaaaaaaatacaaaaattagccaagcatggtgtcgggcacctgtaatcctagctactctggaggctgaggagggagaatcacttgaaccctggaggcggaggctgcagtgagctgagatcgcgccactgcactccagcctgggcaacagagcaaaacttcatctcaaaaaataattttaaaaaagaaacattattcaccagctaagacttttcaatttaaattatttaaagtgacagcaacatagaggagaatttgggctgcctcttaccgacccagtctccatgataatttgagtgtcacaactgttcagcttcacttcatacttgctttgactaagtcactcgggattgtcctcaattttttggccctgccataaataggtgtatgttagtccgttttgcattgctataaaggaataccttaacactgggtaatttataaagaaaagaggtttatttggctcgcagttctgcaggctgtttgagcaaggtatcaacatctgcttggcttctggtgagacctcagaaagctttgacccatggtggaaggtgaagggggagcaggcacgtcacacagcaagaacaggagcaagagagaggagaagaggtgccagtctccttttcttaacaacccgcaattgcatgaactaataaagtaagaattcactcattactacagggagggcaccgagtcattcatgaggaatctgtccctatgacccaaatatctcccagcaggccccacctccagcactggagatcaacatgaaatttggggggaacaaatatccagcctctatgattggtttggagcaatgagatcaattacaccaacaagccaagcatttctcttagtatcctatggtcattgctaatgcatatggtcattttgacagctgtggtttctccttcatattcatttgggactcttcatagggtctcgagagacatgacaatactgttcaaaacgtctccaaggcaaaattaattttattccgttgactggaaatatatcacaaagaatgaggtttttccagtcccacccacaagacagtcctctgaaagtggaaaagcttgcccggccacctgcccctaccctgaccttggggtagttcatcagttgagcacaacccccatgccgggcatagactcacccatctcttttcctcaggtgtgatgggttggctttcaaactagtgtttctcgcactgttagaagttattgtccaagtggaaaggatgcagaggctggaattttccagtgggatagaagagcaggctaattaggaaggaatattccagggaatgcaaggtgcaactgcgatattgctccatccctggacctgagggagacaaagaaagttcttaaagggctgcagatgctgtcctctgaaggtcttctctggatcgctggcctactttggaaacatgcaggccattgagtgccatggggctgcccatcagtctgatccacacgaaaggctctgtgcatttcaagagcaggctggtagctcgccattcctgggaggatgctgacatctgtcaagcccagaatgcctctctcagggctctcagacctgttaaactgaggccaggagagcagaagaaagaactcaaagtgtggacggtactaccagctggagaaagcccaggagccaggactcttccacccactatctaggttatgttgagtgacattcctccctggcttcaggtttctctaaagccagaggaaaagtaaaccagacaagccctcccatctattttgtctgaaacaagatggagtgaatgctccctactgagagggtctggatttcacccatgaattgcactaggaactgggagctcctttttgaacacaagtcccaagaggcagttgtgataaagtctctcttttggtgtccgctgtctgtaaatgaaacaatgcaaattggtgtatgttaaatgtgtcacagcttgcaggcaagaggttttgtttattctctaaggacttgctgactcgagggagcatcaaagatgagctttctgtctgtcttggcaagtgtgaaaataaagggagtcagtcacctccccaaaggtcatgtgaatcagaattcaggagaaagttggaggaaacaatggcagattccaagaagagatgcttgtttctccatttgagaaagccttactgaaagctactgaataaagagcacaatttccagttatttctttctttgcttttttttttttctggccactataacagcacttccagtatatgttgatagtagcttgtaattattcctaataccccagaaagaagagagtcgtgatctttggtgattgtgaggaattagattaacagtcgcgggggaccggctacctgcgacagccctttaaatggctaatgagggatgctgagtgctgagcggtgcctgcttttgatgtggcccacccatgaccagggagagagggcaggaagagagcagctgcaggatccacaagtctctaacccttctgccccaggcaacataaaaccctagattcttgttctttttccctcttcctaaagtagactgacgtcccagtaattgtttttctaacaagccctgttgttctccctgggaaagacctagattggccaagaaaggatcctgtcagctcctggtggagagttgcacaagccagtggctctcaactctctccaaggaaaattaaagcatattttctctttcttagctcaaaatcagctttcaggggtccttattggggtctgattttcttccccagttctgaatccaggaagaagctttttctccaaggaccaaccaaaaacaatgactttggagaaaaattagactcagaaagtctgtccaggcattgggttggtgaactgtcaactgttggatggggaggaggggtcgctgtgatcgtagcggtcattagacttgggacgtgagttgtctctcaaagcacagtagtaaatgactgtattttgtatattgcccccaatatgttgggtgtaaatagaagcacagctggggattgatcatggccaggacgattggagcttggcagctctcatatccagaataagccactaagacggaactcatcaatcaccatcttcccatttacctcattagcatcccattttctctcattcagtattagttgatgatttctgctattaagtgatgagaaagtcagcagactagtcaaaaaagaatctttatataaaatgtacatattaatataaattaacttagcatgcaacttaccgatcaaatgaagtatatattattaatatgttatcttagtgtataaaggaaaactgccatatttaccagatgttttctttaaccgaacttgtctgtaaatatataatctgtataaaaagagtctaatttaccattatttatgcaatagaaaaaataaaagtttttttttcttttga

SEQ ID NO: 2985 - DNA, 9189 bp, Homo sapiens
  source 1..9189: mol_type = unassigned DNA; mol_type = unassigned DNA
tcccccgagatcagcaggagcttactgcttactctgggtccgcgccacctttaaagctcacggccgcggtctgcgtcttcgttcttgaagtcagcaagaccgcaagcccaccgggaggagcagacgactccggacgcgccatctttaagagctgtaacactcaccgcgaggtccgtggttttattcttaaagtcggcgagaccaacaacccagcagaaggaataaattccgcacacagggaaaagatgccgttccaccatgtgaccgccggcttgttgtacaaggggaattacctcaaccgatcgctctctgctggcagtgacagcgaacagctggctaatatctccgtggaggagctcgatgaaatccgagaggcctttcgggttctggaccgggatgggaacggcttcatctccaagcaggagctgggcatggccatgcgctctttggggtacatgccaagcgaggtggagctggccatcatcatgcagcgcttggacatggacggggatggccaggtggattttgatgaattcatgaccattcttggccccaaactggtgtcttcagaaggtcgcgatggttttcttgggaacacgatagacagcatattctggcagtttgacatgcaaaggataactctggaagagttgaagcacattctctatcatgccttccgagaccacctaacgatgaaggacattgagaacatcattatcaatgaggaagagagcctgaatgagacctcggggaactgccaaacagagtttgaaggagtgcattcccagaagcagaacagacagacctgcgtccggaagagcctcatatgcgcctttgctatggccttcatcatcagtgtcatgctgattgcagccaaccagatactccggagcggcatggagtagcagcctcccgccagccacactgtgttgcagctcaccgcgcatgtgcatgccgtgcgggcagactcttcctccacacagcagacacggacctatggactatggatggatgcggacgatggaaccgttcagtaaagaacccaaggttgagtgcaactggggttgcacttcagcttcatctccttggcagggacactaaagggctgtcttcagtgctttaatggttttgttttctaatgcaataaatcgccaggatttccaaattattgcttcaaccatcagtcataactctagagaaaaacttcatcttcatctcggaattccagcagccatccaggtataatggtgagagagcaagagagaggcatgaacacacagtcacctccactccccattctttcaacccaagggtcaacaggagactctctgctgaggtcaaccctcagttccaagaggctgacttcagggttgccacagaagagggggctttccatcccaccctggcttccttcctccacccagtggagacccccccaaggcatgaggggaaagccattaagtggggtgcagccctggcggtcttcagctgcacccctcaccgcttccgttcttactgccttttctagaggactgccattggtagagctggggtgctctcagtttccgtcggcacttggctttctgttcctagagcccatcccgcaccagcattttggaacctgcagagagcctttctcccagctttgccgcctgtgctgccattagagaaaaaaagaagcataatcgtgggcatctctataacatagacagatatatatatttggcttcttcgtgtgtgatgtcattcttccctaatcgcttacacctaatataagcttgtcctccctcccacactcatccctgcttctttggggcaggggtgaggcaggttgaggggggaggggactgggactggcggtgaggttttgatacccacacccagccatctggagtcatggagacccaccacgtctctatgccggatgacctttgtaagttaaggtccttgtgcatcttacctttcccttaccttggagtttgctttgttagtcttccccagctaaaaagagaaatgcaatccaaaatggaaagatggagagatcaaacgactgtattttcacataagatcttctggccttcagattctgcaactgactcattttcaggaggttgggggaaaagatgtttatgagtttagccaacagaacaggtaatttactcctgcctgcagaatacttttcgttggggaagagaactgaatccaaggatctgttttcaacaccattccaagtctgtaatttcctgacttttcctagatgtcagccactactatgaattcaagcttgtgtagtcagattagccagtaatctctagatgtaatagttccctttgtacttttccaagctcaggtctttattttgtaatggaattaccttgctcctacttcttttgattacatcctaaaactacatgcttccccccttccagtagcgagccaccagaagctttcttgtctctatgcagtgggtaggattttttggtgcgttgtgtgttcctgatctccctccctgtcttcctgctcagctttctccctactgccttttcagacttggagcacccaaggtctccaatgaaagttttctcattcacctctgcaagtgctactggcaacagcctgagggcagctgtagaaactttccctctgtgggagactatgaatattcctgatgagcacaagtaaaactaaggcttcagccataatatggaggagggagcagatgtaagctcccaagagcctgggggatcacaggtccctctgcaaaacttcctggagttcagcccagcaaggccagaccaaggaggcagcaacctgcctttcccccttacctgccctgctgcctgcacactgcatgcctgccccttctgctgctcctgttggctgactcaccactgtccccttaggattggaattctcaactagaaccggtccaaatgcagaatattaatacatcgaacaacttcatccttaatctctgccctgggcagtttgccctctcccatctggacttagatgggagggcatagcagatcttgaagggatatactttcctgtttttccctgacccccgaaccacccaaccacatccataggggtgcaggaccctaagtagactgggtagaaaccccagggatgattcttcaaagccccctcctccatgagaggggactgaaatgctgcagctgaggctggtcttcagggcagaaaatgagtacttctttgaaggtggcttttctgcgagttcttctgcctcctgctggagaacagagacccttcaagaggtgagggttagatttcattggcagagagattagccactgtgcaggagtagggaggaaaaggagttctggagaggcgccgccatcctgttttctggaaaggctgcaggattcctttcctaacggtgaccttcttcttgctcccagtgacctggaagcaagcccaccctccccaggggaaaatctaggagaatgcattcctctgcagactgctagagagagatggcaagaaggaagacacagaattctttctgacagcctaggagttatcttcccactgtggtaaccccccatgtggcacccagggactgaaggacacagtgcgtggagacggccctgagctagcggcattccttagacttcaggagctcagagtttgtcccggtgacttgcaccctggctgctttgcttggacagtttgtcttgggtatagggaagccttccttgtcaggcagccaactcccagccctgttcacacaaattttatgctagggccccatgccagtcagtgtccccatcatggtggctatgaagctcacggctgaagattccagaaggtcctggtctcccatgcccaagggatgccatgtagccccagctggaagtgacttccgcaggaattgagagggaatagctcacccctcattctgtcctccggacttaggaaccagtgaccttggctgcccaactgtgtggaggctgagtgattgacaaacacaggttggctcattcttgctgcaagagcaggtaccccccgccgcccccctggaaagcacaagtgatgagcaagaaggcattttccttgggagagaaggggaaatggaccctgacccccttgatccccaaagaagctgcgccccacctttccagatacccacaaagcccccagacagaatctagcatcgggactattagcaatggcttccagaatgtgcttgggtcccacgtgactgatctgacaaaaaaaaaagagggatattaccatggcaacccttgcattccaccctgagtttgccaaggcacacaaaaatagggaacattttcttaaagaacactccaattcagcctgagtgcaacctgactctctgcatctgtatcctgctgggagaggcaattacccttaaagaatctgggtggtatctctgcctttttgtctggcatttgaacttgtccttctatttactcaggagagcaggagctacctgtaagccctggtatctccccatccctactcccagccccttctcccagggtccagagccaggaccccttaatctaggtaaattgacagaaatatcatcttggaaggcaaacaagatattaagcctccaatctttaaaagtatcggtttgcctgttgagcacactcctgcaagccaaacacgtgaactttggtgaactgaggtttaggtgtggtcttaggcaaacccagtggtttcagaaatgtctgggtgttttatttgcagagaacaagatgtgtcttatgagtcttctttctcaatacctgccctgtctcaaatctcacttgacaaatggtctacgatcttgcagttatccaaaagagcctatgaaaaatggacagctgcttttgacaataatgcccctcccaacttcccattcatagaatcataaagcgatatgtttcagaactgagagagaaaagtttaccttttattccaaatgcctcgtactcggtttaagtccagactcaggtcataaatcaaagacagttttgcacgttgctcttcacctaaatctagcagtttccctgaggccctatgagggcatggacagaaaatgaaggatgcaaccacccaggacagctccctggtttgggctggcctggccacgtgtggtcacatgtcctgggatctgtgtttactgtgtccttgctctccttccttgcagaagctgctaagctctgctcctcctaactgcaggtctcaaaccctattgggtcattttgccacactatttctccaaaggcccatagtcattacattttttaccatttcaccaagataacagggggggtctggaattcccctgctaggaagggccccttttcctatatcaccgtgatggtacagatgaactgagatgaaacttttagacttcagcacgtcacacatcctggttgtataaccaggaggtctgcagagctgcaacccctgaagaacatctgtcttaaaagacctcaaatcagaacattctcattggcctcttcagtgatccccatggagctaagagtccgtaacctaaaggccttaccatagccatcttccctccacacctgattgctcaactgccccagaaggggagaatctatctgaaatagaaaagaagcattaaggaccaggtgcggtggctcacacctataatcccagcactttgggaggccaaggcaggtggatcacttaagatcaggagttcaagaccagcctggccaacgtggtgaaaccccatctctactaaaaaaaaaaaatacaaaaattagccaagcatggtgtcgggcacctgtaatcctagctactctggaggctgaggagggagaatcacttgaaccctggaggcggaggctgcagtgagctgagatcgcgccactgcactccagcctgggcaacagagcaaaacttcatctcaaaaaataattttaaaaaagaaacattattcaccagctaagacttttcaatttaaattatttaaagtgacagcaacatagaggagaatttgggctgcctcttaccgacccagtctccatgataatttgagtgtcacaactgttcagcttcacttcatacttgctttgactaagtcactcgggattgtcctcaattttttggccctgccataaataggtgtatgttagtccgttttgcattgctataaaggaataccttaacactgggtaatttataaagaaaagaggtttatttggctcgcagttctgcaggctgtttgagcaaggtatcaacatctgcttggcttctggtgagacctcagaaagctttgacccatggtggaaggtgaagggggagcaggcacgtcacacagcaagaacaggagcaagagagaggagaagaggtgccagtctccttttcttaacaacccgcaattgcatgaactaataaagtaagaattcactcattactacagggagggcaccgagtcattcatgaggaatctgtccctatgacccaaatatctcccagcaggccccacctccagcactggagatcaacatgaaatttggggggaacaaatatccagcctctatgattggtttggagcaatgagatcaattacaccaacaagccaagcatttctcttagtatcctatggtcattgctaatgcatatggtcattttgacagctgtggtttctccttcatattcatttgggactcttcatagggtctcgagagacatgacaatactgttcaaaacgtctccaaggcaaaattaattttattccgttgactggaaatatatcacaaagaatgaggtttttccagtcccacccacaagacagtcctctgaaagtggaaaagcttgcccggccacctgcccctaccctgaccttggggtagttcatcagttgagcacaacccccatgccgggcatagactcacccatctcttttcctcaggtgtgatgggttggctttcaaactagtgtttctcgcactgttagaagttattgtccaagtggaaaggatgcagaggctggaattttccagtgggatagaagagcaggctaattaggaaggaatattccagggaatgcaaggtgcaactgcgatattgctccatccctggacctgagggagacaaagaaagttcttaaagggctgcagatgctgtcctctgaaggtcttctctggatcgctggcctactttggaaacatgcaggccattgagtgccatggggctgcccatcagtctgatccacacgaaaggctctgtgcatttcaagagcaggctggtagctcgccattcctgggaggatgctgacatctgtcaagcccagaatgcctctctcagggctctcagacctgttaaactgaggccaggagagcagaagaaagaactcaaagtgtggacggtactaccagctggagaaagcccaggagccaggactcttccacccactatctaggttatgttgagtgacattcctccctggcttcaggtttctctaaagccagaggaaaagtaaaccagacaagccctcccatctattttgtctgaaacaagatggagtgaatgctccctactgagagggtctggatttcacccatgaattgcactaggaactgggagctcctttttgaacacaagtcccaagaggcagttgtgataaagtctctcttttggtgtccgctgtctgtaaatgaaacaatgcaaattggtgtatgttaaatgtgtcacagcttgcaggcaagaggttttgtttattctctaaggacttgctgactcgagggagcatcaaagatgagctttctgtctgtcttggcaagtgtgaaaataaagggagtcagtcacctccccaaaggtcatgtgaatcagaattcaggagaaagttggaggaaacaatggcagattccaagaagagatgcttgtttctccatttgagaaagccttactgaaagctactgaataaagagcacaatttccagttatttctttctttgcttttttttttttctggccactataacagcacttccagtatatgttgatagtagcttgtaattattcctaataccccagaaagaagagagtcgtgatctttggtgattgtgaggaattagattaacagtcgcgggggaccggctacctgcgacagccctttaaatggctaatgagggatgctgagtgctgagcggtgcctgcttttgatgtggcccacccatgaccagggagagagggcaggaagagagcagctgcaggatccacaagtctctaacccttctgccccaggcaacataaaaccctagattcttgttctttttccctcttcctaaagtagactgacgtcccagtaattgtttttctaacaagccctgttgttctccctgggaaagacctagattggccaagaaaggatcctgtcagctcctggtggagagttgcacaagccagtggctctcaactctctccaaggaaaattaaagcatattttctctttcttagctcaaaatcagctttcaggggtccttattggggtctgattttcttccccagttctgaatccaggaagaagctttttctccaaggaccaaccaaaaacaatgactttggagaaaaattagactcagaaagtctgtccaggcattgggttggtgaactgtcaactgttggatggggaggaggggtcgctgtgatcgtagcggtcattagacttgggacgtgagttgtctctcaaagcacagtagtaaatgactgtattttgtatattgcccccaatatgttgggtgtaaatagaagcacagctggggattgatcatggccaggacgattggagcttggcagctctcatatccagaataagccactaagacggaactcatcaatcaccatcttcccatttacctcattagcatcccattttctctcattcagtattagttgatgatttctgctattaagtgatgagaaagtcagcagactagtcaaaaaagaatctttatataaaatgtacatattaatataaattaacttagcatgcaacttaccgatcaaatgaagtatatattattaatatgttatcttagtgtataaaggaaaactgccatatttaccagatgttttctttaaccgaacttgtctgtaaatatataatctgtataaaaagagtctaatttaccattatttatgcaatagaaaaaataaaagtttttttttcttttga

SEQ ID NO: 2986 - DNA, 777 bp, Homo sapiens
  source 1..777: mol_type = unassigned DNA; mol_type = unassigned DNA
ggtccatcattctgaggagctgcagtgccctgctccttcctgatggcttagagattctccttaactcccagccatggatcttggagaatttcccccgagatcagcaggagggaaaagatgccgttccaccatgtgaccgccggcttgttgtacaaggggaattacctcaaccgatcgctctctgctggcagtgacagcgaacagctggctaatatctccgtggaggagctcgatgaaatccgagaggcctttcgggttctggaccgggatgggaacggcttcatctccaagcaggagctgggcatggccatgcgctctttggggtacatgccaagcgaggtggagctggccatcatcatgcagcgcttggacatggacggggatggccaggtggattttgatgaattcatgaccattcttggccccaaactggtgtcttcagaaggtcgcgatggttttcttgggaacacgatagacagcatattctggcagtttgacatgcaaaggataactctggaagagttgaagcacattctctatcatgccttccgagaccacctaacgatgaaggacattgagaacatcattatcaatgaggaagagagcctgaatgagacctcggggaactgccaaacagagtttgaaggagtgcattcccagaagcagaacagacagacctgcgtccggaagagcctcatatgcgcctttgctatggccttcatcatcagtgtcatgctgattgcagccaaccagatactccggagcggcatggagtag

SEQ ID NO: 2987 - DNA, 550 bp, Homo sapiens
  source 1..550: mol_type = unassigned DNA; mol_type = unassigned DNA
gtgcctccctggacgtctccaggggcggtcacgcggaatgctggtccccgcagtttcggccattggcccctccacttcggcgccccgccttccccctgggctcaggtgtaatcgtggatctagggtgtgggcacctgggatgaagtagtgaaggcggcgggcgctaggggaaaagatgccgttccaccatgtgaccgccggcttgttgtacaaggggaattacctcaaccgatcgctctctgctggcagtgacagcgaacagctggctaatatctccgtggaggagctcgatgaaatccgagaggcctttcgggttctggaccgggatgggaacggcttcatctccaagcaggagctgggcatggccatgcgctctttggggtacatgccaagcgaggtggagctggccatcatcatgcagcgcttggacatggacggggatggccaggtggattttgatgaattcatgaccattcttggccccaaactggtgtcttcagaaggtcgcgatggttttcttgggaacacgatagacagcatattctggcag

SEQ ID NO: 2988 - DNA, 8571 bp, Homo sapiens
  source 1..8571: mol_type = unassigned DNA; mol_type = unassigned DNA
cagtttgacatgcaaaggataactctggaagagttgaagcacattctctatcatgccttccgagaccacctaacgatgaaggacattgagaacatcattatcaatgaggaagagagcctgaatgagacctcggggaactgccaaacagagtttgaaggagtgcattcccagaagcagaacagacagacctgcgtccggaagagcctcatatgcgcctttgctatggccttcatcatcagtgtcatgctgattgcagccaaccagatactccggagcggcatggagtagcagcctcccgccagccacactgtgttgcagctcaccgcgcatgtgcatgccgtgcgggcagactcttcctccacacagcagacacggacctatggactatggatggatgcggacgatggaaccgttcagtaaagaacccaaggttgagtgcaactggggttgcacttcagcttcatctccttggcagggacactaaagggctgtcttcagtgctttaatggttttgttttctaatgcaataaatcgccaggatttccaaattattgcttcaaccatcagtcataactctagagaaaaacttcatcttcatctcggaattccagcagccatccaggtataatggtgagagagcaagagagaggcatgaacacacagtcacctccactccccattctttcaacccaagggtcaacaggagactctctgctgaggtcaaccctcagttccaagaggctgacttcagggttgccacagaagagggggctttccatcccaccctggcttccttcctccacccagtggagacccccccaaggcatgaggggaaagccattaagtggggtgcagccctggcggtcttcagctgcacccctcaccgcttccgttcttactgccttttctagaggactgccattggtagagctggggtgctctcagtttccgtcggcacttggctttctgttcctagagcccatcccgcaccagcattttggaacctgcagagagcctttctcccagctttgccgcctgtgctgccattagagaaaaaaagaagcataatcgtgggcatctctataacatagacagatatatatatttggcttcttcgtgtgtgatgtcattcttccctaatcgcttacacctaatataagcttgtcctccctcccacactcatccctgcttctttggggcaggggtgaggcaggttgaggggggaggggactgggactggcggtgaggttttgatacccacacccagccatctggagtcatggagacccaccacgtctctatgccggatgacctttgtaagttaaggtccttgtgcatcttacctttcccttaccttggagtttgctttgttagtcttccccagctaaaaagagaaatgcaatccaaaatggaaagatggagagatcaaacgactgtattttcacataagatcttctggccttcagattctgcaactgactcattttcaggaggttgggggaaaagatgtttatgagtttagccaacagaacaggtaatttactcctgcctgcagaatacttttcgttggggaagagaactgaatccaaggatctgttttcaacaccattccaagtctgtaatttcctgacttttcctagatgtcagccactactatgaattcaagcttgtgtagtcagattagccagtaatctctagatgtaatagttccctttgtacttttccaagctcaggtctttattttgtaatggaattaccttgctcctacttcttttgattacatcctaaaactacatgcttccccccttccagtagcgagccaccagaagctttcttgtctctatgcagtgggtaggattttttggtgcgttgtgtgttcctgatctccctccctgtcttcctgctcagctttctccctactgccttttcagacttggagcacccaaggtctccaatgaaagttttctcattcacctctgcaagtgctactggcaacagcctgagggcagctgtagaaactttccctctgtgggagactatgaatattcctgatgagcacaagtaaaactaaggcttcagccataatatggaggagggagcagatgtaagctcccaagagcctgggggatcacaggtccctctgcaaaacttcctggagttcagcccagcaaggccagaccaaggaggcagcaacctgcctttcccccttacctgccctgctgcctgcacactgcatgcctgccccttctgctgctcctgttggctgactcaccactgtccccttaggattggaattctcaactagaaccggtccaaatgcagaatattaatacatcgaacaacttcatccttaatctctgccctgggcagtttgccctctcccatctggacttagatgggagggcatagcagatcttgaagggatatactttcctgtttttccctgacccccgaaccacccaaccacatccataggggtgcaggaccctaagtagactgggtagaaaccccagggatgattcttcaaagccccctcctccatgagaggggactgaaatgctgcagctgaggctggtcttcagggcagaaaatgagtacttctttgaaggtggcttttctgcgagttcttctgcctcctgctggagaacagagacccttcaagaggtgagggttagatttcattggcagagagattagccactgtgcaggagtagggaggaaaaggagttctggagaggcgccgccatcctgttttctggaaaggctgcaggattcctttcctaacggtgaccttcttcttgctcccagtgacctggaagcaagcccaccctccccaggggaaaatctaggagaatgcattcctctgcagactgctagagagagatggcaagaaggaagacacagaattctttctgacagcctaggagttatcttcccactgtggtaaccccccatgtggcacccagggactgaaggacacagtgcgtggagacggccctgagctagcggcattccttagacttcaggagctcagagtttgtcccggtgacttgcaccctggctgctttgcttggacagtttgtcttgggtatagggaagccttccttgtcaggcagccaactcccagccctgttcacacaaattttatgctagggccccatgccagtcagtgtccccatcatggtggctatgaagctcacggctgaagattccagaaggtcctggtctcccatgcccaagggatgccatgtagccccagctggaagtgacttccgcaggaattgagagggaatagctcacccctcattctgtcctccggacttaggaaccagtgaccttggctgcccaactgtgtggaggctgagtgattgacaaacacaggttggctcattcttgctgcaagagcaggtaccccccgccgcccccctggaaagcacaagtgatgagcaagaaggcattttccttgggagagaaggggaaatggaccctgacccccttgatccccaaagaagctgcgccccacctttccagatacccacaaagcccccagacagaatctagcatcgggactattagcaatggcttccagaatgtgcttgggtcccacgtgactgatctgacaaaaaaaaaagagggatattaccatggcaacccttgcattccaccctgagtttgccaaggcacacaaaaatagggaacattttcttaaagaacactccaattcagcctgagtgcaacctgactctctgcatctgtatcctgctgggagaggcaattacccttaaagaatctgggtggtatctctgcctttttgtctggcatttgaacttgtccttctatttactcaggagagcaggagctacctgtaagccctggtatctccccatccctactcccagccccttctcccagggtccagagccaggaccccttaatctaggtaaattgacagaaatatcatcttggaaggcaaacaagatattaagcctccaatctttaaaagtatcggtttgcctgttgagcacactcctgcaagccaaacacgtgaactttggtgaactgaggtttaggtgtggtcttaggcaaacccagtggtttcagaaatgtctgggtgttttatttgcagagaacaagatgtgtcttatgagtcttctttctcaatacctgccctgtctcaaatctcacttgacaaatggtctacgatcttgcagttatccaaaagagcctatgaaaaatggacagctgcttttgacaataatgcccctcccaacttcccattcatagaatcataaagcgatatgtttcagaactgagagagaaaagtttaccttttattccaaatgcctcgtactcggtttaagtccagactcaggtcataaatcaaagacagttttgcacgttgctcttcacctaaatctagcagtttccctgaggccctatgagggcatggacagaaaatgaaggatgcaaccacccaggacagctccctggtttgggctggcctggccacgtgtggtcacatgtcctgggatctgtgtttactgtgtccttgctctccttccttgcagaagctgctaagctctgctcctcctaactgcaggtctcaaaccctattgggtcattttgccacactatttctccaaaggcccatagtcattacattttttaccatttcaccaagataacagggggggtctggaattcccctgctaggaagggccccttttcctatatcaccgtgatggtacagatgaactgagatgaaacttttagacttcagcacgtcacacatcctggttgtataaccaggaggtctgcagagctgcaacccctgaagaacatctgtcttaaaagacctcaaatcagaacattctcattggcctcttcagtgatccccatggagctaagagtccgtaacctaaaggccttaccatagccatcttccctccacacctgattgctcaactgccccagaaggggagaatctatctgaaatagaaaagaagcattaaggaccaggtgcggtggctcacacctataatcccagcactttgggaggccaaggcaggtggatcacttaagatcaggagttcaagaccagcctggccaacgtggtgaaaccccatctctactaaaaaaaaaaaatacaaaaattagccaagcatggtgtcgggcacctgtaatcctagctactctggaggctgaggagggagaatcacttgaaccctggaggcggaggctgcagtgagctgagatcgcgccactgcactccagcctgggcaacagagcaaaacttcatctcaaaaaataattttaaaaaagaaacattattcaccagctaagacttttcaatttaaattatttaaagtgacagcaacatagaggagaatttgggctgcctcttaccgacccagtctccatgataatttgagtgtcacaactgttcagcttcacttcatacttgctttgactaagtcactcgggattgtcctcaattttttggccctgccataaataggtgtatgttagtccgttttgcattgctataaaggaataccttaacactgggtaatttataaagaaaagaggtttatttggctcgcagttctgcaggctgtttgagcaaggtatcaacatctgcttggcttctggtgagacctcagaaagctttgacccatggtggaaggtgaagggggagcaggcacgtcacacagcaagaacaggagcaagagagaggagaagaggtgccagtctccttttcttaacaacccgcaattgcatgaactaataaagtaagaattcactcattactacagggagggcaccgagtcattcatgaggaatctgtccctatgacccaaatatctcccagcaggccccacctccagcactggagatcaacatgaaatttggggggaacaaatatccagcctctatgattggtttggagcaatgagatcaattacaccaacaagccaagcatttctcttagtatcctatggtcattgctaatgcatatggtcattttgacagctgtggtttctccttcatattcatttgggactcttcatagggtctcgagagacatgacaatactgttcaaaacgtctccaaggcaaaattaattttattccgttgactggaaatatatcacaaagaatgaggtttttccagtcccacccacaagacagtcctctgaaagtggaaaagcttgcccggccacctgcccctaccctgaccttggggtagttcatcagttgagcacaacccccatgccgggcatagactcacccatctcttttcctcaggtgtgatgggttggctttcaaactagtgtttctcgcactgttagaagttattgtccaagtggaaaggatgcagaggctggaattttccagtgggatagaagagcaggctaattaggaaggaatattccagggaatgcaaggtgcaactgcgatattgctccatccctggacctgagggagacaaagaaagttcttaaagggctgcagatgctgtcctctgaaggtcttctctggatcgctggcctactttggaaacatgcaggccattgagtgccatggggctgcccatcagtctgatccacacgaaaggctctgtgcatttcaagagcaggctggtagctcgccattcctgggaggatgctgacatctgtcaagcccagaatgcctctctcagggctctcagacctgttaaactgaggccaggagagcagaagaaagaactcaaagtgtggacggtactaccagctggagaaagcccaggagccaggactcttccacccactatctaggttatgttgagtgacattcctccctggcttcaggtttctctaaagccagaggaaaagtaaaccagacaagccctcccatctattttgtctgaaacaagatggagtgaatgctccctactgagagggtctggatttcacccatgaattgcactaggaactgggagctcctttttgaacacaagtcccaagaggcagttgtgataaagtctctcttttggtgtccgctgtctgtaaatgaaacaatgcaaattggtgtatgttaaatgtgtcacagcttgcaggcaagaggttttgtttattctctaaggacttgctgactcgagggagcatcaaagatgagctttctgtctgtcttggcaagtgtgaaaataaagggagtcagtcacctccccaaaggtcatgtgaatcagaattcaggagaaagttggaggaaacaatggcagattccaagaagagatgcttgtttctccatttgagaaagccttactgaaagctactgaataaagagcacaatttccagttatttctttctttgcttttttttttttctggccactataacagcacttccagtatatgttgatagtagcttgtaattattcctaataccccagaaagaagagagtcgtgatctttggtgattgtgaggaattagattaacagtcgcgggggaccggctacctgcgacagccctttaaatggctaatgagggatgctgagtgctgagcggtgcctgcttttgatgtggcccacccatgaccagggagagagggcaggaagagagcagctgcaggatccacaagtctctaacccttctgccccaggcaacataaaaccctagattcttgttctttttccctcttcctaaagtagactgacgtcccagtaattgtttttctaacaagccctgttgttctccctgggaaagacctagattggccaagaaaggatcctgtcagctcctggtggagagttgcacaagccagtggctctcaactctctccaaggaaaattaaagcatattttctctttcttagctcaaaatcagctttcaggggtccttattggggtctgattttcttccccagttctgaatccaggaagaagctttttctccaaggaccaaccaaaaacaatgactttggagaaaaattagactcagaaagtctgtccaggcattgggttggtgaactgtcaactgttggatggggaggaggggtcgctgtgatcgtagcggtcattagacttgggacgtgagttgtctctcaaagcacagtagtaaatgactgtattttgtatattgcccccaatatgttgggtgtaaatagaagcacagctggggattgatcatggccaggacgattggagcttggcagctctcatatccagaataagccactaagacggaactcatcaatcaccatcttcccatttacctcattagcatcccattttctctcattcagtattagttgatgatttctgctattaagtgatgagaaagtcagcagactagtcaaaaaagaatctttatataaaatgtacatattaatataaattaacttagcatgcaacttaccgatcaaatgaagtatatattattaatatgttatcttagtgtataaaggaaaactgccatatttaccagatgttttctttaaccgaacttgtctgtaaatatataatctgtataaaaagagtctaatttaccattatttatgcaatagaaaaaataaaagtttttttttcttttg

SEQ ID NO: 2989 - DNA, 957 bp, Homo sapiens
  source 1..957: mol_type = unassigned DNA; mol_type = unassigned DNA
gtataaaagtgcaaggcgggcggcggcgtccgtccgtactgcagagccgctgccggagggtcgttttaaagggcccgcgcgttgccgccccctcggcccgccatgctgctatccgtgccgctgctgctcggcctcctcggcctggccgtcgccgagcctgccgtctacttcaaggagcagtttctggacggaggtaacgcctggtcccgcctcgaggccgccccgacgacgcggccggcccccgatcctggatctgcgttgtcgcccgtaattaccgtttagaggtccaacacggtggcctcccgggactagagccgcgggcgatttctcttctgcgtccctggggagcgcggagggcgtagcggcctcccgcggcgggagttagggttagcccgaggatctctgaaggcacccgacgtgtcaaactagaggttggaatggggagtgtcggggatctcctttcctgtccccagcagcttgtggctctcggcagatgtttggtgtggggggggattagcacagccgctctgacctacccctctaatcccccacttagacgggtggacttcccgctggatcgaatccaaacacaagtcagattttggcaaattcgttctcagttccggcaagttctacggtgacgaggagaaagataaaggtttgcagacaagccaggatgcacgcttttatgctctgtcggccagtttcgagcctttcagcaacaaaggccagacgctggtggtgcagttcacggtgaaacatgagcagaacatcgactgtgggggcggctatgtgaagctgtttcctaatagtttggaccagacagacatgcacggagactcagaatacaacatcatgtttggtcccgacatctgtggccctggcaccaagaaggttcatgtcatcttcaactacaagggcaagaacgtgctgatcaacaaggacatccgttgcaag

SEQ ID NO: 2990 - DNA, 1903 bp, Homo sapiens
  source 1..1903: mol_type = unassigned DNA; mol_type = unassigned DNA
ccgtccgtactgcagagccgctgccggagggtcgttttaaagggcccgcgcgttgccgccccctcggcccgccatgctgctatccgtgccgctgctgctcggcctcctcggcctggccgtcgccgagcctgccgtctacttcaaggagcagtttctggacggagacgggtggacttcccgctggatcgaatccaaacacaagtcagattttggcaaattcgttctcagttccggcaagttctacggtgacgaggagaaagataaaggtttgcagacaagccaggatgcacgcttttatgctctgtcggccagtttcgagcctttcagcaacaaaggccagacgctggtggtgcagttcacggtgaaacatgagcagaacatcgactgtgggggcggctatgtgaagctgtttcctaatagtttggaccagacagacatgcacggagactcagaatacaacatcatgtttggtcccgacatctgtggccctggcaccaagaaggttcatgtcatcttcaactacaagggcaagaacgtgctgatcaacaaggacatccgttgcaaggatgatgagtttacacacctgtacacactgattgtgcggccagacaacacctatgaggtgaagattgacaacagccaggtggagtccggctccttggaagacgattgggacttcctgccacccaagaagataaaggatcctgatgcttcaaaaccggaagactgggatgagcgggccaagatcgatgatcccacagactccaagcctgaggactgggacaagcccgagcatatccctgaccctgatgctaagaagcccgaggactgggatgaagagatggacggagagtgggaacccccagtgattcagaaccctgagtacaagggtgagtggaagccccggcagatcgacaacccagattacaagggcacttggatccacccagaaattgacaaccccgagtattctcccgatcccagtatctatgcctatgataactttggcgtgctgggcctggacctctggcaggtcaagtctggcaccatctttgacaacttcctcatcaccaacgatgaggcatacgctgaggagtttggcaacgagacgtggggcgtaacaaaggcagcagagaaacaaatgaaggacaaacaggacgaggagcagaggcttaaggaggaggaagaagacaagaaacgcaaagaggaggaggaggcagaggacaaggaggatgatgaggacaaagatgaggatgaggaggatgaggaggacaaggaggaagatgaggaggaagatgtccccggccaggccaaggacgagctgtagagaggcctgcctccagggctggactgaggcctgagcgctcctgccgcagagctggccgcgccaaataatgtctctgtgagactcgagaactttcatttttttccaggctggttcggatttggggtggattttggttttgttcccctcctccactctcccccaccccctccccgcccttttttttttttttttttaaactggtattttatctttgattctccttcagccctcacccctggttctcatctttcttgatcaacatcttttcttgcctctgtccccttctctcatctcttagctcccctccaacctggggggcagtggtgtggagaagccacaggcctgagatttcatctgctctccttcctggagcccagaggagggcagcagaagggggtggtgtctccaaccccccagcactgaggaagaacggggctcttctcatttcacccctccctttctcccctgcccccaggactgggccacttctgggtggggcagtgggtcccagattggctcacactgagaatgtaagaactacaaacaaaatttctattaaattaaattttgtgtctc

SEQ ID NO: 2991 - DNA, 781 bp, Homo sapiens
  source 1..781: mol_type = unassigned DNA; mol_type = unassigned DNA
tactgcagagccgctgccggagggtcgttttaaagggcccgcgcgttgccgccccctcggcccgccatgctgctatccgtgccgctgctgctcggcctcctcggcctggccgtcgccgagcctgccgtctacttcaaggagcagtttctggacggagacgggtggacttcccgctggatcgaatccaaacacaagtcagattttggcaaattcgttctcagttccggcaagttctacggtgacgaggagaaagataaaggtttgcagacaagccaggatgcacgcttttatgctctgtcggccagtttcgagcctttcagcaacaaaggccagacgctggtggtgcagttcacggtgaaacatgagcagaacatcgactgtgggggcggctatgtgaagctgtttcctaatagtttggaccagacagacatgcacggagactcagaatacaacatcatgtttggtcccgacatctgtggccctggcaccaagaaggttcatgtcatcttcaactacaagggcaagaacgtgctgatcaacaaggacatccgttgcaaggtgtgcctgggggtggtggcaaatggctgtcatggggagattcagaggtcagcctcattggggggtggcccccgctcaccttcttccttcttcaggatgatgagtttacacacctgtacacactgattgtgcggccagacaacacctatgaggtgaagattgacaacagccaggtggagtccggctccttggaagacgattgggacttcctgccacccaagaa

SEQ ID NO: 2992 - DNA, 776 bp, Homo sapiens
  source 1..776: mol_type = unassigned DNA; mol_type = unassigned DNA
aaagggcccgcgcgttgccgccccctcggcccgccatgctgctatccgtgccgctgctgctcggcctcctcggcctggccgtcgccgagcctgccgtctacttcaaggagcagtttctggacggagacgggtggacttcccgctggatcgaatccaaacacaagtcagattttggcaaattcgttctcagttccggcaagttctacggtgacgaggagaaagataaaggtcccgacatctgtggccctggcaccaagaaggttcatgtcatcttcaactacaagggcaagaacgtgctgatcaacaaggacatccgttgcaaggatgatgagtttacacacctgtacacactgattgtgcggccagacaacacctatgaggtgaagattgacaacagccaggtggagtccggctccttggaagacgattgggacttcctgccacccaagaagataaaggatcctgatgcttcaaaaccggaagactgggatgagcgggccaagatcgatgatcccacagactccaagcctgaggactgggacaagcccgagcatatccctgaccctgatgctaagaagcccgaggactgggatgaagagatggacggagagtgggaacccccagtgattcagaaccctgagtacaagggtgagtggaagccccggcagatcgacaacccagattacaagggcacttggatccacccagaaattgacaaccccgagtattctcccgatcccagtatctatgcctatgataactttggcgtgctgggc

SEQ ID NO: 2993 - DNA, 913 bp, Homo sapiens
  source 1..913: mol_type = unassigned DNA; mol_type = unassigned DNA
cggaagactgggatgagcgggccaagatcgatgatcccacagactccaagcctgaggactgggacaagcccgagcatatccctgaccctgatgctaagaagcccgaggactgggatgaagagatggacggagagtgggaacccccagtgattcagaaccctgagtacaagggtgagtggaagccccggcagatcgacaacccagattacaagggcacttggatccacccagaaattgacaaccccgagtattctcccgatcccagtatctatgcctatgataactttggcgtgctgggcctggacctctggcaggtcaagtctggcaccatctttgacaacttcctcatcaccaacgatgaggcatacgctgaggagtttggcaacgagacgtggggcgtaacaaaggcagcagagaaacaaatgaaggacaaacaggacgaggagcagaggcctgagcgctcctgccgcagagctggccgcgccaaataatgtctctgtgagactcgagaactttcatttttttccaggctggttcggatttggggtggattttggttttgttcccctcctccactctcccccaccccctccccgcccttttttttttttttttttaaactggtattttatctttgattctccttcagccctcacccctggttctcatctttcttgatcaacatcttttcttgcctctgtccccttctctcatctcttagctcccctccaacctggggggcagtggtgtggagaagccacaggcctgagatttcatctgctctccttcctggagcccagaggagggcagcagaagggggtggtgtctccaaccccccagcactgaggaagaacggggctcttctcatttcacccctccctttctcccctgcccccaggactgggccacttct

SEQ ID NO: 2994 - DNA, 667 bp, Homo sapiens
  source 1..667: mol_type = unassigned DNA; mol_type = unassigned DNA
tagctgggactacaggcacttgccaccacgcctggctgattttttgtatttttagtagagacggggtttcaccgtgttagccagggtggtctcgatctcctgacctcgtgatccgcccaccttggcctctgggcgaggattacaggcgtgatccacctcacctggcctctccatctttttaactgcagtgtcagcggtgttccttgtcttctctgcagatgcaggcagcagaatatagtggttataggaacacaggtggaaaccctgtccaaagcaagggctatcgggtatcacctctgaccatccttcccattcatcctccaggtcaagtctggcaccatctttgacaacttcctcatcaccaacgatgaggcatacgctgaggagtttggcaacgagacgtggggcgtaacaaaggcagcagagaaacaaatgaaggacaaacaggacgaggagcagaggcttaaggaggaggaagaagacaagaaacgcaaagaggaggaggaggcagaggacaaggaggatgatgaggacaaagatgaggatgaggaggatgaggaggacaaggaggaagatgaggaggaagatgtccccggccaggccaaggacgagctgtagagaggcctgcctccagggctggactgaggcctgagcgctcctgccgcag

SEQ ID NO: 2995 - DNA, 394 bp, Homo sapiens
  source 1..394: mol_type = unassigned DNA; mol_type = unassigned DNA
aggaggaagatgtccccggccaggccaaggacgagctgtagagaggcctgcctccagggctggactgaggcctgagcgctcctgccgcagagctggccgcgccaaataatgtctctctcccctccaacctggggggcagtggtgtggagaagccacaggcctgagatttcatctgctctccttcctggagcccagaggagggcagcagaagggggtggtgtctccaaccccccagcactgaggaagaacggggctcttctcatttcacccctccctttctcccctgcccccaggactgggccacttctgggtggggcagtgggtcccagattggctcacactgagaatgtaagaactacaaacaaaatttctattaaattaaattttgtgtctc

SEQ ID NO: 2996 - DNA, 2271 bp, Homo sapiens
  source 1..2271: mol_type = unassigned DNA; mol_type = unassigned DNA
gcatcctccgcatccacatccgcatcgtcgtcctccccgaccgcgtcctgcagcagctgccagtggagccgcctgacaaggactgccatccaccatggtgaagctgggctgcagcttctctgggaagccaggtaaagaccctggggaccaggatggggctgccatggacagtgtgcctctgatcagccccttggacatcagccagctccagccgccactccctgaccaggtggtcatcaagacacagacagaataccagctgtcctccccagaccagcagaatttccctgacctggagggccagaggctgaactgcagccacccagaggaagggcgcaggctgcccaccgcacggatgatcgccttcgccatggcgctactgggctgcgtgctgatcatgtacaaggccatctggtacgaccagttcacctgccccgacggcttcctgctgcggcacaagatctgcacgccgctgaccctggagatgtactacacggagatggaccccgagcgccaccgcagcatcctggcggccatcggggcctacccgctgagccgcaagcacggcacggagacgccggcggcctggggggacggctaccgcgcagccaaggaggagcgcaaggggcccacccaggctggggcggcggcggcggccaccgaaccccccgggaagccgtcggccaaggcggagaaggaggcggcgcggaaggcggccgggagcgcggcgcccccgcccgcgcagtgacgtctccagccccgcagcccggcccgggcgtcctccgccagctcctgtgaccagcgcgtctcccgatgctctccgccgtgttcgtgtccccaggcgccctcgctgcagccccgcccccgtgggtctctgactctgtcgcttttctctaagtaaagatttcacgtccaccggaggcttccatctctcctgcgcgtcctctgccgggctggcctttctcccgccccccaccccgccagttgtgagtgaggccggcattgtgctccccccagggacccccgaaggacccaggagagaccccgtggggggcagctcccaggaagccgtggtgcgcccaggcggagcacgcgcatcctcgcgctgcgtggtccgggccttgtccaagccccaccgggatgtgccttaatggcggggctccggcccacccaggggagcctcgggtccatccctatccgctgcccagccccttgtcctgctggttccccgaccccccgcccccatctacctggtgctgggcctgggccccgggcgttccccctctgacaggagtgtctgcctcccgggggacccctggttctgggcggcacccatgagcagctcctgcctcctagatgtgtggcccacaggcataaatgaccaagtgaagaaaggagtgaatgggggcgtctgagtggggagtggggcctgatgaggggtgagctctggttcctgggggctggggtctcccgtgtccctggagccagatgaaagatggtgaggctgaaacgccaggggagcctggagctgccatgagtctcccccagcatccccaccccagccccagcatccccaccccagccccagcatccccaccccagccccagccaactcccggcactgaacactacagggaatggacttccggcagatctcacccaccacctgcaccaccccagccagcagcagctctgcagccccgcccaccccagccagcagcagctctgcagccccgcccaccccagccagcagcagctctgcagccccgcccaccccagccaattgcagcactgcagccccgcccaccccagccaattgcagcactgcagccccgcccaccccagccagcagcggctctgcagccccgcccaccccagcccccgaccattggtggatggaagccccccaccattggctcccaggcttgctggctaggtgcgggtctaggcagcttcccagctcagtgggactggcctgctttggaacagcggcagtgcccaggaagcctgtgaactgggcctgccagggaagccatggtgagctggaagccagccaggtggggtcagggaaggcagggccatgcacaccacacccttcactgctgggcttctaagggcattggccagatgaacaagcacacgcagaactgaattggccctgatggcctgcaagggaggggggcccggggcctggggcgtcagctgggatatatgggggcagggagtctctgcatggccgatgtttgaattaaaatacagctttcccctgta

SEQ ID NO: 2997 - DNA, 555 bp, Homo sapiens
  source 1..555: mol_type = unassigned DNA; mol_type = unassigned DNA
ccggggcgcacaggagggctcagccccaccgaccctgacccggcccctcccgcagcacaagatctgcacgccgctgaccctggagatgtactacacggagatggaccccgagcgccaccgcagcatcctggcggccatcggggcctacccgctgagccgcaagcacggcacggagacgccggcggcctggggggacggctaccgcgcagccaaggaggagcgcaaggggcccacccaggctggggcggcggcggcggccaccgaaccccccgggaagccgtcggccaaggcggagaaggaggcggcgcggaaggcggccgggagcgcggcgcccccgcccgcgcagtgacgtctccagccccgcagcccggcccggggtaggtgcgcgccgcggggctccggccggctctgcccagcgtcctccgccagctcctgtgaccagcgcgtctcccgatgctctccgccgtgttcgtgtccccaggcgccctcgctgcagccccgcccccgtgggtctctgactctgtcgcttttctctaagtaaagatttcacgtcca

SEQ ID NO: 2998 - DNA, 655 bp, Homo sapiens
  source 1..655: mol_type = unassigned DNA; mol_type = unassigned DNA
acaacgcgcgacctcctgctccatgcccctccagggccctgagttctgaactggaggctgatcttcggtgtcctgaagccatggctccattacaaactgtccgcagtgtccccaaccgcagaagcgggagggcctgggcccggggcgcacaggagggctcagccccaccgaccctgacccggcccctcccgcagcacaagatctgcacgccgctgaccctggagatgtactacacggagatggaccccgagcgccaccgcagcatcctggcggccatcggggcctacccgctgagccgcaagcacggcacggagacgccggcggcctggggggacggctaccgcgcagccaaggaggagcgcaaggggcccacccaggctggggcggcggcggcggccaccgaaccccccgggaagccgtcggccaaggcggagaaggaggcggcgcggaaggcggccgggagcgcggcgcccccgcccgcgcagtgacgtctccagccccgcagcccggcccgggcgtcctccgccagctcctgtgaccagcgcgtctcccgatgctctccgccgtgttcgtgtccccaggcgccctcgctgcagccccgcccccgtgggtctctgactctgtcgcttttctctaagtaaagatttcacgtcca

SEQ ID NO: 2999 - DNA, 825 bp, Homo sapiens
  source 1..825: mol_type = unassigned DNA; mol_type = unassigned DNA
cccgcccggccgcgaagcgtctggaaccgcatcctccgcatccacatccgcatcgtcgtcctccccgaccgcgtcctgcagcagctgccagtggagccgcctgactgccatccaccatggtgaagctgggctgcagcttctctgggaagccaggtaaagaccctggggaccaggatggggctgccatggacagtgtgcctctgatcagccccttggacatcagccagctccagccgccactccctgaccaggtggtcatcaagacacagacagaataccagctgtcctccccagaccagcagaatttccctgacctggagggccagaggctgaactgcagccacccagaggaagggcgcaggctgcccaccgcacggatgatcgccttcgccatggcgctactgggctgcgtgctgatcatgtacaaggccatctggtacgaccagttcacctgccccgacggcttcctgctgcggggccctgagttctgaactggaggctgatcttcggtgtcctgaagccatggctccattacaaactgtccgcagtgtccccaaccgcagaagcgggagggcctgggcccggggcgcacaggagggctcagccccaccgaccctgacccggcccctcccgcagcacaagatctgcacgccgctgaccctggagatgtactacacggagatggaccccgagcgccaccgcagcatcctggcggccatcggggcctacccgctgagccgcaagcacggcacggagacgccggcggcctggggggacggctaccgcgcagccaaggaggagcgcaaggggcccacccaggctggg

SEQ ID NO: 3000 - DNA, 783 bp, Homo sapiens
  source 1..783: mol_type = unassigned DNA; mol_type = unassigned DNA
cccgaccgcgtcctgcagcagctgccagtggagccgcctgacaaggactgccatccaccatggtgaagctgggctgcagcttctctgggaagccaggtaaagaccctggggaccaggatggggctgccatggacagtgtgcctctgatcagccccttggacatcagccagctccagccgccactccctgaccaggtggtcatcaagacacagacagaataccagctgtcctccccagaccagcagaatttccctgacctggagggccagaggctgaactgcagccacccagaggaagggcgcagggtaaccacacccaccccacccactgtggggactcaggacaggaggagaaggtggaaggcagctgggggtgcctgggttccgtccaggccagtctggggtccccttgctctcagggaggagagggtggcagtgagtcatcccgcccagagctggccccaccggctgccctgcacccaccaggccccctcccgaggctgcaggtgcagactgaccaaacagtggcgctcctgagatgtttttctttctgggaagtgcccgcgagtgctgcttgcttgtttgcccagtgggtcattgtctcatcttcagtgacttacgggctttctatgtaatacttcctttctgcagtatatctggcaaatatcttctctcatcctcttgtttaaatctgtcaatgttactaatgatagctttagtcatttttagtggactgtttccaaagccttccattctccagtagacagatctgctagggctcccc

SEQ ID NO: 3001 - DNA, 2612 bp, Homo sapiens
  source 1..2612: mol_type = unassigned DNA; mol_type = unassigned DNA
acagacctgtaggagctggagtgggagctcaagcaggattcttcccgagtccctgggtaagacaaccctgcttcttttcttggctttagagggtctccttgcttaatgggaagcgtgcagcacctagtgagtggatttgaagagccactttgtaagcaacttgggcatttatttcagccccagttccagtcttccctgactcttttggcatcaaggcatcctcagaagcttcaactctggaggcaatgggtcgaaaggaagaagatgactgcagttcctggaagaaacagaccaccaacatccggaaaaccttcatttttatggaagtgctgggatcaggagctttctcagaagttttcctggtgaagcaaagactgactgggaagctctttgctctgaagtgcatcaagaagtcacctgccttccgggacagcagcctggagaatgagattgctgtgttgaaaaagatcaagcatgaaaacattgtgaccctggaggacatctatgagagcaccacccactactacctggtcatgcagcttgtttctggtggggagctctttgaccggatcctggagcggggtgtctacacagagaaggatgccagtctggtgatccagcaggtcttgtcggcagtgaaatacctacatgagaatggcatcgtccacagagacttaaagcccgaaaacctgctttaccttacccctgaagagaactctaagatcatgatcactgactttggtctgtccaagatggaacagaatggcatcatgtccactgcctgtgggaccccaggctacgtggctccagaagtgctggcccagaaaccctacagcaaggctgtggattgctggtccatcggcgtcatcacctacatattgctctgtggataccccccattctatgaagaaacggagtctaagcttttcgagaagatcaaggagggctactatgagtttgagtctccattctgggatgacatttctgagtcagccaaggactttatttgccacttgcttgagaaggatccgaacgagcggtacacctgtgagaaggccttgagtcatccctggattgacggaaacacagccctccaccgggacatctacccatcagtcagcctccagatccagaagaactttgctaagagcaagtggaggcaagccttcaacgcagcagctgtggtgcaccacatgaggaagctacacatgaacctgcacagcccgggcgtccgcccagaggtggagaacaggccgcctgaaactcaagcctcagaaacctctagacccagctcccctgagatcaccatcaccgaggcacctgtcctggaccacagtgtagcactccctgccctgacccaattaccctgccagcatggccgccggcccactgcccctggtggcaggtccctcaactgcctggtcaatggctccctccacatcagcagcagcctggtgcccatgcatcaggggtccctggccgccgggccctgtggctgctgctccagctgcctgaacattgggagcaaaggaaagtcctcctactgctctgagcccacactcctcaaaaaggccaacaaaaaacagaacttcaagtcggaggtcatggtaccagttaaagccagtggcagctcccactgccgggcagggcagactggagtctgtctcattatgtgattcctggagcctgtgcctatgtcactgcaattttcaggagacatattcaactcctctgctcttccaaacctggtgtctatccggcagagggaggaaggcagagcaagtggagcagggcttagcaggagcagtttctggccagaagcaccagcctgctgccagcggggcagcccctcataggaggcccaggagggagccccaaggcgtagaagccttgttgaagctgtgagcaggagaagcggtgcccaccagcttccaggtctccctgacctgcctgctctatgccccacaccctacgtgccgtggctctgtgcagtgtacgtagatagctctcgcctgggtctgtgctgtttgtcgtgaaaagcttaatgggctggccaggctgtgtcaccttctccaagcaaagccatatggagcatctacccagactcccactctgcacacactcactcccacctctcaagcctccaacctcttggccagattgggctcattaatgtcgttgcctgcccatctgcatgaatgacaggcagctccccatggtggtctgcctgtgagctcttcaagttctaatccttaactccaggattagctcccaagtgcgctgagacccagccagcacacttctggcccttctccctgcctcaatctaaaagcagtgccacaccctccaaagtggaatagaaagaagttcatgagtaagggctgcaaggaattcttatcctggccacatgtcctccgtgcacacacccaatggagttaaccttggaagttgactattttaatgtctgccaggagttctaatcctgcctctgttcccttttctctccttgaaagtccagcacaccattcttgtccttccccagtttcctcgccctccacccctccagcttcatgctcagtgttgtgcttaataaaatggacatatttttctct

SEQ ID NO: 3002 - DNA, 808 bp, Homo sapiens
  source 1..808: mol_type = unassigned DNA; mol_type = unassigned DNA
gagctggagtgggagctcaagcaggattcttcccgagtccctggcatcctcagaagcttcaactctggaggcaatgggtcgaaaggaagaagatgactgcagttcctggaagaaacagaccaccaacatccggaaaaccttcatttttatggaagtgctgggatcaggagctttctcagaagttttcctggtgaagcaaagactgactgggaagctctttgctctgaagtgcatcaagaagtcacctgccttccgggacagcagcctggagaatgagattgctgtgttgaaaaagatcaagcatgaaaacattgtgaccctggaggacatctatgagagcaccacccactactacctggtcatgcagcttgtttctggtggggagctctttgaccggatcctggagcggggtgtctacacagagaaggatgccagtctggtgatccagcaggtcttgtcggcagtgaaatacctacatgagaatggcatcgtccacagagacttaaagcccgaaaacctgctttaccttacccctgaagagaactctaagatcatgatcactgactttggtctgtccaagatggaacagaatggcatcatgtccactgcctgtgggaccccaggctacgtgggctctgtggataccccccattctatgaagaaacggagtctaagcttttcgagaagatcaaggagggctactatgagtttgagtctccattctgggatgacatttctgagtcagccaaggactttatttgccacttgcttgagaaggatccgaacgagcggtacacctgtgagaagg

SEQ ID NO: 3003 - DNA, 2440 bp, Homo sapiens
  source 1..2440: mol_type = unassigned DNA; mol_type = unassigned DNA
gagctggagtgggagctcaagcaggattcttcccgagtccctggcatcctcagaagcttcaactctggaggcaatgggtcgaaaggaagaagatgactgcagttcctggaagaaacagaccaccaacatccggaaaaccttcatttttatggaagtgctgggatcaggagctttctcagaagttttcctggtgaagcaaagactgactgggaagctctttgctctgaagtgcatcaagaagtcacctgccttccgggacagcagcctggagaatgagattgctgtgttgaaaaagatcaagcatgaaaacattgtgaccctggaggacatctatgagagcaccacccactactacctggtcatgcagcttgtttctggtggggagctctttgaccggatcctggagcggggtgtctacacagagaaggatgccagtctggtgatccagcaggtcttgtcggcagtgaaatacctacatgagaatggcatcgtccacagagacttaaagcccgaaaacctgctttaccttacccctgaagagaactctaagatcatgatcactgactttggtctgtccaagatggaacagaatggcatcatgtccactgcctgtgggaccccaggctacgtggctccagaagtgctggcccagaaaccctacagcaaggctgtggattgctggtccatcggcgtcatcacctacatattgctctgtggataccccccattctatgaagaaacggagtctaagcttttcgagaagatcaaggagggctactatgagtttgagtctccattctgggatgacatttctgagtcagccaaggactttatttgccacttgcttgagaaggatccgaacgagcggtacacctgtgagaaggccttgagtcatccctggattgacggaaacacagccctccaccgggacatctacccatcagtcagcctccagatccagaagaactttgctaagagcaagtggaggcaagccttcaacgcagcagctgtggtgcaccacatgaggaagctacacatgaacctgcacagcccgggcgtccgcccagaggtggagaacaggccgcctgaaactcaagcctcagaaacctctagacccagctcccctgagatcaccatcaccgaggcacctgtcctggaccacagtgtagcactccctgccctgacccaattaccctgccagcatggccgccggcccactgcccctggtggcaggtccctcaactgcctggtcaatggctccctccacatcagcagcagcctggtgcccatgcatcaggggtccctggccgccgggccctgtggctgctgctccagctgcctgaacattgggagcaaaggaaagtcctcctactgctctgagcccacactcctcaaaaaggccaacaaaaaacagaacttcaagtcggaggtcatggtaccagttaaagccagtggcagctcccactgccgggcagggcagactggagtctgtctcattatgtgattcctggagcctgtgcctatgtcactgcaattttcaggagacatattcaactcctctgctcttccaaacctggtgtctatccggcagagggaggaaggcagagcaagtggagcagggcttagcaggagcagtttctggccagaagcaccagcctgctgccagcggggcagcccctcataggaggcccaggagggagccccaaggcgtagaagccttgttgaagctgtgagcaggagaagcggtgcccaccagcttccaggtctccctgacctgcctgctctatgccccacaccctacgtgccgtggctctgtgcagtgtacgtagatagctctcgcctgggtctgtgctgtttgtcgtgaaaagcttaatgggctggccaggctgtgtcaccttctccaagcaaagccatatggagcatctacccagactcccactctgcacacactcactcccacctctcaagcctccaacctcttggccagattgggctcattaatgtcgttgcctgcccatctgcatgaatgacaggcagctccccatggtggtctgcctgtgagctcttcaagttctaatccttaactccaggattagctcccaagtgcgctgagacccagccagcacacttctggcccttctccctgcctcaatctaaaagcagtgccacaccctccaaagtggaatagaaagaagttcatgagtaagggctgcaaggaattcttatcctggccacatgtcctccgtgcacacacccaatggagttaaccttggaagttgactattttaatgtctgccaggagttctaatcctgcctctgttcccttttctctccttgaaagtccagcacaccattcttgtccttccccagtttcctcgccctccacccctccagcttcatgctcagtgttgtgcttaataaaatggacatatttttctct

SEQ ID NO: 3004 - DNA, 573 bp, Homo sapiens
  source 1..573: mol_type = unassigned DNA; mol_type = unassigned DNA
agctcccaccccaaagccctctcctcttgccaccagccctgactctgcccttggtctgctgcagctccagaagtgctggcccagaaaccctacagcaaggctgtggattgctggtccatcggcgtcatcacctacatattgctctgtggataccccccattctatgaagaaacggagtctaagcttttcgagaagatcaaggagggctactatgagtttgagtctccattctgggatgacatttctgagtcagccaaggactttatttgccacttgcttgagaaggatccgaacgagcggtacacctgtgagaaggccttgagtcatccctggattgacggaaacacagccctccaccgggacatctacccatcagtcagcctccagatccagaagaactttgctaagagcaagtggaggcaagccttcaacgcagcagctgtggtgcaccacatgaggaagctacacatgaacctgcacagcccgggcgtccgcccagaggtggagaacaggccgcctgaaactcaagcctcagaaacctctagacccagctcccctgagatcaccatcacc

SEQ ID NO: 3005 - DNA, 5322 bp, Homo sapiens
  source 1..5322: mol_type = unassigned DNA; mol_type = unassigned DNA
tttccctgtaaaccttagaacccagctgttgccagggcaacggggcaatacctgtctctctagagatgaagttgccagggtaactgcatcctgtcattcgttcctggggaccatccggaatgcggcacccactggctgttaccatggcaactgcctttttgccccacttaatcccatcccgtctgctacaagggccccacagttggaggtgggggaggtgggaagagaaaagatcacttgtggacaaagtttgctctattccacctcctccaggccctccttgggtccatcaccccaggggtgctgggtccatcccacccccaggcccacacaggcttgcagtattgtgtgcggtatggtcagggcgtccgagagcaggtttcgcagtggaaggcaggcaggtgttggggaggcagttaccggggcaacgggaacagggcgttttggaggtggttgccatggggacctggatgctgacgaaggctcgcgaggctgtgagcagccacagtgccctgctcagaagccccgggctcgtcagtcaaaccggttctctgtttgcactcggcagcacgggcaggcaagtggtccctaggttcgggagcagagcagcagcgcctcagtcctggtcccccagtcccaagcctcacctgcctgcccagcgccaggatggccaccatcacctgcacccgcttcacggaagagtaccagctcttcgaggaattgggcaagggagccttctcggtggtgcgaaggtgtgtgaaggtgctggctggccaggagtatgctgccaagatcatcaacacaaagaagctgtcagccagagaccatcagaagctggagcgtgaagcccgcatctgccgcctgctgaagcaccccaacatcgtccgactacatgacagcatctcagaggagggacaccactacctgatcttcgacctggtcactggtggggaactgtttgaagatatcgtggcccgggagtattacagtgaggcggatgccagtcactgtatccagcagatcctggaggctgtgctgcactgccaccagatgggggtggtgcaccgggacctgaagcctgagaatctgttgctggcctccaagctcaagggtgccgcagtgaagctggcagactttggcctggccatagaggtggagggggagcagcaggcatggtttgggtttgcagggactcctggatatctctccccagaagtgctgcggaaggacccgtacgggaagcctgtggacctgtgggcttgtggggtcatcctgtacatcctgctggttgggtaccccccgttctgggatgaggaccagcaccgcctgtaccagcagatcaaagccggcgcctatgatttcccatcgccggaatgggacactgtcaccccggaagccaaggatctgatcaataagatgctgaccattaacccatccaaacgcatcacagctgccgaagcccttaagcacccctggatctcgcaccgctccaccgtggcatcctgcatgcacagacaggagaccgtggactgcctgaagaagttcaatgccaggaggaaactgaagggagccattctcaccacgatgctggccaccaggaacttctccggagggaagagtgggggaaacaagaagagcgatggtgtgaaggaatcctcagagagcaccaacaccaccatcgaggatgaagacaccaaagtgcggaaacaggaaattataaaagtgacagagcagctgattgaagccataagcaatggagattttgagtcctacacgaagatgtgcgaccctggcatgacagccttcgaacctgaggccctggggaacctggttgagggcctggacttccatcgattctattttgaaaacctgtggtcccggaacagcaagcccgtgcacaccaccatcctgaatccccacatccacctgatgggcgacgagtcagcctgcatcgcctacatccgcatcacgcagtacctggacgctggcggcatcccacgcaccgcccagtcggaggagacccgtgtctggcaccgccgggatggcaaatggcagatcgtccacttccacagatctggggcgccctccgtcctgccccactgagggaccaggctggggtcgctgcgttgctgtgccgcagagatccactctgtccgtggagtggagctgctggttctcccaggtggattttgctggaattctcccatgtcatcaccccaccaccgtcacttctgtacctgcatcaagaaaacctgcttgttcacaaaagtcatcgcaacttcagagcgaacggccacatctccccacctctcacccccaccctctcccctgccaggctggggcttcctcaggcatgggtgtccacagcactggccccctctccccagcctcagctgctgtccgcctgatctgtcttgggctgtaggctagaatgcccgggctggtgcccaccaggggctggggagaaggaggggtggcatgatgaggaaggcagcatccgtccgtccctctcccagacctctcctcttccagtgtccccggggaagggcagatgacactcccttccccctaagccaaccgcactgaaggagtggggagaagagcatacgccaggagcctcctgcctcaaagtgctcccctaagtcttcttcctcctgtgctgacctcagggtggtctgacccttccctcggtgtgggggatgtggccctctcaggtgcccctacttgctttctgcttccttctggtgaagtccacctccaacattaacctgcccaccccacccccgtcatccctggagaattccagctttgtcgtatctcagagagggaatctaattgtttttggggggcaaaagaaagcaacgtttaggtatcacttctacttggaccgcatgcctttttatagccaaatttctgtgtatttcgtaaatggatttcgcgttaatggatatttatgtaataactagacttctcagattattgtgagaagggtcaggttggaaggggtgtaggaagaggggtgaggggtagtttttttctgttctagtttttttttttttttttgtcatctctgaggtggaccttgtcacctgtggttattggggccaaggtggactcagctccggggagaagggcctctctgccatttcggtcccaaggtgagctgacacaggcgttccttttgggactgtggaagcatcagatgccagcactgactcaggaacagcaagtcagggcagagaggaggagggaggctgtcaggatggaaatacctggacttttctttgcttccctcgcaaactggggtcttctctaccgaacttcccaggatttcatctcaccatatctgtgtgccgcccccagcaccccccacccacctctggggggcccgtgagcgtgtgtcttcattgcctctctccccttggcgtctgatgaccacagcaaagcactgggaatttctactcttcatgcctcatcctgcagcctcgggttcgcattctctctttcttttcctctttccctctttccctgggattgactctgagtggaataccttggcacatccactaggatctactgtctgcactgttttctttgcatgactttatacgcagtaagtatgttgaaaacaaacaaaaagaagaaaacactcaacaaaaccaatctacatgttttggactaaaaaaaaaaatagaggttgtattctcagtgtccgactcggaattatgttgctgcctctctgtgcttttggcctctgtgtggccgtgttttgccagcatgagatactgtcccctctggaggattttaggggaggaagagccacgtccccagggattggaggaggctccggtaccctcgaccctcctgggtgttggttggagcagaactggtgaggatgtttgatccgagattttctgagctctccccaatcaccagctgtctgctgggttcttttctcaagtcctgctgcccaggcccaggtgagacaggcaacgccaggtctgcaggccaggagagatgctgcccaggcctcctggtttccaagctggtccatcactggcctctgtccttggcagagaccttgctgcccaggcccaggggcaggctcttggcctgccccaggcccagagggcttcccagtaaggcccagtgatcccattatcccaggggcaaaaccacctgtccccttttgagctgccagttccctacagccatccccagtcaagggtgagggtgtggccttcaccaggggctgctgtaattaccgagcaaggtctgagctcttcttcagcctcagttccctcattggttaaaagggttctttgttcccatccagccgatgaaggagcaaacgtctggctatgtgaagcctaatttacctgcaggaactggcagggatagtcactggctggactcctgtttacttctagacctggtcaggctccatcccctcccccacctgcccctgattcccctcgtcggtgcctgtcaactgcttttcagcagtggactgcaggggaaagagcagtgatttggggtgagtaggcttcaattcccagctctgaccagacttgctgtgtgaccttgggcaagttcctttccctctttggagcttggtttccctgccagaggaaactgagctggaggagcctgaggtcctgcctttcattggctgacacacctcctgtccactgtgtcactctccaagtgccagagaagtggaggcagatcgctaccccaggctgagatggcccccactgtgaaggccacgcctgtgggtgggcagccacctggtgccaccacagggcaccagggatgatcctgatgtggcaggcaggggagactcacagaaaaatctgcccagagcctaccctcaccagacaaactctgtgctcctccaaaacatcctttagatgcaaaataataataataataataataaataaataaataaaaatccaaacccaagtcaaaaccttggctccagcatgaaaacacgtttacaggaaagtgttctcctgggtttgtgcccaccatggtgcgaatcctgacccaaggcctcctgtctcccttcaaagggagacccttttgggggatgagtttgccagactccccgtgctggtttctttgttactatttgtttggggttttgttttagttctttttttttttcttttcttttttaaaaatatgtggctgtgaacttgaatgaacactgctcaaactttctgctattggggggggcgggtgggatgggaagaaggggcgtttgttttattcttggtgttttcagtgcaataaatagctacaaacttctgtgca

SEQ ID NO: 3006 - DNA, 1557 bp, Homo sapiens
  source 1..1557: mol_type = unassigned DNA; mol_type = unassigned DNA
gatcgctgggccagctctgctccctgcagtctgccctccggctgcgtgtggatgctgctcgtcctcgccctgtgggccctggtgccctgcctggcgttgttaaccctctactttttctcctccacaggagggaagagtgggggaaacaagaagagcgatggtgtgaaggaatcctcagagagcaccaacaccaccatcgaggatgaagacaccaaagtgcggaaacaggaaattataaaagtgacagagcagctgattgaagccataagcaatggagattttgagtcctacacgaagatgtgcgaccctggcatgacagccttcgaacctgaggccctggggaacctggttgagggcctggacttccatcgattctattttgaaaacctgtggtcccggaacagcaagcccgtgcacaccaccatcctgaatccccacatccacctgatgggcgacgagtcagcctgcatcgcctacatccgcatcacgcagtacctggacgctggcggcatcccacgcaccgcccagtcggaggagacccgtgtctggcaccgccgggatggcaaatggcagatcgtccacttccacagatctggggcgccctccgtcctgccccactgagggaccaggctggggtcgctgcgttgctgtgccgcagagatccactctgtccgtggagtggagctgctggttctcccaggtggattttgctggaattctcccatgtcatcaccccaccaccgtcacttctgtacctgcatcaagaaaacctgcttgttcacaaaagtcatcgcaacttcagagcgaacggccacatctccccacctctcacccccaccctctcccctgccaggctggggcttcctcaggcatgggtgtccacagcactggccccctctccccagcctcagctgctgtccgcctgatctgtcttgggctgtaggctagaatgcccgggctggtgcccaccaggggctggggagaaggaggggtggcatgatgaggaaggcagcatccgtccgtccctctcccagacctctcctcttccagtgtccccggggaagggcagatgacactcccttccccctaagccaaccgcactgaaggagtggggagaagagcatacgccaggagcctcctgcctcaaagtgctcccctaagtcttcttcctcctgtgctgacctcagggtggtctgacccttccctcggtgtgggggatgtggccctctcaggtgcccctacttgctttctgcttccttctggtgaagtccacctccaacattaacctgcccaccccacccccgtcatccctggagaattccagctttgtcgtatctcagagagggaatctaattgtttttggggggcaaaagaaagcaacgtttaggtatcacttctacttggaccgcatgcctttttatagccaaatttctgtgtatttcgtaaatggatttcgcgttaatggatatttatgtaataactagacttctcagattattgtgagaagggtcaggttggaaggggtgtaggaagaggggtgaggggtagtttttttct

SEQ ID NO: 3007 - DNA, 1493 bp, Homo sapiens
  source 1..1493: mol_type = unassigned DNA; mol_type = unassigned DNA
caggatggccaccatcacctgcacccgcttcacggaagagtaccagctcttcgaggaattgggcaagggagccttctcggtggtgcgaaggtgtgtgaaggtgctggctggccaggagtatgctgccaagatcatcaacacaaagaagctgtcagccagagaccatcagaagctggagcgtgaagcccgcatctgccgcctgctgaagcaccccaacatcgtccgactacatgacagcatctcagaggagggacaccactacctgatcttcgacctggtcactggtggggaactgtttgaagatatcgtggcccgggagtattacagtgaggcggatgccagtcactgtatccagcagatcctggaggctgtgctgcactgccaccagatgggggtggtgcaccgggacctgaagcctgagaatctgttgctggcctccaagctcaagggtgccgcagtgaagctggcagactttggcctggccatagaggtggagggggagcagcaggcatggtttgggtttgcagggactcctggatatctctccccagaagtgctgcggaaggacccgtacgggaagcctgtggacctgtgggcttgtggggtcatcctgtacatcctgctggttgggtaccccccgttctgggatgaggaccagcaccgcctgtaccagcagatcaaagccggcgcctatgatttcccatcgccggaatgggacactgtcaccccggaagccaaggatctgatcaataagatgctgaccattaacccatccaaacgcatcacagctgccgaagcccttaagcacccctggatctcgcaccgctccaccgtggcatcctgcatgcacagacaggagaccgtggactgcctgaagaagttcaatgccaggaggaaactgaagggagccattctcaccacgatgctggccaccaggaacttctccggagggaagagtgggggaaacaagaagagcgatggtgtgaagaaaagaaagtccagttccagcgttcagttaatggaatcctcagagagcaccaacaccaccatcgaggatgaagacaccaaagtgcggaaacaggaaattataaaagtgacagagcagctgattgaagccataagcaatggagattttgagtcctacacgaagatgtgcgaccctggcatgacagccttcgaacctgaggccctggggaacctggttgagggcctggacttccatcgattctattttgaaaacctgtggtcccggaacagcaagcccgtgcacaccaccatcctgaatccccacatccacctgatgggcgacgagtcagcctgcatcgcctacatccgcatcacgcagtacctggacgctggcggcatcccacgcaccgcccagtcggaggagacccgtgtctggcaccgccgggatggcaaatggcagatcgtccacttccacagatctggggcgccctccgtcctgccccactgagggaccaggctggggtcgc

SEQ ID NO: 3008 - DNA, 1565 bp, Homo sapiens
  source 1..1565: mol_type = unassigned DNA; mol_type = unassigned DNA
agaagccccgggctcgtcagtcaaaccggttctctgtttgcactcggcagcacgggcaggcaagtggtccctaggttcgggagcagagcagcagcgcctcagtcctggtcccccagtcccaagcctcacctgcctgcccagcgccaggatggccaccatcacctgcacccgcttcacggaagagtaccagctcttcgaggaattgggcaagggagccttctcggtggtgcgaaggtgtgtgaaggtgctggctggccaggagtatgctgccaagatcatcaacacaaagaagctgtcagccagagtccgactacatgacagcatctcagaggagggacaccactacctgatcttcgacctggtcactggtggggaactgtttgaagatatcgtggcccgggagtattacagtgaggcggatgccagtcactgtatccagcagatcctggaggctgtgctgcactgccaccagatgggggtggtgcaccgggacctgaagcctgagaatctgttgctggcctccaagctcaagggtgccgcagtgaagctggcagactttggcctggccatagaggtggagggggagcagcaggcatggtttgggtttgcagggactcctggatatctctccccagaagtgctgcggaaggacccgtacgggaagcctgtggacctgtgggcttgtggggtcatcctgtacatcctgctggttgggtaccccccgttctgggatgaggaccagcaccgcctgtaccagcagatcaaagccggcgcctatgatttcccatcgccggaatgggacactgtcaccccggaagccaaggatctgatcaataagatgctgaccattaacccatccaaacgcatcacagctgccgaagcccttaagcacccctggatctcgcaccgctccaccgtggcatcctgcatgcacagacaggagaccgtggactgcctgaagaagttcaatgccaggaggaaactgaagggagccattctcaccacgatgctggccaccaggaacttctccggagggaagagtgggggaaacaagaagagcgatggtgtgaagaaaagaaagtccagttccagcgttcagttaatggaatcctcagagagcaccaacaccaccatcgaggatgaagacaccaaaggtagggaggggccttcagtgtcgggaccccttagacttctggaaccagctctgagcagacctctttttcctgacagctcccacgtgccaacctcatttcttgctcatctacagagagcttcgctctggtgccttataaactgggcacactgggaggcatcattcccatggagggcgggggtggtactggaactactgctggtgtgtagataggttttcttattttatttatttttattttatttttttgagatgacgtctcgctctgtcgtccaggctggagtgcagtggcacgatctcggctcactgcaacctctgcctcccaggttcaagcgatcctcctgcctcagcctcccaagtagctgggatgacagatgcctgccaccacacctggctaattttttgtattttt

SEQ ID NO: 3009 - DNA, 557 bp, Homo sapiens
  source 1..557: mol_type = unassigned DNA; mol_type = unassigned DNA
atgtgcaattctctcctgaagtgagagggcccagcgggatctgcttgtagaggtgaagtcggccatttagtctggctagagtatagggcctgaggaacaggcctggaggagtctcggagaagcctcacatttaagaatcatggaaacggaggccagagagggcgagggatgtgcttgagtcactgcaacccaggcctcttcctctttccactgcaccccatggtcttcctggagaactcagaggccctggccagaagaccatcagaagctggagcgtgaagcccgcatctgccgcctgctgaagcaccccaacatcgtccgactacatgacagcatctcagaggagggacaccactacctgatcttcgacctggtcactggtggggaactgtttgaagatatcgtggcccgggagtattacagtgaggcggatgccagtcactgtatccagcagatcctggaggctgtgctgcactgccaccagatgggggtggtgcaccgggacctgaagcctgagaatctgttgctggcctccaagctcaagggtgccgcagtga

SEQ ID NO: 3010 - DNA, 540 bp, Homo sapiens
  source 1..540: mol_type = unassigned DNA; mol_type = unassigned DNA
aaaagatcacttgtggacaaagtttgctctattccacctcctccaggccctccttgggtccatcaccccaggggtgctgggtccatcccacccccaggcccacacaggcttgcagtattgtgtgcggtatggtcagggcgtccgagagcaggtttcgcagtggaaggcagcacgggcaggcaagtggtccctaggttcgggagcagagcagcagcgcctcagtcctggtcccccagtcccaagcctcacctgcctgcccagcgccaggatggccaccatcacctgcacccgcttcacggaagagtaccagctcttcgaggaattgggcaagggagccttctcggtggtgcgaaggtgtgtgaaggtgctggctggccaggagtatgctgccaagatcatcaacacaaagaagctgtcagccagagaccatcagaagctggagcgtgaagcccgcatctgccgcctgctgaagcaccccaacatcgtccgactacatgacagcatctcagaggagggacaccactacctgatcttcgacct

SEQ ID NO: 3011 - DNA, 554 bp, Homo sapiens
  source 1..554: mol_type = unassigned DNA; mol_type = unassigned DNA
acagtgccctgctcagaagccccgggctcgtcagtcaaaccggttctctgtttgcactcggcagcacgggcaggcaagtggtccctaggttcgggagcagagcagcagcgcctcagtcctggtcccccagtcccaagcctcacctgcctgcccagcgccaggatggccaccatcacctgcacccgcttcacggaagagtaccagctcttcgaggaattgggcaagggagccttctcggtggtgcgaaggtgtgtgaaggtgctggctggccaggagtatgctgccaagatcatcaacacaaagaagctgtcagccagagtgagagggcccagcgggatctgcttgtagaggtgaagtcggccatttagtctggctagagtatagggcctgaggaacaggcctggaggagtctcggagaagcctcacatttaagaatcatggaaacggaggccagagagggcgagggatgtgcttgagtcactgcaacccaggcctcttcctctttccactgcaccccatggtcttcctggagaactcagaggccctggccagaa

SEQ ID NO: 3012 - DNA, 3563 bp, Homo sapiens
  source 1..3563: mol_type = unassigned DNA; mol_type = unassigned DNA
ggtgactgtgcaccgacgtcggcgcgggctgcaccgccgcgtccgcccgcccgccagcatggccaccaccgccacctgcacccgtttcaccgacgactaccagctcttcgaggagcttggcaagggtgctttctctgtggtccgcaggtgtgtgaagaaaacctccacgcaggagtacgcagcaaaaatcatcaataccaagaagttgtctgcccgggatcaccagaaactagaacgtgaggctcggatatgtcgacttctgaaacatccaaacatcgtgcgcctccatgacagtatttctgaagaagggtttcactacctcgtgtttgaccttgttaccggcggggagctgtttgaagacattgtggccagagagtactacagtgaagcagatgccagccactgtatacatcagattctggagagtgttaaccacatccaccagcatgacatcgtccacagggacctgaagcctgagaacctgctgctggcgagtaaatgcaagggtgccgccgtcaagctggctgattttggcctagccatcgaagtacagggagagcagcaggcttggtttggttttgctggcaccccaggttacttgtcccctgaggtcttgaggaaagatccctatggaaaacctgtggatatctgggcctgcggggtcatcctgtatatcctcctggtgggctatcctcccttctgggatgaggatcagcacaagctgtatcagcagatcaaggctggagcctatgatttcccatcaccagaatgggacacggtaactcctgaagccaagaacttgatcaaccagatgctgaccataaacccagcaaagcgcatcacggctgaccaggctctcaagcacccgtgggtctgtcaacgatccacggtggcatccatgatgcatcgtcaggagactgtggagtgtttgcgcaagttcaatgcccggagaaaactgaagggtgccatcctcacgaccatgcttgtctccaggaacttctcagctgccaaaagcctattgaacaagaagtcggatggcggtgtcaaggagccacaaaccactgtggtacacaacgctacagatgggatcaagggctccacagagagctgcaacaccaccacagaagatgaggacctcaaagtgcgaaaacaggagatcattaagattacagaacagctgattgaagccatcaacaatggggactttgaggcctacacgaagatttgtgatccaggcctcacttcctttgagcctgaggcccttggtaacctcgtggaggggatggatttccataagttttactttgagaatctcctgtccaagaacagcaagcctatccataccaccatcctaaacccacacgtccacgtgattggggaggacgcagcgtgcatcgcctacatccgcctcacccagtacatcgacgggcagggtcggcctcgcaccagccagtcagaagagacccgggtctggcaccgtcgggatggcaagtggctcaatgtccactatcactgctcaggggcccctgccgcaccgctgcagtgagctcagccacaggggctttaggagattccagccggaggtccaaccttcgcagccagtggctctggagggcctgagtgacagcggcagtcctgtttgtttgaggtttaaaacaattcaattacaaaagcggcagcagccaatgcacgcccctgcatgcagccctcccgcccgcccttcgtgtctgtctctgctgtaccgaggtgttttttacatttaagaaaaaaaaaaaagaaaaaaagattgtttaaaaaaaaaaggaatccataccatgatgcgttttaaaaccaccgacagcccttgggttggcaagaaggcaggagtatgtatgaggtccatcctggcatgagcagtggctcacccaccggccttgaagaggtgagcttggcctctctggtccccatggacttagggggaccaggcaagaactctgacagagctttgggggccgtgatgtgattgcagctcctgaggtggcctgcttaccccaggtctaggaatgaacttctttggaacttgcataggcgcctagaatggggctgatgagaacatcgtgaccatcagacctacttgggagagaacgcagagctcccagcctgctgtggaggcagctgagaagtggtggcctcaggactgagagcccggacgttgctgtactgtcttgtttagtgtagaagggaagagaattggtgctgcagaagtgtacccgccatgaagccgatgagaaacctcgtgttagtctgacatgcactcactcatccatttctataggatgcacaatgcatgtgggccctaatattgaggccttatccctgcagctaggagggggaggggttgttgctgctttgcttcgtgttttcttctaacctggcaaggagagagccaggccctggtcagggctcccgtgccgcctttggcggttctgtttctgtgctgatctggaccatctttgtcttgccttttcacggtagtggtccccatgctgaccctcatctgggcctgggccctctgccaagtgcccctgtgggatgggaggagtgaggcagtgggagaagaggtggtggtcgtttctatgcattcaggctgcctttggggctgcctcccttcttattcttccttgctgcacgtccatctcttttcctgtctttgagattgacctgactgctctggcaagaagaagaggtgtccttacagaggcctctttactgaccaactgaagtatagacttactgctggacaatctgcatgggcatcacccctccccgcatgtaacccaaaagaggtgtccagagccaaggcttctaccttcattgtccctctctgtgctcaaggagttccattccaggaggaagagatctataccctaagcagatagcaaagaagataatggaggagcaattggtcatggccttggtttccctcaaaacaacgctgcagatttatctgcacaaacatctccacttttgggggaaaggtgggtagattccagttccctggactaccttcaggaggcacgagagctgggagaagaggcaaagctacaggtttacttgggagccagctgagaagagagcagactcacaggtgctggtgcttggatttagccaggctcctccgagcacctcatgcatgtcccagcccctgggccctagccctttcctgccctgcagtctgcagtgccagcacgcaaatcccttcaccacagggtttcgttttgctggcttgaagacaaatggtcttagaattcattgagacccatagcttcatatggctgctccagccccacttcttagcattcttactcctcttctggggctaatgtcagcatctatagacaatagactattaaaaaatcaccttttaaacaagaaacggaaggcatttgatgcagaatttttgcatgacaacatagaaataatttaaaaatagtgtttgttctgaatgttggtagacccttcatagctttgttacaatgaaaccttgaactgaaaatatttaataaaataacctttaaacagtc

SEQ ID NO: 3013 - DNA, 3720 bp, Homo sapiens
  source 1..3720: mol_type = unassigned DNA; mol_type = unassigned DNA
agtctcgcggtgctgccgggctcagccccgtctcctcctcttgctccctcggccgggcggcggtgactgtgcaccgacgtcggcgcgggctgcaccgccgcgtccgcccgcccgccagcatggccaccaccgccacctgcacccgtttcaccgacgactaccagctcttcgaggagcttggcaagggtgctttctctgtggtccgcaggtgtgtgaagaaaacctccacgcaggagtacgcagcaaaaatcatcaataccaagaagttgtctgcccgggatcaccagaaactagaacgtgaggctcggatatgtcgacttctgaaacatccaaacatcgtgcgcctccatgacagtatttctgaagaagggtttcactacctcgtgtttgaccttgttaccggcggggagctgtttgaagacattgtggccagagagtactacagtgaagcagatgccagccactgtatacatcagattctggagagtgttaaccacatccaccagcatgacatcgtccacagggacctgaagcctgagaacctgctgctggcgagtaaatgcaagggtgccgccgtcaagctggctgattttggcctagccatcgaagtacagggagagcagcaggcttggtttggttttgctggcaccccaggttacttgtcccctgaggtcttgaggaaagatccctatggaaaacctgtggatatctgggcctgcggggtcatcctgtatatcctcctggtgggctatcctcccttctgggatgaggatcagcacaagctgtatcagcagatcaaggctggagcctatgatttcccatcaccagaatgggacacggtaactcctgaagccaagaacttgatcaaccagatgctgaccataaacccagcaaagcgcatcacggctgaccaggctctcaagcacccgtgggtctgtcaacgatccacggtggcatccatgatgcatcgtcaggagactgtggagtgtttgcgcaagttcaatgcccggagaaaactgaagggtgccatcctcacgaccatgcttgtctccaggaacttctcagttggcaggcagagctccgcccccgcctcgcctgccgcgagcgccgccggcctggccgggcaagctgccaaaagcctattgaacaagaagtcggatggcggtgtcaagaaaaggaagtcgagttccagcgtgcacctaatggagccacaaaccactgtggtacacaacgctacagatgggatcaagggctccacagagagctgcaacaccaccacagaagatgaggacctcaaagtgcgaaaacaggagatcattaagattacagaacagctgattgaagccatcaacaatggggactttgaggcctacacgaagatttgtgatccaggcctcacttcctttgagcctgaggcccttggtaacctcgtggaggggatggatttccataagttttactttgagaatctcctgtccaagaacagcaagcctatccataccaccatcctaaacccacacgtccacgtgattggggaggacgcagcgtgcatcgcctacatccgcctcacccagtacatcgacgggcagggtcggcctcgcaccagccagtcagaagagacccgggtctggcaccgtcgggatggcaagtggctcaatgtccactatcactgctcaggggcccctgccgcaccgctgcagtgagctcagccacaggggctttaggagattccagccggaggtccaaccttcgcagccagtggctctggagggcctgagtgacagcggcagtcctgtttgtttgaggtttaaaacaattcaattacaaaagcggcagcagccaatgcacgcccctgcatgcagccctcccgcccgcccttcgtgtctgtctctgctgtaccgaggtgttttttacatttaagaaaaaaaaaaaagaaaaaaagattgtttaaaaaaaaaaggaatccataccatgatgcgttttaaaaccaccgacagcccttgggttggcaagaaggcaggagtatgtatgaggtccatcctggcatgagcagtggctcacccaccggccttgaagaggtgagcttggcctctctggtccccatggacttagggggaccaggcaagaactctgacagagctttgggggccgtgatgtgattgcagctcctgaggtggcctgcttaccccaggtctaggaatgaacttctttggaacttgcataggcgcctagaatggggctgatgagaacatcgtgaccatcagacctacttgggagagaacgcagagctcccagcctgctgtggaggcagctgagaagtggtggcctcaggactgagagcccggacgttgctgtactgtcttgtttagtgtagaagggaagagaattggtgctgcagaagtgtacccgccatgaagccgatgagaaacctcgtgttagtctgacatgcactcactcatccatttctataggatgcacaatgcatgtgggccctaatattgaggccttatccctgcagctaggagggggaggggttgttgctgctttgcttcgtgttttcttctaacctggcaaggagagagccaggccctggtcagggctcccgtgccgcctttggcggttctgtttctgtgctgatctggaccatctttgtcttgccttttcacggtagtggtccccatgctgaccctcatctgggcctgggccctctgccaagtgcccctgtgggatgggaggagtgaggcagtgggagaagaggtggtggtcgtttctatgcattcaggctgcctttggggctgcctcccttcttattcttccttgctgcacgtccatctcttttcctgtctttgagattgacctgactgctctggcaagaagaagaggtgtccttacagaggcctctttactgaccaactgaagtatagacttactgctggacaatctgcatgggcatcacccctccccgcatgtaacccaaaagaggtgtccagagccaaggcttctaccttcattgtccctctctgtgctcaaggagttccattccaggaggaagagatctataccctaagcagatagcaaagaagataatggaggagcaattggtcatggccttggtttccctcaaaacaacgctgcagatttatctgcacaaacatctccacttttgggggaaaggtgggtagattccagttccctggactaccttcaggaggcacgagagctgggagaagaggcaaagctacaggtttacttgggagccagctgagaagagagcagactcacaggtgctggtgcttggatttagccaggctcctccgagcacctcatgcatgtcccagcccctgggccctagccctttcctgccctgcagtctgcagtgccagcacgcaaatcccttcaccacagggtttcgttttgctggcttgaagacaaatggtcttagaattcattgagacccatagcttcatatggctgctccagccccacttcttagcattcttactcctcttctggggctaatgtcagcatctatagacaatagactattaaaaaatcaccttttaaacaagaaacggaaggcatttgatgcagaatttttgcatgacaacatagaaataatttaaaaatagtgtttgttctgaatgttggtagacccttcatagctttgttacaatgaaaccttgaactgaaaatatttaataaaataacctttaaacagtc

SEQ ID NO: 3014 - DNA, 1618 bp, Homo sapiens
  source 1..1618: mol_type = unassigned DNA; mol_type = unassigned DNA
cgacttctgaaacatccaaacatcgtgcgcctccatgacagtatttctgaagaagggtttcactacctcgtgtttgaccttgttaccggcggggagctgtttgaagacattgtggccagagagtactacagtgaagcagatgccagccactgtatacatcagattctggagagtgttaaccacatccaccagcatgacatcgtccacagggacctgaagcctgagaacctgctgctggcgagtaaatgcaagggtgccgccgtcaagctggctgattttggcctagccatcgaagtacagggagagcagcaggcttggtttggttttgctggcaccccaggttacttgtcccctgaggtcttgaggaaagatccctatggaaaacctgtggatatctgggcctgcggggtcatcctgtatatcctcctggtgggctatcctcccttctgggatgaggatcagcacaagctgtatcagcagatcaaggctggagcctatgatttcccatcaccagaatgggacacggtaactcctgaagccaagaacttgatcaaccagatgctgaccataaacccagcaaagcgcatcacggctgaccaggctctcaagcacccgtgggtctgtcaacgatccacggtggcatccatgatgcatcgtcaggagactgtggagtgtttgcgcaagttcaatgcccggagaaaactgaagggtgccatcctcacgaccatgcttgtctccaggaacttctcagctgccaaaagcctattgaacaagaagtcggatggcggtgtcaagccacagagcaacaacaaaaacagtctcgtaagcccagcccaagagcccgcgcccttgcagacggccatggagccacaaaccactgtggtacacaacgctacagatgggatcaagggctccacagagagctgcaacaccaccacagaagatgaggacctcaaagtgcgaaaacaggagatcattaagattacagaacagctgattgaagccatcaacaatggggactttgaggcctacacgaagatttgtgatccaggcctcacttcctttgagcctgaggcccttggtaacctcgtggaggggatggatttccataagttttactttgagaatctcctgtccaagaacagcaagcctatccataccaccatcctaaacccacacgtccacgtgattggggaggacgcagcgtgcatcgcctacatccgcctcacccagtacatcgacgggcagggtcggcctcgcaccagccagtcagaagagacccgggtctggcaccgtcgggatggcaagtggctcaatgtccactatcactgctcaggggcccctgccgcaccgctgcagtgagctcagccacaggggctttaggagattccagccggaggtccaaccttcgcagccagtggctctggagggcctgagtgacagcggcagtcctgtttgtttgaggtttaaaacaattcaattacaaaagcggcagcagccaatgcacgcccctgcatgcagccctcccgcccgcccttcgtgtctgtctctgctgtaccgaggtgttttttacatttaagaaaaaaaaaaaagaaaaaaagattgtttaaaaaaaaaa

SEQ ID NO: 3015 - DNA, 1820 bp, Homo sapiens
  source 1..1820: mol_type = unassigned DNA; mol_type = unassigned DNA
atggccaccaccgccacctgcacccgtttcaccgacgactaccagctcttcgaggagcttggcaagggtgctttctctgtggtccgcaggtgtgtgaagaaaacctccacgcaggagtacgcagcaaaaatcatcaataccaagaagttgtctgcccgggatcaccagaaactagaacgtgaggctcggatatgtcgacttctgaaacatccaaacatcgtgcgcctccatgacagtatttctgaagaagggtttcactacctcgtgtttgaccttgttaccggcggggagctgtttgaagacattgtggccagagagtactacagtgaagcagatgccagccactgtatacatcagattctggagagtgttaaccacatccaccagcatgacatcgtccacagggacctgaagcctgagaacctgctgctggcgagtaaatgcaagggtgccgccgtcaagctggctgattttggcctagccatcgaagtacagggagagcagcaggcttggtttggttttgctggcaccccaggttacttgtcccctgaggtcttgaggaaagatccctatggaaaacctgtggatatctgggcctgcggggtcatcctgtatatcctcctggtgggctatcctcccttctgggatgaggatcagcacaagctgtatcagcagatcaaggctggagcctatgatttcccatcaccagaatgggacacggtaactcctgaagccaagaacttgatcaaccagatgctgaccataaacccagcaaagcgcatcacggctgaccaggctctcaagcacccgtgggtctgtcaacgatccacggtggcatccatgatgcatcgtcaggagactgtggagtgtttgcgcaagttcaatgcccggagaaaactgaagggtgccatcctcacgaccatgcttgtctccaggaacttctcagctgccaaaagcctattgaacaagaagtcggatggcggtgtcaagaaaaggaagtcgagttccagcgtgcacctaatgccacagagcaacaacaaaaacagtctcgtaagcccagcccaagagcccgcgcccttgcagacggccatggagccacaaaccactgtggtacacaacgctacagatgggatcaagggctccacagagagctgcaacaccaccacagaagatgaggacctcaaagtgcgaaaacaggagatcattaagattacagaacagctgattgaagccatcaacaatggggactttgaggcctacacgaagatttgtgatccaggcctcacttcctttgagcctgaggcccttggtaacctcgtggaggggatggatttccataagttttactttgagaatctcctgtccaagaacagcaagcctatccataccaccatcctaaacccacacgtccacgtgattggggaggacgcagcgtgcatcgcctacatccgcctcacccagtacatcgacgggcagggtcggcctcgcaccagccagtcagaagagacccgggtctggcaccgtcgggatggcaagtggctcaatgtccactatcactgctcaggggcccctgccgcaccgctgcagtgagctcagccacaggggctttaggagattccagccggaggtccaaccttcgcagccagtggctctggagggcctgagtgacagcggcagtcctgtttgtttgaggtttaaaacaattcaattacaaaagcggcagcagccaatgcacgcccctgcatgcagccctcccgcccgcccttcgtgtctgtctctgctgtaccgaggtgttttttacatttaagaaaaaaaaaaaa

SEQ ID NO: 3016 - DNA, 1822 bp, Homo sapiens
  source 1..1822: mol_type = unassigned DNA; mol_type = unassigned DNA
gtcggcgcgggctgcaccgccgcgtccgcccgcccgccagcatggccaccaccgccacctgcacccgtttcaccgacgactaccagctcttcgaggagcttggcaagggtgctttctctgtggtccgcaggtgtgtgaagaaaacctccacgcaggagtacgcagcaaaaatcatcaataccaagaagttgtctgcccgggatcaccagaaactagaacgtgaggctcggatatgtcgacttctgaaacatccaaacatcgtgcgcctccatgacagtatttctgaagaagggtttcactacctcgtgtttgaccttgttaccggcggggagctgtttgaagacattgtggccagagagtactacagtgaagcagatgccagccactgtatacatcagattctggagagtgttaaccacatccaccagcatgacatcgtccacagggacctgaagcctgagaacctgctgctggcgagtaaatgcaagggtgccgccgtcaagctggctgattttggcctagccatcgaagtacagggagagcagcaggcttggtttggttttgctggcaccccaggttacttgtcccctgaggtcttgaggaaagatccctatggaaaacctgtggatatctgggcctgcggggtcatcctgtatatcctcctggtgggctatcctcccttctgggatgaggatcagcacaagctgtatcagcagatcaaggctggagcctatgatttcccatcaccagaatgggacacggtaactcctgaagccaagaacttgatcaaccagatgctgaccataaacccagcaaagcgcatcacggctgaccaggctctcaagcacccgtgggtctgtcaacgatccacggtggcatccatgatgcatcgtcaggagactgtggagtgtttgcgcaagttcaatgcccggagaaaactgaagggtgccatcctcacgaccatgcttgtctccaggaacttctcagttggcaggcagagctccgcccccgcctcgcctgccgcgagcgccgccggcctggccgggcaagctgccaaaagcctattgaacaagaagtcggatggcggtgtcaaggagccacaaaccactgtggtacacaacgctacagatgggatcaagggctccacagagagctgcaacaccaccacagaagatgaggacctcaaagtgcgaaaacaggagatcattaagattacagaacagctgattgaagccatcaacaatggggactttgaggcctacacgaagatttgtgatccaggcctcacttcctttgagcctgaggcccttggtaacctcgtggaggggatggatttccataagttttactttgagaatctcctgtccaagaacagcaagcctatccataccaccatcctaaacccacacgtccacgtgattggggaggacgcagcgtgcatcgcctacatccgcctcacccagtacatcgacgggcagggtcggcctcgcaccagccagtcagaagagacccgggtctggcaccgtcgggatggcaagtggctcaatgtccactatcactgctcaggggcccctgccgcaccgctgcagtgagctcagccacaggggctttaggagattccagccggaggtccaaccttcgcagccagtggctctggagggcctgagtgacagcggcagtcctgtttgtttgaggtttaaaacaattcaattacaaaagcggcagcagccaatgcacgcccctgcatgcagccctcccgcccgcccttcgtgtctgtctctgctgtaccgaggtgttttttacatttaagaaaaaaaaaaaa

SEQ ID NO: 3017 - DNA, 1224 bp, Homo sapiens
  source 1..1224: mol_type = unassigned DNA; mol_type = unassigned DNA
gtatcagcagatcaaggctggagcctatgatttcccatcaccagaatgggacacggtaactcctgaagccaagaacttgatcaaccagatgctgaccataaacccagcaaagcgcatcacggctgaccaggctctcaagcacccgtgggtctgtcaacgatccacggtggcatccatgatgcatcgtcaggagactgtggagtgtttgcgcaagttcaatgcccggagaaaactgaagggtgccatcctcacgaccatgcttgtctccaggaacttctcagctgccaaaagcctattgaacaagaagtcggatggcggtgtcaagccacagagcaacaacaaaaacagtctcgtaagcccagcccaagagcccgcgcccttgcagacggccatggagccacaaaccactgtggtacacaacgctacagatgggatcaagggctccacagagagctgcaacaccaccacagaagatgaggacctcaaagctgccccgctccgcactgggaatggcagctcggtgcctgaaggacggagctcccgggacagaacagccccctctgcaggcatgcagccccagccttctctctgctcctcagccatgcgaaaacaggagatcattaagattacagaacagctgattgaagccatcaacaatggggactttgaggcctacacgaagatttgtgatccaggcctcacttcctttgagcctgaggcccttggtaacctcgtggaggggatggatttccataagttttactttgagaatctcctgtccaagaacagcaagcctatccataccaccatcctaaacccacacgtccacgtgattggggaggacgcagcgtgcatcgcctacatccgcctcacccagtacatcgacgggcagggtcggcctcgcaccagccagtcagaagagacccgggtctggcaccgtcgggatggcaagtggctcaatgtccactatcactgctcaggggcccctgccgcaccgctgcagtgagctcagccacaggggctttaggagattccagccggaggtccaaccttcgcagccagtggctctggagggcctgagtgacagcggcagtcctgtttgtttgaggtttaaaacaattcaattacaaaagcggcagcagccaatgcacgcccctgcatgcagccctcccgcccgcccttcgtgtctgtctctgctgtaccgaggtgttttttacatttaag

SEQ ID NO: 3018 - DNA, 2629 bp, Homo sapiens
  source 1..2629: mol_type = unassigned DNA; mol_type = unassigned DNA
cccgtctcctcctcttgctccctcggccgggcggcggtgactgtgcaccgacgtcggcgcgggctgcaccgccgcgtccgcccgcccgccagcatggccaccaccgccacctgcacccgtttcaccgacgactaccagctcttcgaggagcttggcaagggatgataccctctttttaatctttccttccccgaccttcaactgttcctgctgagagaagggcagggtctctctgctcccttctgccctggttctcttggccgggaccgcagggctgtctgagatgcagcaggggtgctttctctgtggtccgcaggtgtgtgaagaaaacctccacgcaggagtacgcagcaaaaatcatcaataccaagaagttgtctgcccgggatcaccagaaactagaacgtgaggctcggatatgtcgacttctgaaacatccaaacatcgccactgtatacatcagattctggagagtgttaaccacatccaccagcatgacatcgtccacagggacctgaagcctgagaacctgctgctggcgagtaaatgcaagggtgccgccgtcaagctggctgattttggcctagccatcgaagtacagggagagcagcaggcttggtttggttttgctggcaccccaggttacttgtcccctgaggtcttgaggaaagatccctatggaaaacctgtggatatctgggcctgcggggtcatcctgtatatcctcctggtgggctatcctcccttctgggatgaggatcagcacaagctgtatcagcagatcaaggctggagcctatgatttcccatcaccagaatgggacacggtaactcctgaagccaagaacttgatcaaccagatgctgaccataaacccagcaaagcgcatcacggctgaccaggctctcaagcacccgtgggtctgtcaacgatccacggtggcatccatgatgcatcgtcaggagactgtggagtgtttgcgcaagttcaatgcccggagaaaactgaagggtgccatcctcacgaccatgcttgtctccaggaacttctcagttggcaggcagagctccgcccccgcctcgcctgccgcgagcgccgccggcctggccgggcaagctgccaaaagcctattgaacaagaagtcggatggcggtgtcaagccacagagcaacaacaaaaacagtctcgtaagcccagcccaagagcccgcgcccttgcagacggccatggagccacaaaccactgtggtacacaacgctacagatgggatcaagggctccacagagagctgcaacaccaccacagaagatgaggacctcaaagctgccccgctccgcactgggaatggcagctcggtgcctgaaggacggagctcccgggacagaacagccccctctgcaggcatgcagccccagccttctctctgctcctcagccattacgtctgtgctggaggatgcctttgtctgctgcttttcctcccaccatctatccttgcagagtttctaagcacaaccctcttcgcccgtggggccccagtcaggtcatccagatgggtctggtggggttggagagggtgtgtgtgttgtgggtgcacacctgcctgctgcttttggaagccgatcgaactccttgcttcccttaacctgctgcttgctcacctggagctgtggcctagcggggctgacggctgtggggccccctcctggatgtgcctttggctgcgctgccctgtcccaactgtgctgcttggctgtgctggcccggctgggccgtggtggtgctgttctaacgcttgcagttgtcttgcagccttttgctcctgtgaggaaagggttgtggcctggccccgcccagggctcgggttaggatgagcccaagctcaacccaagctctcccttaccctggtggcagcccctgctggtagtggcattccctataagagaagcccatgccggcaggacatcaccagctgtcccttggctttggatgggttggggaggaggcctctggagggcaccacctctgcctgcctgtcagtctgagccctgtctggttttcctgaggaacacgtcctggcaatgagagctggtgtgaaatgtgcagctttcccaagcctcgagagtgcgaaaacaggagatcattaagattacagaacagctgattgaagccatcaacaatggggactttgaggcctacacgaagatttgtgatccaggcctcacttcctttgagcctgaggcccttggtaacctcgtggaggggatggatttccataagttttactttgagaatctcctgtccaagaacagcaagcctatccataccaccatcctaaacccacacgtccacgtgattggggaggacgcagcgtgcatcgcctacatccgcctcacccagtacatcgacgggcagggtcggcctcgcaccagccagtcagaagagacccgggtctggcaccgtcgggatggcaagtggctcaatgtccactatcactgctcaggggcccctgccgcaccgctgcagtgagctcagccacaggggctttaggagattccagccggaggtccaaccttcgcagccagtggctctggagggcctgagtgacagcggcagtcctgtttgtttgag

SEQ ID NO: 3019 - DNA, 512 bp, Homo sapiens
  source 1..512: mol_type = unassigned DNA; mol_type = unassigned DNA
ggtgccatcctcacgaccatgcttgtctccaggaacttctcagctgccaaaagcctattgaacaagaagtcggatggcggtgtcaagccacagagcaacaacaaaaacagtctcgagccacaaaccactgtggtacacaacgctacagatgggatcaagggctccacagagagctgcaacaccaccacagaagatgaggacctcaaagctcggtgcctgaaggacggagctcccgggacagaacagccccctctgcaggcatgcagccccagccttctctctgctcctcagccatgcgaaaacaggagatcattaagattacagaacagctgattgaagccatcaacaatggggactttgaggcctacacgaagatttgtgatccaggcctcacttcctttgagcctgaggcccttggtaacctcgtggaggggatggatttccataagttttactttgagaatctcctgtccaagaacagcaagcctatccataccaccatcctaaaccca

SEQ ID NO: 3020 - DNA, 1555 bp, Homo sapiens
  source 1..1555: mol_type = unassigned DNA; mol_type = unassigned DNA
ataactaatggctgggcttcaggagaaagtggtcattgtctctgcagactgcagagagggagacgggagggaaggtgtgttcgctcttcctgccaagggccctagagacagagaagagggatgtctttgtcataagcgatcacaggggactcctgaggactggggagggctctctgtaacttgggaggttccccagtaggtaaattgatggatttttctcccccacagtgcgaaaacaggagatcattaagattacagaacagctgattgaagccatcaacaatggggactttgaggcctacacgaagatttgtgatccaggcctcacttcctttgagcctgaggcccttggtaacctcgtggaggggatggatttccataagttttactttgagaatcgtgagtgggttcgtgctgctgatatactcctgcctgcccctttacccctttgtctctgtctcctgctcaccttctcatcccagttgcccacttttcccttatttgaccttcgtgctgcactcctactctgtatgcttgtccccttgtgccccgatggttgtagacaggcacctttgaaggccctgctcctgagctccaagtgccattcattctgcagctgctttgtggcagtgccagtcaccacaatcaagctcacttatttcttgccgggcgcggtggcttacgcctgtaatcccaacactttgggaggctgaggctggcggatcacgaggtcaggagatcgaggccatcctggctaacacggtgaaaccccatctctactaaaaatacaaaaaattagccgggcgtggtggcggtgcctgtagtcccagctactcgggtggctgaggcaggagaatgatgtgaacctgggaggcagagcttgcagtgagccaagatcaggccactgcactccagcctgggcaacagagcaagactccatctcaaaaaaaaagaaaaaattatttaagcctcacctctttccaagacggattggaaggaaaccctttgagattaggttgagatgatctcagcacataagaactaagctctgtgtctgcaggtttcacaatagaggaaattaaaaccaggataagaatgtgcaaaccagggcactgttggtgatttgcgagatcggaagttgtggctagaatcttcctgactatggaggaaggcagacgtcttgtatagggggtggggtgtacattctggacagttcatggaaaataaggggataagaagctgaatcatcaccccctcccatctttctctctgctctatgagaccctccccttccttatttttatctcttcccactttatgctgggccttccctatcctgccctgagttatagttagtcactaacttctccgctggctcccacccttatcacatctcagctacatatataaactctctgttatctaagtaattctattagccagaagcaattccagagtttatattagtactaggaaggtgtcatgtagcccctgtctaacatttgaattgaactaaaatgtgaatctcaataaaagcaacacagttttcacagca

SEQ ID NO: 3021 - DNA, 773 bp, Homo sapiens
  source 1..773: mol_type = unassigned DNA; mol_type = unassigned DNA
gcagatcaaggctggagcctatgatttcccatcaccagaatgggacacggtaactcctgaagccaagaacttgatcaaccagatgctgaccataaacccagcaaagcgcatcacggctgaccaggctctcaagcacccgtgggtctgtcaacgatccacggtggcatccatgatgcatcgtcaggagactgtggagtgtttgcgcaagttcaatgcccggagaaaactgaagggtgccatcctcacgaccatgcttgtctccaggaacttctcagctgccaaaagcctattgaacaagaagtcggatggcggtgtcaaggtaagtgtctccagcctctgaacagactggcctctttctccccgcagtcactatgggaattcttggcacctggttccccctttcccagggaatcttcctatccttgctagtctgctttaaaccagatgcctttgtgctcagaacagaaggttctgctggcctgagagggaagtagggaggtatttttcctggccctagctggatgggaatgactcaggggaagtgatccaaatcatagtttataccagagctgaatccggaacctgacttctacacggatgcttcatctccagggcttgactctgggttttttaggtcatttggttatctttctttttttcctttttagagcacaaatccttttaatcaaatgaaagccaaatttgcctgagtgattcaggcagggtatagggcttggaacctgaaaccactctccttttggtctttttccttc

SEQ ID NO: 3022 - DNA, 747 bp, Homo sapiens
  source 1..747: mol_type = unassigned DNA; mol_type = unassigned DNA
ttggattgggtctctcctccacgttggttgtggtttaatgtcttaaaagtggctcttacctcctggacactcctctccaggattctcagggttgggtctctgtgtcattggtctcattactcttcaacttcagtagtagctctgtccttcctgggcagcgatattttagtgtttatgttggtctcaaagctgtgacttttgggtgttaccggcggggagctgtttgaagacattgtggccagagagtactacagtgaagcagatgccagccactgtatacatcagattctggagagtgttaaccacatccaccagcatgacatcgtccacagggacctgaagcctgagaacctgctgctggcgagtaaatgcaagggtgccgccgtcaagctggctgattttggcctagccatcgaagtacagggagagcagcaggcttggtttggttttgctggcaccccaggttacttgtcccctgaggtcttgaggaaagatccctatggaaaacctgtggatatctgggcctgcggggtcatcctgtatatcctcctggtgggctatcctcccttctgggatgaggatcagcacaagctgtatcagcagatcaaggctggagcctatgatttcccatcaccagaatgggacacggtaactcctgaagccaagaacttgatcaaccagatgctgaccataaacccagcaaagcgcatcacggctgaccaggctctcaagcacccgtgggtctgt

SEQ ID NO: 3023 - DNA, 3767 bp, Homo sapiens
  source 1..3767: mol_type = unassigned DNA; mol_type = unassigned DNA
ctccccggtaaagtctcgcggtgctgccgggctcagccccgtctcctcctcttgctccctcggccgggcggcggtgactgtgcaccgacgtcggcgcgggctgcaccgccgcgtccgcccgcccgccagcatggccaccaccgccacctgcacccgtttcaccgacgactaccagctcttcgaggagcttggcaagggtgctttctctgtggtccgcaggtgtgtgaagaaaacctccacgcaggagtacgcagcaaaaatcatcaataccaagaagttgtctgcccgggatcaccagaaactagaacgtgaggctcggatatgtcgacttctgaaacatccaaacatcgtgcgcctccatgacagtatttctgaagaagggtttcactacctcgtgtttgaccttgttaccggcggggagctgtttgaagacattgtggccagagagtactacagtgaagcagatgccagccactgtatacatcagattctggagagtgttaaccacatccaccagcatgacatcgtccacagggacctgaagcctgagaacctgctgctggcgagtaaatgcaagggtgccgccgtcaagctggctgattttggcctagccatcgaagtacagggagagcagcaggcttggtttggttttgctggcaccccaggttacttgtcccctgaggtcttgaggaaagatccctatggaaaacctgtggatatctgggcctgcggggtcatcctgtatatcctcctggtgggctatcctcccttctgggatgaggatcagcacaagctgtatcagcagatcaaggctggagcctatgatttcccatcaccagaatgggacacggtaactcctgaagccaagaacttgatcaaccagatgctgaccataaacccagcaaagcgcatcacggctgaccaggctctcaagcacccgtgggtctgtcaacgatccacggtggcatccatgatgcatcgtcaggagactgtggagtgtttgcgcaagttcaatgcccggagaaaactgaagggtgccatcctcacgaccatgcttgtctccaggaacttctcagttggcaggcagagctccgcccccgcctcgcctgccgcgagcgccgccggcctggccgggcaagctgccaaaagcctattgaacaagaagtcggatggcggtgtcaagccacagagcaacaacaaaaacagtctcgtaagcccagcccaagagcccgcgcccttgcagacggccatggagccacaaaccactgtggtacacaacgctacagatgggatcaagggctccacagagagctgcaacaccaccacagaagatgaggacctcaaagtgcgaaaacaggagatcattaagattacagaacagctgattgaagccatcaacaatggggactttgaggcctacacgaagatttgtgatccaggcctcacttcctttgagcctgaggcccttggtaacctcgtggaggggatggatttccataagttttactttgagaatctcctgtccaagaacagcaagcctatccataccaccatcctaaacccacacgtccacgtgattggggaggacgcagcgtgcatcgcctacatccgcctcacccagtacatcgacgggcagggtcggcctcgcaccagccagtcagaagagacccgggtctggcaccgtcgggatggcaagtggctcaatgtccactatcactgctcaggggcccctgccgcaccgctgcagtgagctcagccacaggggctttaggagattccagccggaggtccaaccttcgcagccagtggctctggagggcctgagtgacagcggcagtcctgtttgtttgaggtttaaaacaattcaattacaaaagcggcagcagccaatgcacgcccctgcatgcagccctcccgcccgcccttcgtgtctgtctctgctgtaccgaggtgttttttacatttaagaaaaaaaaaaaagaaaaaaagattgtttaaaaaaaaaaggaatccataccatgatgcgttttaaaaccaccgacagcccttgggttggcaagaaggcaggagtatgtatgaggtccatcctggcatgagcagtggctcacccaccggccttgaagaggtgagcttggcctctctggtccccatggacttagggggaccaggcaagaactctgacagagctttgggggccgtgatgtgattgcagctcctgaggtggcctgcttaccccaggtctaggaatgaacttctttggaacttgcataggcgcctagaatggggctgatgagaacatcgtgaccatcagacctacttgggagagaacgcagagctcccagcctgctgtggaggcagctgagaagtggtggcctcaggactgagagcccggacgttgctgtactgtcttgtttagtgtagaagggaagagaattggtgctgcagaagtgtacccgccatgaagccgatgagaaacctcgtgttagtctgacatgcactcactcatccatttctataggatgcacaatgcatgtgggccctaatattgaggccttatccctgcagctaggagggggaggggttgttgctgctttgcttcgtgttttcttctaacctggcaaggagagagccaggccctggtcagggctcccgtgccgcctttggcggttctgtttctgtgctgatctggaccatctttgtcttgccttttcacggtagtggtccccatgctgaccctcatctgggcctgggccctctgccaagtgcccctgtgggatgggaggagtgaggcagtgggagaagaggtggtggtcgtttctatgcattcaggctgcctttggggctgcctcccttcttattcttccttgctgcacgtccatctcttttcctgtctttgagattgacctgactgctctggcaagaagaagaggtgtccttacagaggcctctttactgaccaactgaagtatagacttactgctggacaatctgcatgggcatcacccctccccgcatgtaacccaaaagaggtgtccagagccaaggcttctaccttcattgtccctctctgtgctcaaggagttccattccaggaggaagagatctataccctaagcagatagcaaagaagataatggaggagcaattggtcatggccttggtttccctcaaaacaacgctgcagatttatctgcacaaacatctccacttttgggggaaaggtgggtagattccagttccctggactaccttcaggaggcacgagagctgggagaagaggcaaagctacaggtttacttgggagccagctgagaagagagcagactcacaggtgctggtgcttggatttagccaggctcctccgagcacctcatgcatgtcccagcccctgggccctagccctttcctgccctgcagtctgcagtgccagcacgcaaatcccttcaccacagggtttcgttttgctggcttgaagacaaatggtcttagaattcattgagacccatagcttcatatggctgctccagccccacttcttagcattcttactcctcttctggggctaatgtcagcatctatagacaatagactattaaaaaatcaccttttaaacaagaaacggaaggcatttgatgcagaatttttgcatgacaacatagaaataatttaaaaatagtgtttgttctgaatgttggtagacccttcatagctttgttacaatgaaaccttgaactgaaaatatttaataaaataacctttaaacagtc

SEQ ID NO: 3024 - DNA, 3818 bp, Homo sapiens
  source 1..3818: mol_type = unassigned DNA; mol_type = unassigned DNA
ctccccggtaaagtctcgcggtgctgccgggctcagccccgtctcctcctcttgctccctcggccgggcggcggtgactgtgcaccgacgtcggcgcgggctgcaccgccgcgtccgcccgcccgccagcatggccaccaccgccacctgcacccgtttcaccgacgactaccagctcttcgaggagcttggcaagggtgctttctctgtggtccgcaggtgtgtgaagaaaacctccacgcaggagtacgcagcaaaaatcatcaataccaagaagttgtctgcccgggatcaccagaaactagaacgtgaggctcggatatgtcgacttctgaaacatccaaacatcgtgcgcctccatgacagtatttctgaagaagggtttcactacctcgtgtttgaccttgttaccggcggggagctgtttgaagacattgtggccagagagtactacagtgaagcagatgccagccactgtatacatcagattctggagagtgttaaccacatccaccagcatgacatcgtccacagggacctgaagcctgagaacctgctgctggcgagtaaatgcaagggtgccgccgtcaagctggctgattttggcctagccatcgaagtacagggagagcagcaggcttggtttggttttgctggcaccccaggttacttgtcccctgaggtcttgaggaaagatccctatggaaaacctgtggatatctgggcctgcggggtcatcctgtatatcctcctggtgggctatcctcccttctgggatgaggatcagcacaagctgtatcagcagatcaaggctggagcctatgatttcccatcaccagaatgggacacggtaactcctgaagccaagaacttgatcaaccagatgctgaccataaacccagcaaagcgcatcacggctgaccaggctctcaagcacccgtgggtctgtcaacgatccacggtggcatccatgatgcatcgtcaggagactgtggagtgtttgcgcaagttcaatgcccggagaaaactgaagggtgccatcctcacgaccatgcttgtctccaggaacttctcagctgccaaaagcctattgaacaagaagtcggatggcggtgtcaagccacagagcaacaacaaaaacagtctcgtaagcccagcccaagagcccgcgcccttgcagacggccatggagccacaaaccactgtggtacacaacgctacagatgggatcaagggctccacagagagctgcaacaccaccacagaagatgaggacctcaaagctgccccgctccgcactgggaatggcagctcggtgcctgaaggacggagctcccgggacagaacagccccctctgcaggcatgcagccccagccttctctctgctcctcagccatgcgaaaacaggagatcattaagattacagaacagctgattgaagccatcaacaatggggactttgaggcctacacgaagatttgtgatccaggcctcacttcctttgagcctgaggcccttggtaacctcgtggaggggatggatttccataagttttactttgagaatctcctgtccaagaacagcaagcctatccataccaccatcctaaacccacacgtccacgtgattggggaggacgcagcgtgcatcgcctacatccgcctcacccagtacatcgacgggcagggtcggcctcgcaccagccagtcagaagagacccgggtctggcaccgtcgggatggcaagtggctcaatgtccactatcactgctcaggggcccctgccgcaccgctgcagtgagctcagccacaggggctttaggagattccagccggaggtccaaccttcgcagccagtggctctggagggcctgagtgacagcggcagtcctgtttgtttgaggtttaaaacaattcaattacaaaagcggcagcagccaatgcacgcccctgcatgcagccctcccgcccgcccttcgtgtctgtctctgctgtaccgaggtgttttttacatttaagaaaaaaaaaaaagaaaaaaagattgtttaaaaaaaaaaggaatccataccatgatgcgttttaaaaccaccgacagcccttgggttggcaagaaggcaggagtatgtatgaggtccatcctggcatgagcagtggctcacccaccggccttgaagaggtgagcttggcctctctggtccccatggacttagggggaccaggcaagaactctgacagagctttgggggccgtgatgtgattgcagctcctgaggtggcctgcttaccccaggtctaggaatgaacttctttggaacttgcataggcgcctagaatggggctgatgagaacatcgtgaccatcagacctacttgggagagaacgcagagctcccagcctgctgtggaggcagctgagaagtggtggcctcaggactgagagcccggacgttgctgtactgtcttgtttagtgtagaagggaagagaattggtgctgcagaagtgtacccgccatgaagccgatgagaaacctcgtgttagtctgacatgcactcactcatccatttctataggatgcacaatgcatgtgggccctaatattgaggccttatccctgcagctaggagggggaggggttgttgctgctttgcttcgtgttttcttctaacctggcaaggagagagccaggccctggtcagggctcccgtgccgcctttggcggttctgtttctgtgctgatctggaccatctttgtcttgccttttcacggtagtggtccccatgctgaccctcatctgggcctgggccctctgccaagtgcccctgtgggatgggaggagtgaggcagtgggagaagaggtggtggtcgtttctatgcattcaggctgcctttggggctgcctcccttcttattcttccttgctgcacgtccatctcttttcctgtctttgagattgacctgactgctctggcaagaagaagaggtgtccttacagaggcctctttactgaccaactgaagtatagacttactgctggacaatctgcatgggcatcacccctccccgcatgtaacccaaaagaggtgtccagagccaaggcttctaccttcattgtccctctctgtgctcaaggagttccattccaggaggaagagatctataccctaagcagatagcaaagaagataatggaggagcaattggtcatggccttggtttccctcaaaacaacgctgcagatttatctgcacaaacatctccacttttgggggaaaggtgggtagattccagttccctggactaccttcaggaggcacgagagctgggagaagaggcaaagctacaggtttacttgggagccagctgagaagagagcagactcacaggtgctggtgcttggatttagccaggctcctccgagcacctcatgcatgtcccagcccctgggccctagccctttcctgccctgcagtctgcagtgccagcacgcaaatcccttcaccacagggtttcgttttgctggcttgaagacaaatggtcttagaattcattgagacccatagcttcatatggctgctccagccccacttcttagcattcttactcctcttctggggctaatgtcagcatctatagacaatagactattaaaaaatcaccttttaaacaagaaacggaaggcatttgatgcagaatttttgcatgacaacatagaaataatttaaaaatagtgtttgttctgaatgttggtagacccttcatagctttgttacaatgaaaccttgaactgaaaatatttaataaaataacctttaaacagtc

SEQ ID NO: 3025 - DNA, 3824 bp, Homo sapiens
  source 1..3824: mol_type = unassigned DNA; mol_type = unassigned DNA
ctccccggtaaagtctcgcggtgctgccgggctcagccccgtctcctcctcttgctccctcggccgggcggcggtgactgtgcaccgacgtcggcgcgggctgcaccgccgcgtccgcccgcccgccagcatggccaccaccgccacctgcacccgtttcaccgacgactaccagctcttcgaggagcttggcaagggtgctttctctgtggtccgcaggtgtgtgaagaaaacctccacgcaggagtacgcagcaaaaatcatcaataccaagaagttgtctgcccgggatcaccagaaactagaacgtgaggctcggatatgtcgacttctgaaacatccaaacatcgtgcgcctccatgacagtatttctgaagaagggtttcactacctcgtgtttgaccttgttaccggcggggagctgtttgaagacattgtggccagagagtactacagtgaagcagatgccagccactgtatacatcagattctggagagtgttaaccacatccaccagcatgacatcgtccacagggacctgaagcctgagaacctgctgctggcgagtaaatgcaagggtgccgccgtcaagctggctgattttggcctagccatcgaagtacagggagagcagcaggcttggtttggttttgctggcaccccaggttacttgtcccctgaggtcttgaggaaagatccctatggaaaacctgtggatatctgggcctgcggggtcatcctgtatatcctcctggtgggctatcctcccttctgggatgaggatcagcacaagctgtatcagcagatcaaggctggagcctatgatttcccatcaccagaatgggacacggtaactcctgaagccaagaacttgatcaaccagatgctgaccataaacccagcaaagcgcatcacggctgaccaggctctcaagcacccgtgggtctgtcaacgatccacggtggcatccatgatgcatcgtcaggagactgtggagtgtttgcgcaagttcaatgcccggagaaaactgaagggtgccatcctcacgaccatgcttgtctccaggaacttctcagctgccaaaagcctattgaacaagaagtcggatggcggtgtcaagaaaaggaagtcgagttccagcgtgcacctaatgccacagagcaacaacaaaaacagtctcgtaagcccagcccaagagcccgcgcccttgcagacggccatggagccacaaaccactgtggtacacaacgctacagatgggatcaagggctccacagagagctgcaacaccaccacagaagatgaggacctcaaaggtagggtgcctgaaggacggagctcccgggacagaacagccccctctgcaggcatgcagccccagccttctctctgctcctcagccatgcgaaaacaggagatcattaagattacagaacagctgattgaagccatcaacaatggggactttgaggcctacacgaagatttgtgatccaggcctcacttcctttgagcctgaggcccttggtaacctcgtggaggggatggatttccataagttttactttgagaatctcctgtccaagaacagcaagcctatccataccaccatcctaaacccacacgtccacgtgattggggaggacgcagcgtgcatcgcctacatccgcctcacccagtacatcgacgggcagggtcggcctcgcaccagccagtcagaagagacccgggtctggcaccgtcgggatggcaagtggctcaatgtccactatcactgctcaggggcccctgccgcaccgctgcagtgagctcagccacaggggctttaggagattccagccggaggtccaaccttcgcagccagtggctctggagggcctgagtgacagcggcagtcctgtttgtttgaggtttaaaacaattcaattacaaaagcggcagcagccaatgcacgcccctgcatgcagccctcccgcccgcccttcgtgtctgtctctgctgtaccgaggtgttttttacatttaagaaaaaaaaaaaagaaaaaaagattgtttaaaaaaaaaaggaatccataccatgatgcgttttaaaaccaccgacagcccttgggttggcaagaaggcaggagtatgtatgaggtccatcctggcatgagcagtggctcacccaccggccttgaagaggtgagcttggcctctctggtccccatggacttagggggaccaggcaagaactctgacagagctttgggggccgtgatgtgattgcagctcctgaggtggcctgcttaccccaggtctaggaatgaacttctttggaacttgcataggcgcctagaatggggctgatgagaacatcgtgaccatcagacctacttgggagagaacgcagagctcccagcctgctgtggaggcagctgagaagtggtggcctcaggactgagagcccggacgttgctgtactgtcttgtttagtgtagaagggaagagaattggtgctgcagaagtgtacccgccatgaagccgatgagaaacctcgtgttagtctgacatgcactcactcatccatttctataggatgcacaatgcatgtgggccctaatattgaggccttatccctgcagctaggagggggaggggttgttgctgctttgcttcgtgttttcttctaacctggcaaggagagagccaggccctggtcagggctcccgtgccgcctttggcggttctgtttctgtgctgatctggaccatctttgtcttgccttttcacggtagtggtccccatgctgaccctcatctgggcctgggccctctgccaagtgcccctgtgggatgggaggagtgaggcagtgggagaagaggtggtggtcgtttctatgcattcaggctgcctttggggctgcctcccttcttattcttccttgctgcacgtccatctcttttcctgtctttgagattgacctgactgctctggcaagaagaagaggtgtccttacagaggcctctttactgaccaactgaagtatagacttactgctggacaatctgcatgggcatcacccctccccgcatgtaacccaaaagaggtgtccagagccaaggcttctaccttcattgtccctctctgtgctcaaggagttccattccaggaggaagagatctataccctaagcagatagcaaagaagataatggaggagcaattggtcatggccttggtttccctcaaaacaacgctgcagatttatctgcacaaacatctccacttttgggggaaaggtgggtagattccagttccctggactaccttcaggaggcacgagagctgggagaagaggcaaagctacaggtttacttgggagccagctgagaagagagcagactcacaggtgctggtgcttggatttagccaggctcctccgagcacctcatgcatgtcccagcccctgggccctagccctttcctgccctgcagtctgcagtgccagcacgcaaatcccttcaccacagggtttcgttttgctggcttgaagacaaatggtcttagaattcattgagacccatagcttcatatggctgctccagccccacttcttagcattcttactcctcttctggggctaatgtcagcatctatagacaatagactattaaaaaatcaccttttaaacaagaaacggaaggcatttgatgcagaatttttgcatgacaacatagaaataatttaaaaatagtgtttgttctgaatgttggtagacccttcatagctttgttacaatgaaaccttgaactgaaaatatttaataaaataacctttaaacagtc

SEQ ID NO: 3026 - DNA, 557 bp, Homo sapiens
  source 1..557: mol_type = unassigned DNA; mol_type = unassigned DNA
agtgccaccagcagcgacgacagcatttattccaactgaagacttcactcaaaggcggcggctggcggccggcttctcgctcgggcagcggcggcggcggcggcggcggcttccggagtcccgctgcgaagatgctcaaagtcacggtgccctcctgctccgcctcgtcctgctcttcggtcaccgccagtgcggccccggggaccgcgagcctcgtcccggattactggatcgacggctccaacagggatgcgctgagcgatttcttcgaggtggagtcggagctgggacggggtgctacatccattgtgtacagatgcaaacagaaggggacccagaagccttatgctctcaaagtgttaaagaaaacagtggacaaaaaaatcgtaagaactgagataggagttcttcttcgcctctcacatccaaacattataaaacttaaagagatatttgaaacccctacagaaatcagtctggtcctagaactcgtcacaggaggagaactgtttgataggattgtggaaaagggatattacagtgagcgagatgctgca

SEQ ID NO: 3027 - DNA, 1640 bp, Homo sapiens
  source 1..1640: mol_type = unassigned DNA; mol_type = unassigned DNA
cccggacccaggtgctgccagggcggcggctggcggccggcttctcgctcgggcagcggcggcggcggcggcggcggcttccggagtcccgctgcgaagatgctcaaagtcacggtgccctcctgctccgcctcgtcctgctcttcggtcaccgccagtgcggccccggggaccgcgagcctcgtcccggattactggatcgacggctccaacagggatgcgctgagcgatttcttcgaggtggagtcggagctgggacggggtgctacatccattgtgtacagatgcaaacagaaggggacccagaagccttatgctctcaaagtgttaaagaaaacagtggacaaaaaaatcgtaagaactgagataggagttcttcttcgcctctcacatccaaacattataaaacttaaagagatatttgaaacccctacagaaatcagtctggtcctagaactcgtcacaggaggagaactgtttgataggattgtggaaaagggatattacagtgagcgagatgctgcagatgccgttaaacaaatcctggaggcagttgcttatctacatgaaaatgggattgtccatcgtgatctcaaaccagagaatcttctttatgcaactccagccccagatgcaccactcaaaatcgctgattttggactctctaaaattgtggaacatcaagtgctcatgaagacagtatgtggaaccccagggtactgcgcacctgaaattcttagaggttgtgcctatggacctgaggtggacatgtggtctgtaggaataatcacctacatcttactttgtggatttgaaccattctatgatgaaagaggcgatcagttcatgttcaggagaattctgaattgtgaatattactttatctccccctggtgggatgaagtatctctaaatgccaaggacttggtcagaaaattaattgttttggatccaaagaaacggctgactacatttcaagctctccagcatccgtgggtcacaggtaaagcagccaattttgtacacatggataccgctcaaaagaagctccaagaattcaatgcccggcgtaagcttaaggcagcggtgaaggctgtggtggcctcttcgcgcctgggaagtgccagcagcagccatggcagcatccaggagagccacaaggctagccgagacccttctccaatccaagatggcaacgaggacatgaaagctattccagaaggagagaaaattcaaggcgatggggcccaagccgcagttaagggggcacaggctgagctgatgaaggtgcaagccttagagaaagttaaaggtgcagatataaatgctgaagaggcccccaaaatggtgcccaaggcagtggaggatgggataaaggtggctgacctggaactagaggagggcctagcagaggagaagctgaagactgtggaggaggcagcagctcccagagaagggcaaggaagctctgctgtgggttttgaagttccacagcaagatgtgatcctgccagagtactaaacagcttccttcagatctggaagccaaacaccggcattttatgtactttgtccttcagcaagaaaggtgtggaagcatgatatgtactatagtgattctgtttttgaggtgcaaaaaac

SEQ ID NO: 3028 - DNA, 12240 bp, Homo sapiens
  source 1..12240: mol_type = unassigned DNA; mol_type = unassigned DNA
aagctccagcatccggagccgccctagccggcaccgcggcagccacagcctgggagagagaaaggaaagagggagggcggcgggaaaggctcggcgcgggaggagggcgggtgaggagggaaggagcgagggggagggagcctctctcctcagcggtgcagctagtctccctccagcgggcggcgactccgggttccccctcgcgccctctcgcagaggctcgcccccttccccgcccaccgtccctgcgagcgcgggcggcggcggtgggcgtgtgcgcgcgtgaaggacgccgcctctctctcgctcctgcgttcgcaggcggcggctggcggccggcttctcgctcgggcagcggcggcggcggcggcggcggcttccggagtcccgctgcgaagatgctcaaagtcacggtgccctcctgctccgcctcgtcctgctcttcggtcaccgccagtgcggccccggggaccgcgagcctcgtcccggattactggatcgacggctccaacagggatgcgctgagcgatttcttcgaggtggagtcggagctgggacggggtgctacatccattgtgtacagatgcaaacagaaggggacccagaagccttatgctctcaaagtgttaaagaaaacagtggacaaaaaaatcgtaagaactgagataggagttcttcttcgcctctcacatccaaacattataaaacttaaagagatatttgaaacccctacagaaatcagtctggtcctagaactcgtcacaggaggagaactgtttgataggattgtggaaaagggatattacagtgagcgagatgctgcagatgccgttaaacaaatcctggaggcagttgcttatctacatgaaaatgggattgtccatcgtgatctcaaaccagagaatcttctttatgcaactccagccccagatgcaccactcaaaatcgctgattttggactctctaaaattgtggaacatcaagtgctcatgaagacagtatgtggaaccccagggtactgcgcacctgaaattcttagaggttgtgcctatggacctgaggtggacatgtggtctgtaggaataatcacctacatcttactttgtggatttgaaccattctatgatgaaagaggcgatcagttcatgttcaggagaattctgaattgtgaatattactttatctccccctggtgggatgaagtatctctaaatgccaaggacttggtcagaaaattaattgttttggatccaaagaaacggctgactacatttcaagctctccagcatccgtgggtcacaggtaaagcagccaattttgtacacatggataccgctcaaaagaagctccaagaattcaatgcccggcgtaagcttaaggcagcggtgaaggctgtggtggcctcttcgcgcctgggaagtgccagcagcagccatggcagcatccaggagagccacaaggctagccgagacccttctccaatccaagatggcaacgaggacatgaaagctattccagaaggagagaaaattcaaggcgatggggcccaagccgcagttaagggggcacaggctgagctgatgaaggtgcaagccttagagaaagttaaaggtgcagatataaatgctgaagaggcccccaaaatggtgcccaaggcagtggaggatgggataaaggtggctgacctggaactagaggagggcctagcagaggagaagctgaagactgtggaggaggcagcagctcccagagaagggcaaggaagctctgctgtgggttttgaagttccacagcaagatgtgatcctgccagagtactaaacagcttccttcagatctggaagccaaacaccggcattttatgtactttgtccttcagcaagaaaggtgtggaagcatgatatgtactatagtgattctgtttttgaggtgcaaaaaacatacatatataccagttggtaattctaacttcaatgcatgtgactgctttatgaaaataatagtgtcttctatggcatgtaatggatacctaataccgatgagttaaatcttgcaagttaacacaacgtaacacttaaaagcatacattttcagcaaccagtggcacatatttgaagtgaatagtagcaaattgtttttgctttgaaaatctagccatcctacatcctttggatttcttcacaaggcagtaattcctttgaactactgcttagctaatactaggtagtgctaaaagacatgttcccataacttttacaacattttactttttatcattgatgtgttcaaactgtttacaaggagatgcttatagatgatagttgtacatatgtgcaaaaaaaaatccacttgcaatggtaagaaattgaagtatccttaaaggccatgaagccatatgtccctaaagcctgtgtggagaatgctttattttattcttatttatatacactatattaataataaccaaaatgttctaagattctgccattttacaaccctggaggaagtaatttacaaactcacgctgagttccattctttccttcacctgctctccaataagatgactttctgatagacaaagcttagggtgtaataaacagggaagaaaagaaggtaagactgtacttaaactgatgaagataagattgattccttttcattttccagataaaattgtatttactcatgaatttatacaactttacagataagaacattttaatggataaactctataattaccaagttgcaaatatttagaaaattctatttcacaggttagtgccaaaatgtcttcatagagtaggaataatattccattttaagattattcattattgactttaatagagtaagaaaacattattgtttatcaaagctctttttttatccaattgatggttatctacacatatcacttataaactaaagttatttatgaaaagctagtatgtctttttctcgtatttggaatgaaagtacccacattttacaatgtagtgttgagaatgtggctgccaataaatttagcacaatgcaatttatttaccttaaaaaacaaacaaaaacaaaaataaagaaaaatactgatttcaaatcagactcttaaaaagctggaacattagacctgatattttattatgatttttcccagaataagtttaatttctctttgactttcatagaaacactttccccttatagaaattgcactatctccaatttatttctagtttgagttgaaatgaatattttatcagattaattatgtgtcacatttttggtgggttttctcaattttaaaaaagaattcattttaaaaaataattattttcagagaccaaataaagacaataaaaatgactatcacataaaaatccttgttaaaaaagagatcttaaattatgttggctctccctcaaaactattaaattagaaaacgaaactaaagctccagtttgtagaggctgttggacctcagtagacattcttcttttcaatcacaaatctctctctactactgttctcatgggaagaaaacaaggtaggacttcttatctttcatagtttaagaatctgacaggtcactgatatggagcccctgaagaagcacatcatctgggctcagaagattattttttgttttgttttatttgtactatctagtagagagcacttttcttattccctctttccttccttcctcatttaattattccctctcagaattcccatgttgtccattataaggggctcgctatttttaacctttaagaatgtcttctttgttaagcattaagatttccatttaagaggatcaatttcctgttgtactttttaccatgagactgaaacacacacacacacacacacacacacacacacacacacacacgtgttggaagagcaaagagagggaagggggtctttttagaaagtggcacttggcgcttagctgaaagatcagaacacatcattcctccctgcccacccccatattgttccaagggcagttgttacattatttcaacactagagtagggcggactgcattgtttggccctgagaactatagaaacaacgttgcaaataccatgcccaatgtgtattttagaatttactcatttaaatgagtgcatattaccattcctccatgtgagtactcgagttgataattccctctatctttttaaacccataaactacatttttaaaaaaatcaatgggagttttaaattttgactcatgttaaagataagattctgataatgactatatagtgactaatttcattgtttcagtaggaaacaaatcaaactttcaaaaatgttggtcatttcagtcaaattattcaaagatttcatatacatacatcctaagttaggataattatgttaacatttttgaaagaacagccaatgtttatattgcttgttaaaatggaatgtattgtctatctcaaagattacttagctaaataatagtagacaaatggagatttaatttcacaaaatacttcataacatcactcctaattggcaatatagtcacaaagcaaaagaattcaaatttcagcaaacaataaattacattttacattttagagctaacacttatcacattacattatgggtttttattttgagataagttcagctacatagcataaactaggtttttttttataaccatgaaggacagtcttgaattatttcccccattaacaaagtctaattggaatccagtattttttctcaaactgtaatttcacttgtcccaggacacataaataggtaaaaattagaataatatcgtggtagaagttaattgtccagaacaagtgcattatataaatataatgcaagcacatgtcatttaagattttctattagtcacattttaagaaaaatagatgaaagtatagtatttttaatccaattcatccaaattattctatcgatatatagtcaatattaaaatttaatgtgatattttgaattctttatttttatactgttttcaaaatcaagagtgtatgttaggcctttgggacatcaagtgctcaatagtcacatgtggctagtggctaccatattagacagcactagtctagagtactttttattttaagcaaagtgacacttgaagttctatgcttagatttaagtggcctcagttttcacattgaggagctggtgggaggccacaaagaaagtgtttcagaaatgttacacactgagtaaaagcttattgaccactcctgcccattcatttacttcagaggagaaatgattcctaacatgacttcaaagaacgggcattactaaattatctactgaccaatccctctgattcctgatgggccctggagtcttgactacagcctagagtctcctgagtactgccatgatgccaatagcattcttgcttaccaaaatctactctcagccaactatgtgtcttcattcaggaagaactgcacatagaatctgattttgaggcctggattaagcttcatgccatccttgtatcacaggcaatatgtctttctggaaatctaatgaaccataccaaatctgcatgatgaagattgtgtaatgatggtgatatcatgccagttatcctcaaagtgggaatatgaccattagctggcattttttaagatttccttagaagggtttaatcaacactgccattacacatggatttaacaaaagacttttgaaaattttttacatactgattttagaataatcctcaaggttctatagtcatttttagtggaagacttaaaaagaaaggaacaatttttactgtgacttcaatttcatagtattttaaacatattttgtaattcagaatgtttagcaatccctatgtcctgtttcacatgcatggtaactgatggtgggttgcctacaggctgaagatttggagagagccattttgtttcataaatcagtttttattgcacagaagcagctggttgtatttcaagttggaaaaagaaaagtaaatgccagaaaaggcaaaggataaacttagtaagccatttattttgttttagaattgtttttgcaaagcaaatttttttaaaaaaaggtcaacaaagtgaatcagcactagcattttcttgatggttgactcaatgtataattaacaaatatacatagcagagtcaattaatcatagtgccattatgtcacttatttgtcattgcaaagtattcagtcatgttgtctagatttactttagatggtgcaaaatttccagatagtaacctatgtaaaaggatttgtaatttccttgtaattcctgcctattagtccatattctgatttccttatgttcatcactgatatgttcctgatcagggtcattgctagtagttgagcatttactggttgaacattgtttaatggttagatgttatgtgtgtctgcatttaaaaaaattgtgtacatgttatttcactattggtattacaatattcataaccacatgataaacagaaatgtacccaataatttcctataaaatttttcaaagtccttttattcccctgacacactcagggtgaatttttgtctccttggcaaataagaaaaaaaaggagagagaccactggagagatatcagcaaaccacccacagtaaccaagttcagtatttcctctttctatattttgaccaatatattaagagcaaattttgtcattattactccttgtggctattacctgagatcagataatataatctcagctcataaagcttggccatgtctatacttatcttggagagcaataacaaacttgattaatttgtttggttatttaaaattccaactttcataaatgctctgtgatgtactcaagacgattgggttgtgtgatactaacttccttcaagaactcagtctgttccctgttgtctggttcagaggtccaccagggcaaaatagaagccttgccgagaaagtgaactgtcttactccttcaaaggaatcagatgttgctctagagaagactccaggcatctacctggttgagctcaaatgaggcaagtgggagaaaacctcttctcatcctctgattgaaagtgatacaatttgaatattggtatattgtcattggtcagtaatggaaaaatgagattccaccagtgggttactcttttcttgtcttggtttgctatgccttatcccagatcagtgttttgttccatccctatggtcatctctaaagccctgacaggagcatcccagactggagaaatgcagcgtatctgtggcccagaattttgtttgatactctaaacagcaatgcaaagactgcaaaatcacactattctaaacagttgttttcagctcattttgaagattgacctggaaaacatatagatacagaatatatacatttaatcgttgcttgtgattcattgtgtcaaaataacatttaattttcactctgattaatctttattttccatttaaaagattatttcaggctacttaaatacaagaccttgcattctaatttttgaaagcggttgttttccctgagctctctctcaactttgacagtttgtgaatgataaaaagttactaggtttgtcctttccttgatagatgtagagcagttcatctgttttgtaaaggtacagttaagcataactataggctgggcgtgatagttcatgcctgtaatcccaacactttgggaggccgaggttggcagatcacctgaggtcaggagtttgagaccagcctggccaacgtggtgaaacccctaatacaaaaattagctgggcatggtggcacgctcctgtaatctcagctactcaggaggctgaggcaggagaatctcttgaacccgggaggcagaggttgcagtgagccaagatcatgccactgcactccagcctggacaacaagagcgaaactccgtcaaaaaaaaatatatatatatgaccataaattgaaaactatcatctcatactgcctccttttaacctgacctattttatatacctacaatacagttaatatgcagcagcgtagagaacaaatagcatattcataatttgtaattttgtttttctttttacggcacccttaagtctcagtaatattttaaaagtcctctataagccaaaagaacgttgtaacatatccatttattaaggagttaggcctaaacatagtaatagtagtccattccatgtccaacagatgttgctgtgtttctttcaacatttttcaatgtcttgtgagtttagtgagtgggtacagctgagttggggtttaggtgatttcttatgcccaatgaactaaaggtatcagtaaaagattattagtaaacaaattagttatttatgctcttacttgaatgtcagtcattcattttatctctcgtctttgagatacacacattaaaacttatgtgcatatttttttaaagagtaatttccacataattccccaagaactgaactcaaatctccaaaaatttttcagaactcaagcaaccaatgattcacagagcaaatctaccaaagccccatttttattggaacacaggcatgctcatttatgtacatattgtttgtggctgcttttatgttgtcaaggcagagttgagtactttcaacagagaccatatggactgcaaagcctaaaatgtgtatctggacccttacagtaaaacaatgaccctgggttttcatggcaccccaatgcctttttggtgacttgcaggaatacagattcctatattccagtttgtttttttttttttctccttagcttaaggttcgtattcccatttgcttctgagaaagttaggaaaattttgttttatgttgcagatgctctcacaacaataattgtgctggagatagatacaacttagtgaaattttcctacagaactaaaaacgcaaaattgcatcactcctgaagaaaagaaatttagagtatgaattgagttggttgagagtagaattaaaaagatttctagcactttgagcatgttttagaaatttgatccttacatttaaaattatgtaaatgacatctttcactggcatttgctcacatttaagtcaatctacagctgttacttactaagctaagaaataagaagatccctatggttctgaatctctcataatattctgaagtaatttatatcaattgaattttcattaatcattttaggaaatattatgttttattttgtggcattatatgacaatgactttctcaacaatagctcagggaatacgcaaacagccagctcttttatgtaagaaagccattttctaatccccacgctttcctgagtgttacgtattttatttctttgaaaagagagggccttgagtaaatgctttcgtttgctttccttacatatttagaaatccaagaagggcccttgtcttagtctatttctgtcacagagaaattgttcattccaaaatatccaccttaagggaagctagtgaccgagatatggagaaaaacataggcattcatgacctttgtgtttccgtttgactttcaacatctgtaaccaaaaggtcacaaatgaaatatttagtagaaagtgcaatatcaatttattaggagtacctaaaattataactctaaataatatacagcaatattattgctctattattacagcaatcaataatataatatagccactaggatacactcgctgtagaactcagaacaaaagatatcaatcttctgccagtccgcatcattatgtgtagcagagactttactggaatgagtgaggggaaagataacaaaatgtagattaggattccacattctcccctgcccatcttcttgattgctcagtttgaagacgatcattgatggacaaatactttagaaatgaatgaagtcaatagctaatgtttctcccagaaactaaacaacatagtttaggggatattaggcctacattctaatcacattgtaaggaagtgattttctaattttgaagcttcccaggagcagccccctccaggaacaattttccctgtgaactttcactgagaaactattatatgccatggaggagtcaaagatgaattaaatccaatgctatcctccaggagtgagctttgtagttggagagaaaagccaaccttatagatacaacctgtacatatataacctatgctgcatttaggcagatgataagccctaggaatggaaagagggaaaagctcccttttgccaggaatgatgaaggaaagctttatggaaacacaggctgtatgtgaaagatgggtgaatctttgcaggtagggaagaagtagggggcatgtctggctgagaaccggcctgatcatagagtggaaaaatgaaaggcagaggtgaaggaagaatactaaatgtgaaaggctgaaatacacagggaagtgttgccagtgtgcaacagaatctcatctcgtgcaaaattgaattagacttccttactccttccttactctgggtaggtccatgtgcagcctttcctcagagcatctagcctgacatacttggctcatctgctgtgcttctaagccaaataaaaatcatcaaacacatcgaagatatttttgggagtcaccaggttaaagcaaagcctcagtcactgaaagcaaaaactgaattggccaggtctccactgacaaaacagagtaaatgatagtatgacagataatttcaagttttccaagactccaatttctgaaaaatgtctcatgactccaaaaaatcacgtacttcctaaaatgttgccagtggaggaccgaatcaaggttattgctgacctcattttttcaaccttttcagttatttgacctgaataggcaatcccccaggatttctgattgaattctacctgaaagtttagattttaaaagacaacctgtaggaagctaagtctcaggcaacaaaatttaaaaccatcagaacttgtttctccaaacatcaacctgctcctgtcaagtcctttttcatctctcccttttgtccctttacatactgttttgtaagttccttttgatatcatttattgcaggcagtatttttacatccatcttcaagaaacttgggagacatttagacatttagtatgtgtacttttagttgtcttgcctctttatttcagataatgcctgtgattagtgaatggcggcattattcctgaagacaaatgaaggaagatagggagcaagattgactgtcatttgaatgatggaagagaagtagaattactgtgaggttacaaaaatcgtaagttagcagacattgagaaaggaaaacttcctacttgggcttttcaggcttatgtgacattatctggatgtgttttctagtctttcctaaaggagaaatttttattcctgggttgctgaaagctttctggactaaaaggatataagcagctcaatagcagcatagaggattagattaatggaacagcactgcatacaggaaagctacatctccaatagtttaggctgcaagtcagtagccaaacacaagagcatgtaagatttggaggacaaagtataaatattttaagtttacacaaccaagattataggctaccttcccaacttctaatttgaagagcactgaaaatggagctgtgaacacttcatttttaaaacctgacaatatggtgctattgactacttaatacaaagatatattacaatatttttaggtaaatgtattaagtctggcctgggcataaatgtacatacagaaaatgtttgtagagaattcatcaaaatcatgcccatttgctgttgtagagctacagtattcttcaatggtggtgactgaccagtgagtttctacttcttacagatgggacacaacagtcatgggctgtctcagctgcccaaagcctgaggcagaccacatgagagctgtggcttcttcttggattcaggttggataacccaattcagtaattaaatatgtaaattttggggggggttggggggtgttttctaggaacttgaagagtacgtgacattataaaaaatgggtgttggaagactaattgtagaaatttgacctgagggccaatgttacttggtgtaagttcactcagacagacatgtcagaacatgcccaaagaagcctatatcttgctgctgggaaatgtaaagcagttggcatgtagaatacgataataaatcatttaagaaaccaccaaaa

SEQ ID NO: 3029 - DNA, 571 bp, Homo sapiens
  source 1..571: mol_type = unassigned DNA; mol_type = unassigned DNA
ctctctctcgctcctgcgttcgcaggcggcggctggcggccggcttctcgctcgggcagcggcggcggcggcggcggcggcttccggagtcccgctgcgaagatgctcaaagtcacggtgccctcctgctccgcctcgtcctgctcttcggtcaccgccagtgcggccccggggaccgcgagcctcgtcccggattactggatcgacggctccaacagggatgcgctgagcgatttcttcgaggtggagtcggagctgggacggggtgctacatccattgtgtacagatgcaaacagaaggggacccagaagccttatgctctcaaagtgttaaagaaaacagattgtggaaaagggatattacagtgagcgagatgctgcagatgccgttaaacaaatcctggaggcagttgcttatctacatgaaaatgggattgtccatcgtgatctcaaaccagagaatcttctttatgcaactccagccccagatgcaccactcaaaatcgctgattttggactctctaaaattgtggaacatcaagtgctcatgaagacagtatgtggaacccca

SEQ ID NO: 3030 - DNA, 1678 bp, Homo sapiens
  source 1..1678: mol_type = unassigned DNA
ctctctctcgctcctgcgttcgcaggcggcggctggcggccggcttctcgctcgggcagcggcggcggcggcggcggcggcttccggagtcccgctgcgaagatgctcaaagtcacggtgccctcctgctccgcctcgtcctgctcttcggtcaccgccagtgcggccccggggaccgcgagcctcgtcccggattactggatcgacggctccaacagggatgcgctgagcgatttcttcgaggtggagtcggagctgggacggggtgctacatccattgtgtacagatgcaaacagaaggggacccagaagccttatgctctcaaagtgttaaagaaaacagattgtggaaaagggatattacagtgagcgagatgctgcagatgccgttaaacaaatcctggaggcagttgcttatctacatgaaaatgggattgtccatcgtgatctcaaaccagagaatcttctttatgcaactccagccccagatgcaccactcaaaatcgctgattttggactctctaaaattgtggaacatcaagtgctcatgaagacagtatgtggaaccccagggtactgcgcacctgaaattcttagaggttgtgcctatggacctgaggtggacatgtggtctgtaggaataatcacctacatcttactttgtggatttgaaccattctatgatgaaagaggcgatcagttcatgttcaggagaattctgaattgtgaatattactttatctccccctggtgggatgaagtatctctaaatgccaaggacttggtcagaaaattaattgttttggatccaaagaaacggctgactacatttcaagctctccagcatccgtgggtcacaggtaaagcagccaattttgtacacatggataccgctcaaaagaagctccaagaattcaatgcccggcgtaagcttaaggcagcggtgaaggctgtggtggcctcttcgcgcctgggaagtgccagcagcagccatggcagcatccaggagagccacaaggctagccgagacccttctccaatccaagatggcaacgaggacatgaaagctattccagaaggagagaaaattcaaggcgatggggcccaagccgcagttaagggggcacaggctgagctgatgaaggtgcaagccttagagaaagttaaaggtgcagatataaatgctgaagaggcccccaaaatggtgcccaaggcagtggaggatgggataaaggtggctgacctggaactagaggagggcctagcagaggagaagctgaagactgtggaggaggcagcagctcccagagaagggcaaggaagctctgctgtgggttttgaagttccacagcaagatgtgatcctgccagagtactaaacagcttccttcagatctggaagccaaacaccggcattttatgtactttgtccttcagcaagaaaggtgtggaagcatgatatgtactatagtgattctgtttttgaggtgcaaaaaacatacatatataccagttggtaattctaacttcaatgcatgtgactgctttatgaaaataatagtgtcttctatggcatgtaatggatacctaataccgatgagttaaatcttgcaagttaacacaacgtaacacttaaaagcatacattttcagcaaccagtggcacatatttgaagtgaa

SEQ ID NO: 3031 - DNA, 599 bp, Homo sapiens
  source 1..599: mol_type = unassigned DNA
ctctcgctcctgcgttcgcaggcggcggctggcggccggcttctcgctcgggcagcggcggcggcggcggcggcggcttccggagtcccgctgcgaagatgctcaaagtcacggtgccctcctgctccgcctcgtcctgctcttcggtcaccgccagtgcggccccggggaccgcgagcctcgtcccggattactggatcgacggctccaacagggatgcgctgagcgatttcttcgaggtggagtcggagctgggacggggtgctacatccattgtgtacagatgcaaacagaaggggacccagaagccttatgctctcaaagtgttaaagaaaacagtggacaaaaaaatcgtaagaactgagataggagttcttcttcgcctctcacatccaaacattataaaacttaaagagatatttgaaacccctacagaaatcagtctggtcctagaactcgtcacaggaggagaactgtttgataggattgtggaaaagggatattacagtgagcgagatgctgcagatgccgttaaacaaatcctggaggcagttgctgttacaggaatattccaagatacatagaacctcaagatgttg

SEQ ID NO: 3032 - DNA, 852 bp, Homo sapiens
  source 1..852: mol_type = unassigned DNA
ggcggctggcggccggcttctcgctcgggcagcggcggcggcggcggcggcggcttccggagtcccgctgcgaagatgctcaaagtcacggtgccctcctgctccgcctcgtcctgctcttcggtcaccgccagtgcggccccggggaccgcgagcctcgtcccggattactggatcgacggctccaacagggatgcgctgagcgatttcttcgaggtggagtcggagctgggacggggtgctacatccattgtgtacagatgcaaacagaaggggacccagaagccttatgctctcaaagtgttaaagaaaacagtggacaaaaaaatcgtaagaactgagataggagttcttcttcgcctctcacatccaaacattgattgtggaaaagggatattacagtgagcgagatgctgcagatgccgttaaacaaatcctggaggcagttgcttatctacatgaaaatgggattgtccatcgtgatctcaaaccagagaatcttctttatgcaactccagccccagatgcaccactcaaaatcgctgattttggactctctaaaattgtggaacatcaagtgctcatgaagacagtatgtggaaccccagggtactgcgcacctgaaattcttagaggttgtgcctatggacctgaggtggacatgtggtctgtaggaataatcacctacatcttactttgtggatttgaaccattctatgatgaaagaggcgatcagttcatgttcaggagaattctgaattgtgaatattactttatctccccctggtgggatgaagtatctctaaatgccaaggacttggtcagaaaattaattgttttggatccaaagaa

SEQ ID NO: 3033 - DNA, 548 bp, Homo sapiens
  source 1..548: mol_type = unassigned DNA; mol_type = unassigned DNA
tccggagtcccgctgcgaagatgctcaaagtcacggtgccctcctgctccgcctcgtcctgctcttcggtcaccgccagtgcggccccggggaccgcgagcctcgtcccggattactggatcgacggctccaacagggatgcgctgagcgatttcttcgaggtggagtcggagctgggacggggtgctacatccattgtgtacagatgcaaacagaaggggacccagaagccttatgctctcaaagtgttaaagaaaacacacaccatatccaatgcttgctgctgccctcacctctaaaccgtcacccaccctgtgcagtgatcctttccattctcttctttgttgagcctaaactcacactgaaaaatctgggaaaagagcatctgagacagagtactatcaagtgccaagtgaaaggacccaacagtggagactatcctggcttcctggaagatgagcagtgagccggtgtaaaagaagaggaagaatactaggagagttcagcacaatggacagggccaaggcattattagtatatactagtgg

SEQ ID NO: 3034 - DNA, 563 bp, Homo sapiens
  source 1..563: mol_type = unassigned DNA; mol_type = unassigned DNA
atagatgccatgaaggccctgatagagacaaaggcaaaaaagaattcaatcaggaatgattttggtccagatttgggactaaaactagatgtttctccttatttacctgataaaggatgattaagcctttattgacacaggcacagagaagcggagtgctgcttgtggacaaaaaaatcgtaagaactgagataggagttcttcttcgcctctcacatccaaacattataaaacttaaagagatatttgaaacccctacagaaatcagtctggtcctagaactcgtcacaggaggagaactgtttgataggattgtggaaaagggatattacagtgagcgagatgctgcagatgccgttaaacaaatcctggaggcagttgcttatctacatgaaaatgggattgtccatcgtgatctcaaaccagagaatcttctttatgcaactccagccccagatgcaccactcaaaatcgctgattttggactctctaaaattgtggaacatcaagtgctcatgaagacagtatgtggaaccccagggtactgcgcacctgaaattctt

SEQ ID NO: 3035 - DNA, 788 bp, Homo sapiens
  source 1..788: mol_type = unassigned DNA; mol_type = unassigned DNA
gagacaaaggcaaaaaagaattcaatcaggaatgattttggtccagatttgggactaaaactagatgtttctccttatttacctgataaaggatgattaagcctttattgacacaggcacagagaagcggagtgctgcttgtggacaaaaaaatcgtaagaactgagataggagttcttcttcgcctctcacatccaaacattataaaacttaaagagatatttgaaacccctacagaaatcagtctggtcctagaactcgtcacaggaggagaactgtttgataggattgtggaaaagggatattacagtgagcgagatgctgcagatgccgttaaacaaatcctggaggcagttgcttatctacatgaaaatgggattgtccatcgtgatctcaaaccagagaatcttctttatgcaactccagccccagatgcaccactcaaaatcgctgattttggactctctaaaattgtggaacatcaagtgctcatgaagacagtatgtggaaccccagggtactgcgttctttccatggcctggcctagcctcactaagacaaggacttcaggtgagattttcctagaagagttctccagtccctgcagatggaccacaactacgttgagctcttcacatcttcccgcctcatcgcccagagtgggctgaaggcattgcaatcagaaagaacaaaagcttttgacccatactagcataaaacctgctctgtttttcttgatggtcaaattaatttggcaacaacttgaaagccaataaagtttgtaaaaa

SEQ ID NO: 3036 - DNA, 2560 bp, Homo sapiens
  source 1..2560: mol_type = unassigned DNA; mol_type = unassigned DNA
cacaggcaatttatatatttgtctatatctagggtcacaaaagtggcgagtggcataaccagggcttgaacacacttcctgactcccaatagtctctgcctcatatcaggtcacccctactaagcccaggactgtggattattttatttgctgaccttcctgggaatttattgactgcccatcctcacaagcaggggtaaacctccaagaatgggctgccattgattggattccattctttaggcaaatcatgccctcaagccactgacttcttggattataaaatgatttttaaactctgggcttagtccttcaagtaccctcaaggggttagaaagaactataaaccccaagatagaaacataaggtagtattccataagttctgggatactctcccttttgtttgccatttaatccccacagaaagaatgatgatgcatgaatgattccattctgttaccatagagatgtactttaagttctgaattctaggtgattgtgaagcgcagcccagaattattttgctggttctgccttcaaagaacttccagtccacaggcaagtgaggagctgtttcttgacttctgttggaaagccgtctgccactttgggggtctcaggtggtacatggccctgtcttctcatactccctcagctactgctacctgaagctgtgcctacctacagtggcccctgaggacttaaacaatttttttctcacatatatttagtggtactgctgggaaatggaataagatctggaagtttgtaagctgagggcaagcccaggtcatcctaaaaacctcgctaagtttatggttctttattatttcaggtcagaaaattaattgttttggatccaaagaaacggctgactacatttcaagctctccagcatccgtgggtcacaggtaaagcagccaattttgtacacatggataccgctcaaaagaagctccaagaattcaatgcccggcgtaagcttaaggcagcggtgaaggctgtggtggcctcttcgcgcctgggaagtgccagcagcagccatggcagcatccaggagagccacaaggctagccgagacccttctccaatccaagatggcaacgaggacatgaaagctattccagaaggagagaaaattcaaggcgatggggcccaagccgcagttaagggggcacaggctgagctgatgaaggtgcaagccttagagaaagttaaaggtgcagatataaatgctgaagaggcccccaaaatggtgcccaaggcagtggaggatgggataaaggtggctgacctggaactagaggagggcctagcagaggagaagctgaagactgtggaggaggcagcagctcccagagaagggcaaggaagctctgctgtgggttttgaagttccacagcaagatgtgatcctgccagagtactaaacagcttccttcagatctggaagccaaacaccggcattttatgtactttgtccttcagcaagaaaggtgtggaagcatgatatgtactatagtgattctgtttttgaggtgcaaaaaacatacatatataccagttggtaattctaacttcaatgcatgtgactgctttatgaaaataatagtgtcttctatggcatgtaatggatacctaataccgatgagttaaatcttgcaagttaacacaacgtaacacttaaaagcatacattttcagcaaccagtggcacatatttgaagtgaatagtagcaaattgtttttgctttgaaaatctagccatcctacatcctttggatttcttcacaaggcagtaattcctttgaactactgcttagctaatactaggtagtgctaaaagacatgttcccataacttttacaacattttactttttatcattgatgtgttcaaactgtttacaaggagatgcttatagatgatagttgtacatatgtgcaaaaaaaaatccacttgcaatggtaagaaattgaagtatccttaaaggccatgaagccatatgtccctaaagcctgtgtggagaatgctttattttattcttatttatatacactatattaataataaccaaaatgttctaagattctgccattttacaaccctggaggaagtaatttacaaactcacgctgagttccattctttccttcacctgctctccaataagatgactttctgatagacaaagcttagggtgtaataaacagggaagaaaagaaggtaagactgtacttaaactgatgaagataagattgattccttttcattttccagataaaattgtatttactcatgaatttatacaactttacagataagaacattttaatggataaactctataattaccaagttgcaaatatttagaaaattctatttcacaggttagtgccaaaatgtcttcatagagtaggaataatattccattttaagattattcattattgactttaatagagtaagaaaacattattgtttatcaaagctctttttttatccaattgatggttatctacacatatcacttataaactaaagttatttatgaaaagcta

SEQ ID NO: 3037 - DNA, 782 bp, Homo sapiens
  source 1..782: mol_type = unassigned DNA; mol_type = unassigned DNA
agcgcagcccagaattattttgctggttctgccttcaaagaacttccagtccacaggtcagaaaattaattgttttggatccaaagaaacggctgactacatttcaagctctccagcatccgtgggtcacaggtaaagcagccaattttgtacacatggataccgctcaaaagaagctccaagaattcaatgcccggcgtaagcttaaggcagcggtgaaggctgtggtggcctcttcgcgcctgggaagtgccagcagcagccatggcagcatccaggagagccacaaggctagccgagacccttctccaatccaagatggcaacgaggacatgaaagctattccagaaggagagaaaattcaaggcgatggggcccaagccgcagttaagggggcacaggctgagctgatgaaggtgcaagccttagagaaagttaaaggtgcagatataaatgctgaagaggcccccaaaatggtgcccaaggcagtggaggatgggataaaggtggctgacctggaactagaggagggcctagcagaggagaagctgaagactgtggaggaggcagcagctcccagagaagggcaaggaagctctgctgtgggttttgaagttccacagcaagatgtgatcctgccagagtactaaacagcttccttcagatctggaagccaaacaccggcattttatgtactttgtccttcagcaagaaaggtgtggaagcatgatatgtactatagtgattctgtttttgaggtgcaaaaaacatacatatatacc

SEQ ID NO: 3038 - DNA, 803 bp, Homo sapiens
  source 1..803: mol_type = unassigned DNA; mol_type = unassigned DNA
aaagaacttccagtccacaggtcagaaaattaattgttttggatccaaagaaacggctgactacatttcaagctctccagcatccgtgggtcacaggtaaagcagccaattttgtacacatggataccgctcaaaagaagctccaagaattcaatgcccggcgtaagcttaaggcagcggtgaaggctgtggtggcctcttcgcgcctgggaagtgccagcagcagccatggcagcatccaggagagccacaaggctagccgagacccttctccaatccaagatggcaacgaggacatgaaagctattccagaaggagagaaaattcaaggcgatggggcccaagccgcagttaagggggcacaggctgagctgatgaaggtgcaagccttagagaaagttaaaggtgcagatataaatgctgaagaggcccccaaaatggtgcccaaggcagtggaggatgggataaaggtggctgacctggaactagaggagggcctagcagaggagaagctgaagactgtggaggaggcagcagctcccagagaagggcaaggaagctctgctgtgggttttgaagttccacagcaagatgtgatcctgccagagtactaaacagcttccttcagatctggaagccaaacaccggcattttatgtactttgtccttcagcaagaaagaggtccaccagggcaaaatagaagccttgccgagaaagtgaactgtcttactccttcaaaggaatcagatgttgctctagagaagactccaggcatctacctggttgagctcaaatgaggcaa

SEQ ID NO: 3039 - DNA, 4453 bp, Homo sapiens
  source 1..4453: mol_type = unassigned DNA; mol_type = unassigned DNA
gcaccatgtcatcatgtgtctctagccagcccagcagcaaccgggccgccccccaggatgagctggggggcaggggcagcagcagcagcgaaagccagaagccctgtgaggccctgcggggcctctcatccttgagcatccacctgggcatggagtccttcattgtggtcaccgagtgtgagccgggctgtgctgtggacctcggcttggcgcgggaccggcccctggaggccgatggccaagaggtcccccttgacacctccgggtcccaggcccggccccacctctccggtcgcaagctgtctctgcaagagcggtcccagggtgggctggcagccggtggcagcctggacatgaacggacgctgcatctgcccgtccctgccctactcacccgtcagctccccgcagtcctcgcctcggctgccccggcggccgacagtggagtctcaccacgtctccatcacgggtatgcaggactgtgtgcagctgaatcagtataccctgaaggatgaaattggaaagggctcctatggtgtcgtcaagttggcctacaatgaaaatgacaatacctactatgcaatgaaggtgctgtccaaaaagaagctgatccggcaggccggctttccacgtcgccctccaccccgaggcacccggccagctcctggaggctgcatccagcccaggggccccattgagcaggtgtaccaggaaattgccatcctcaagaagctggaccaccccaatgtggtgaagctggtggaggtcctggatgaccccaatgaggaccatctgtacatggtgttcgaactggtcaaccaagggcccgtgatggaagtgcccaccctcaaaccactctctgaagaccaggcccgtttctacttccaggatctgatcaaaggcatcgagtacttacactaccagaagatcatccaccgtgacatcaaaccttccaacctcctggtcggagaagatgggcacatcaagatcgctgactttggtgtgagcaatgaattcaagggcagtgacgcgctcctctccaacaccgtgggcacgcccgccttcatggcacccgagtcgctctctgagacccgcaagatcttctctgggaaggccttggatgtttgggccatgggtgtgacactatactgctttgtctttggccagtgcccattcatggacgagcggatcatgtgtttacacagtaagatcaagagtcaggccctggaatttccagaccagcccgacatagctgaggacttgaaggacctgatcacccgtatgctggacaagaaccccgagtcgaggatcgtggtgccggaaatcaagctgcacccctgggtcacgaggcatggggcggagccgttgccgtcggaggatgagaactgcacgctggtcgaagtgactgaagaggaggtcgagaactcagtcaaacacattcccagcttggcaaccgtgatcctggtgaagaccatgatacgtaaacgctcctttgggaacccattcgagggcagccggcgggaggaacgctcactgtcagcgcctggaaacttgctcaccaaaaaaccaaccagggaatgtgagtccctgtctgagctcaaggggacaaaaaaaaaaaaaggacttgactccatgacgtcgaccgtggccgctggctggctggacaggcgggtgtgaggagttgcagacccaaacccacgtgcattttgggacaattgctttttaaaacgtttttatgccaaaaatccttcattgtgattttcagaaccacgtcagatataccaagtgactgtgtgtggggtttgacaactgtggaaaggcgagcagaaaactccggcggtctgaggccatggaggtggttgctgcatttgagagggagtagggggctagatgtggctcctagtgcaaaccggaaaccatggcaccttccagagccgtggtctcaaggagtcagagcagggctggccctcagtagctgcagggagctttgatgcaacttatttgtaagaaggatttttaaattttttatgggtagaattgtagtcaggaaaacagaaagggcttgaaatttaataagtgctgctggaaggggattttccaagcctggaagggtattcagcagctgtggtggggaaacatttctcctgaaagactgaacgtgtttcttcatgacagctgctcaaagcaggtttctgagatagctgaccgagctctggtaaatctctttgtcaaattacgaaaacttcagggtgaaatcctatgcttccatgtacattacatggcttaagattaaacaaaaacatttttcaagtctctaactagagtgaactctagagcacagtagttcagaaactatttagagcttccaggatatatttcacagcttcaggcatgtgatcagttagagccgatgaaacctatgcccgcctgtatatatattagcagcttagctagttcataacctgtatattctaaagactgctaaggttttgttttcattttaaatcctagctgattgttgtggtcaatgaaatacccagtttctggagggccaggtgggaaatgctttcactggaccaacacacaaatgatcatcctgaggatctgagcttccctagactccacacaataaccttggggcacccttttagagaagactgttgaaacccacagcactcgttggggtatgaggaaaccagggcttggcacaggaagttcccctttgtagctaaaagtccagaaagaaagggttcatctttttgacttccaactgatattgggaagtttggttgaggttcaagtgtgactccttccagagccacaggtaggggagtgtgaagttgagggggaggaaagctggaaggactctgccttgggagattcccagctctgctttccagcgcttggtggaatctgggctggggaaagacggcaccgggaaactctgcttccccattgtttccatctgatcagctgtggtgtgaggacttctcagacaaaggcaaggcctcgtgcccctgcccagcccattcatggagccctgggccttcttggcttccatagatcctaagctcttgactgtagtttagccagacttgttttgctatcttataagcagttcagaattagggaatgctggttttgaagagcaaaggacaggtagtctagagagggtcgtctggcctgcttgctgggtctttgtaacccagcacttcctcttgccctcctggctttatgtttatggggagaggactcaatagctccaccccttctggcaccagatggggcttggttagtttgcaataagcaccttgcagaggttaaagccagcgggtccctagtcttaggcccagcctgcttgtgtgggctctggcctggcctggtggctggcccagggggcagcagtgcttagagcttctgcagggcttctcttgtttacacagctgcatcagacaatgccatttctccccaccacggaaccttccatctaagatttcttccagggaatgccagcaatcaggcagcacccagctgtgggggcagtggggtgggggagacccacattgatgactttttttttttcttttaatgaagaaacaccaaagaaagctgtggaaaggacctgccccacatgaaaaggataagccaagatggctgtaaacacagagcatttgagctgccactcttggagcacattgatttttcaaaagccagctctgtcaggaaaggaggtgctgttatgagcagctcttccagtgggcaaagaggacgcccataatttcttccattgctagctcatctgtgggaccaatttggtgtaagcaacctgtggcctgcacttgtggcctcgaaggaagcacaaaccctccatccacttcccatttcctctgcccttttccacctcccccttccatcccaccagctgccagtggctcccagaaagccttattgagccccttgttgacacttggggctgcggaggcctctccctactggtctggcctttcctgagaggcaggtcttccgtcctcagagcctttctggaacaaggagaatgcctgtgcaggtggacacacaggcctggcctgtcgctctcacttgtcttccagcggggagcttcacgttgccgagtggaagaaccatgacctccacttgcttccaaggtgctagggaagtttcagggtacgctggttcccctctccagctggaggccgagtttctggggactgcagatttttctactctgtgatcgattcaatgcccgatgcttctgtttcattcccgaccctttctactatgcattttccttttatcaggtgtataaagttaaatactgtgtatttatcactaaaaagtacatgaacttaagagacaactaagcctttcgtgtttttccacaggtgtttaagcttctctgtacagttgaaataaacagacagcaaaatggtgccaag

SEQ ID NO: 3040 - DNA, 5218 bp, Homo sapiens
  source 1..5218: mol_type = unassigned DNA; mol_type = unassigned DNA
cccatctctacgaaaaatacaaaaattagccaagtatggtggccggcgcctgtaatcccagctactcgggagactgaggcagagaactgcttgaacctgggaggcagaggttgcagtgatccgagatcgcgtcactgcactccagcgtgggcgacagagcgagactccgtttcagaaaagaaaaaaaaaaaaaaaaaaaagggagtcggggtggagctctcattggctcgttgcatgtgagtgtccctacggcctagaaatacaagagaagcacatcggaacgggctggaaatccacccagttaactagagggctttgaaccttttattaacttggaggttgactctcctgtcaactcgattcccttttggctgtttggcagggtcagtgagacatcccctgggtcgctcgaccccgtaggacggttcagggagccctccaggtcttcgtttctcctcttccccgcacagtgctgttatccagctgggggatccaacgcacacttaaggctccagcaaagtggctccgctgccggatgggagtgccccagtgtgctggatgaagctggcgcatgcaccatgtcatcatgtgtctctagccagcccagcagcaaccgggccgccccccaggatgagctggggggcaggggcagcagcagcagcgaaagccagaagccctgtgaggccctgcggggcctctcatccttgagcatccacctgggcatggagtccttcattgtggtcaccgagtgtgagccgggctgtgctgtggacctcggcttggcgcgggaccggcccctggaggccgatggccaagaggtcccccttgacacctccgggtcccaggcccggccccacctctccggtcgcaagctgtctctgcaagagcggtcccagggtgggctggcagccggtggcagcctggacatgaacggacgctgcatctgcccgtccctgccctactcacccgtcagctccccgcagtcctcgcctcggctgccccggcggccgacagtggagtctcaccacgtctccatcacgggtatgcaggactgtgtgcagctgaatcagtataccctgaaggatgaaattggaaagggctcctatggtgtcgtcaagttggcctacaatgaaaatgacaatacctactatgcaatgaaggtgctgtccaaaaagaagctgatccggcaggccggctttccacgtcgccctccaccccgaggcacccggccagctcctggaggctgcatccagcccaggggccccattgagcaggtgtaccaggaaattgccatcctcaagaagctggaccaccccaatgtggtgaagctggtggaggtcctggatgaccccaatgaggaccatctgtacatggtgttcgaactggtcaaccaagggcccgtgatggaagtgcccaccctcaaaccactctctgaagaccaggcccgtttctacttccaggatctgatcaaaggcatcgagtacttacactaccagaagatcatccaccgtgacatcaaaccttccaacctcctggtcggagaagatgggcacatcaagatcgctgactttggtgtgagcaatgaattcaagggcagtgacgcgctcctctccaacaccgtgggcacgcccgccttcatggcacccgagtcgctctctgagacccgcaagatcttctctgggaaggccttggatgtttgggccatgggtgtgacactatactgctttgtctttggccagtgcccattcatggacgagcggatcatgtgtttacacagtaagatcaagagtcaggccctggaatttccagaccagcccgacatagctgaggacttgaaggacctgatcacccgtatgctggacaagaaccccgagtcgaggatcgtggtgccggaaatcaagatcctggtgaagaccatgatacgtaaacgctcctttgggaacccattcgagggcagccggcgggaggaacgctcactgtcagcgcctggaaacttgctcaccaaaaaaccaaccagggaatgtgagtccctgtctgagctcaaggaagcaaggcagcgaagacaacctccagggcaccgacccgccccccgtgggggaggaggaagtgctcttgtgagaggcagtccctgcgtggaaagttgctgggcccccgcccccggctcccccgcacgcatgcatccactgcggccggaggaggccatggagcccgagtagctgcctggatcgctcgacctcgcatgcgcgccgcgtcgcctctggggggctgctgcaccgcgtttccatagcagcatgtcctacggaaacccagcacgtgtgtagagcctcgatcgtcatctctggttatttgttttttcctttgttgttttaaaggggacaaaaaaaaaaaaaggacttgactccatgacgtcgaccgtggccgctggctggctggacaggcgggtgtgaggagttgcagacccaaacccacgtgcattttgggacaattgctttttaaaacgtttttatgccaaaaatccttcattgtgattttcagaaccacgtcagatataccaagtgactgtgtgtggggtttgacaactgtggaaaggcgagcagaaaactccggcggtctgaggccatggaggtggttgctgcatttgagagggagtagggggctagatgtggctcctagtgcaaaccggaaaccatggcaccttccagagccgtggtctcaaggagtcagagcagggctggccctcagtagctgcagggagctttgatgcaacttatttgtaagaaggatttttaaattttttatgggtagaattgtagtcaggaaaacagaaagggcttgaaatttaataagtgctgctggaaggggattttccaagcctggaagggtattcagcagctgtggtggggaaacatttctcctgaaagactgaacgtgtttcttcatgacagctgctcaaagcaggtttctgagatagctgaccgagctctggtaaatctctttgtcaaattacgaaaacttcagggtgaaatcctatgcttccatgtacattacatggcttaagattaaacaaaaacatttttcaagtctctaactagagtgaactctagagcacagtagttcagaaactatttagagcttccaggatatatttcacagcttcaggcatgtgatcagttagagccgatgaaacctatgcccgcctgtatatatattagcagcttagctagttcataacctgtatattctaaagactgctaaggttttgttttcattttaaatcctagctgattgttgtggtcaatgaaatacccagtttctggagggccaggtgggaaatgctttcactggaccaacacacaaatgatcatcctgaggatctgagcttccctagactccacacaataaccttggggcacccttttagagaagactgttgaaacccacagcactcgttggggtatgaggaaaccagggcttggcacaggaagttcccctttgtagctaaaagtccagaaagaaagggttcatctttttgacttccaactgatattgggaagtttggttgaggttcaagtgtgactccttccagagccacaggtaggggagtgtgaagttgagggggaggaaagctggaaggactctgccttgggagattcccagctctgctttccagcgcttggtggaatctgggctggggaaagacggcaccgggaaactctgcttccccattgtttccatctgatcagctgtggtgtgaggacttctcagacaaaggcaaggcctcgtgcccctgcccagcccattcatggagccctgggccttcttggcttccatagatcctaagctcttgactgtagtttagccagacttgttttgctatcttataagcagttcagaattagggaatgctggttttgaagagcaaaggacaggtagtctagagagggtcgtctggcctgcttgctgggtctttgtaacccagcacttcctcttgccctcctggctttatgtttatggggagaggactcaatagctccaccccttctggcaccagatggggcttggttagtttgcaataagcaccttgcagaggttaaagccagcgggtccctagtcttaggcccagcctgcttgtgtgggctctggcctggcctggtggctggcccagggggcagcagtgcttagagcttctgcagggcttctcttgtttacacagctgcatcagacaatgccatttctccccaccacggaaccttccatctaagatttcttccagggaatgccagcaatcaggcagcacccagctgtgggggcagtggggtgggggagacccacattgatgactttttttttttcttttaatgaagaaacaccaaagaaagctgtggaaaggacctgccccacatgaaaaggataagccaagatggctgtaaacacagagcatttgagctgccactcttggagcacattgatttttcaaaagccagctctgtcaggaaaggaggtgctgttatgagcagctcttccagtgggcaaagaggacgcccataatttcttccattgctagctcatctgtgggaccaatttggtgtaagcaacctgtggcctgcacttgtggcctcgaaggaagcacaaaccctccatccacttcccatttcctctgcccttttccacctcccccttccatcccaccagctgccagtggctcccagaaagccttattgagccccttgttgacacttggggctgcggaggcctctccctactggtctggcctttcctgagaggcaggtcttccgtcctcagagcctttctggaacaaggagaatgcctgtgcaggtggacacacaggcctggcctgtcgctctcacttgtcttccagcggggagcttcacgttgccgagtggaagaaccatgacctccacttgcttccaaggtgctagggaagtttcagggtacgctggttcccctctccagctggaggccgagtttctggggactgcagatttttctactctgtgatcgattcaatgcccgatgcttctgtttcattcccgaccctttctactatgcattttccttttatcaggtgtataaagttaaatactgtgtatttatcactaaaaagtacatgaacttaagagacaactaagcctttcgtgtttttccacaggtgtttaagcttctctgtacagttgaaataaacagacagcaaaatggt

SEQ ID NO: 3041 - DNA, 5175 bp, Homo sapiens
  source 1..5175: mol_type = unassigned DNA; mol_type = unassigned DNA
cccatctctacgaaaaatacaaaaattagccaagtatggtggccggcgcctgtaatcccagctactcgggagactgaggcagagaactgcttgaacctgggaggcagaggttgcagtgatccgagatcgcgtcactgcactccagcgtgggcgacagagcgagactccgtttcagaaaagaaaaaaaaaaaaaaaaaaaagggagtcggggtggagctctcattggctcgttgcatgtgagtgtccctacggcctagaaatacaagagaagcacatcggaacgggctggaaatccacccagttaactagagggctttgaaccttttattaacttggaggttgactctcctgtcaactcgattcccttttggctgtttggcagggtcagtgagacatcccctgggtcgctcgaccccgtaggacggttcagggagccctccaggtcttcgtttctcctcttccccgcacagtgctgttatccagctgggggatccaacgcacacttaaggctccagcaaagtggctccgctgccggatgggagtgccccagtgtgctggatgaagctggcgcatgcaccatgtcatcatgtgtctctagccagcccagcagcaaccgggccgccccccaggatgagctggggggcaggggcagcagcagcagcgaaagccagaagccctgtgaggccctgcggggcctctcatccttgagcatccacctgggcatggagtccttcattgtggtcaccgagtgtgagccgggctgtgctgtggacctcggcttggcgcgggaccggcccctggaggccgatggccaagaggtcccccttgacacctccgggtcccaggcccggccccacctctccggtcgcaagctgtctctgcaagagcggtcccagggtgggctggcagccggtggcagcctggacatgaacggacgctgcatctgcccgtccctgccctactcacccgtcagctccccgcagtcctcgcctcggctgccccggcggccgacagtggagtctcaccacgtctccatcacgggtatgcaggactgtgtgcagctgaatcagtataccctgaaggatgaaattggaaagggctcctatggtgtcgtcaagttggcctacaatgaaaatgacaatacctactatgcaatgaaggtgctgtccaaaaagaagctgatccggcaggccggctttccacgtcgccctccaccccgaggcacccggccagctcctggaggctgcatccagcccaggggccccattgagcaggtgtaccaggaaattgccatcctcaagaagctggaccaccccaatgtggtgaagctggtggaggtcctggatgaccccaatgaggaccatctgtacatggtgttcgaactggtcaaccaagggcccgtgatggaagtgcccaccctcaaaccactctctgaagaccaggcccgtttctacttccaggatctgatcaaaggcatcgagtacttacactaccagaagatcatccaccgtgacatcaaaccttccaacctcctggtcggagaagatgggcacatcaagatcgctgactttggtgtgagcaatgaattcaagggcagtgacgcgctcctctccaacaccgtgggcacgcccgccttcatggcacccgagtcgctctctgagacccgcaagatcttctctgggaaggccttggatgtttgggccatgggtgtgacactatactgctttgtctttggccagtgcccattcatggacgagcggatcatgtgtttacacagtaagatcaagagtcaggccctggaatttccagaccagcccgacatagctgaggacttgaaggacctgatcacccgtatgctggacaagaaccccgagtcgaggatcgtggtgccggaaatcaagatcctggtgaagaccatgatacgtaaacgctcctttgggaacccattcgagggcagccggcgggaggaacgctcactgtcagcgcctggaaacttgctcacgaagcaaggcagcgaagacaacctccagggcaccgacccgccccccgtgggggaggaggaagtgctcttgtgagaggcagtccctgcgtggaaagttgctgggcccccgcccccggctcccccgcacgcatgcatccactgcggccggaggaggccatggagcccgagtagctgcctggatcgctcgacctcgcatgcgcgccgcgtcgcctctggggggctgctgcaccgcgtttccatagcagcatgtcctacggaaacccagcacgtgtgtagagcctcgatcgtcatctctggttatttgttttttcctttgttgttttaaaggggacaaaaaaaaaaaaaggacttgactccatgacgtcgaccgtggccgctggctggctggacaggcgggtgtgaggagttgcagacccaaacccacgtgcattttgggacaattgctttttaaaacgtttttatgccaaaaatccttcattgtgattttcagaaccacgtcagatataccaagtgactgtgtgtggggtttgacaactgtggaaaggcgagcagaaaactccggcggtctgaggccatggaggtggttgctgcatttgagagggagtagggggctagatgtggctcctagtgcaaaccggaaaccatggcaccttccagagccgtggtctcaaggagtcagagcagggctggccctcagtagctgcagggagctttgatgcaacttatttgtaagaaggatttttaaattttttatgggtagaattgtagtcaggaaaacagaaagggcttgaaatttaataagtgctgctggaaggggattttccaagcctggaagggtattcagcagctgtggtggggaaacatttctcctgaaagactgaacgtgtttcttcatgacagctgctcaaagcaggtttctgagatagctgaccgagctctggtaaatctctttgtcaaattacgaaaacttcagggtgaaatcctatgcttccatgtacattacatggcttaagattaaacaaaaacatttttcaagtctctaactagagtgaactctagagcacagtagttcagaaactatttagagcttccaggatatatttcacagcttcaggcatgtgatcagttagagccgatgaaacctatgcccgcctgtatatatattagcagcttagctagttcataacctgtatattctaaagactgctaaggttttgttttcattttaaatcctagctgattgttgtggtcaatgaaatacccagtttctggagggccaggtgggaaatgctttcactggaccaacacacaaatgatcatcctgaggatctgagcttccctagactccacacaataaccttggggcacccttttagagaagactgttgaaacccacagcactcgttggggtatgaggaaaccagggcttggcacaggaagttcccctttgtagctaaaagtccagaaagaaagggttcatctttttgacttccaactgatattgggaagtttggttgaggttcaagtgtgactccttccagagccacaggtaggggagtgtgaagttgagggggaggaaagctggaaggactctgccttgggagattcccagctctgctttccagcgcttggtggaatctgggctggggaaagacggcaccgggaaactctgcttccccattgtttccatctgatcagctgtggtgtgaggacttctcagacaaaggcaaggcctcgtgcccctgcccagcccattcatggagccctgggccttcttggcttccatagatcctaagctcttgactgtagtttagccagacttgttttgctatcttataagcagttcagaattagggaatgctggttttgaagagcaaaggacaggtagtctagagagggtcgtctggcctgcttgctgggtctttgtaacccagcacttcctcttgccctcctggctttatgtttatggggagaggactcaatagctccaccccttctggcaccagatggggcttggttagtttgcaataagcaccttgcagaggttaaagccagcgggtccctagtcttaggcccagcctgcttgtgtgggctctggcctggcctggtggctggcccagggggcagcagtgcttagagcttctgcagggcttctcttgtttacacagctgcatcagacaatgccatttctccccaccacggaaccttccatctaagatttcttccagggaatgccagcaatcaggcagcacccagctgtgggggcagtggggtgggggagacccacattgatgactttttttttttcttttaatgaagaaacaccaaagaaagctgtggaaaggacctgccccacatgaaaaggataagccaagatggctgtaaacacagagcatttgagctgccactcttggagcacattgatttttcaaaagccagctctgtcaggaaaggaggtgctgttatgagcagctcttccagtgggcaaagaggacgcccataatttcttccattgctagctcatctgtgggaccaatttggtgtaagcaacctgtggcctgcacttgtggcctcgaaggaagcacaaaccctccatccacttcccatttcctctgcccttttccacctcccccttccatcccaccagctgccagtggctcccagaaagccttattgagccccttgttgacacttggggctgcggaggcctctccctactggtctggcctttcctgagaggcaggtcttccgtcctcagagcctttctggaacaaggagaatgcctgtgcaggtggacacacaggcctggcctgtcgctctcacttgtcttccagcggggagcttcacgttgccgagtggaagaaccatgacctccacttgcttccaaggtgctagggaagtttcagggtacgctggttcccctctccagctggaggccgagtttctggggactgcagatttttctactctgtgatcgattcaatgcccgatgcttctgtttcattcccgaccctttctactatgcattttccttttatcaggtgtataaagttaaatactgtgtatttatcactaaaaagtacatgaacttaagagacaactaagcctttcgtgtttttccacaggtgtttaagcttctctgtacagttgaaataaacagacagcaaaatggt

SEQ ID NO: 3042 - DNA, 5304 bp, Homo sapiens
  source 1..5304: mol_type = unassigned DNA; mol_type = unassigned DNA
cccatctctacgaaaaatacaaaaattagccaagtatggtggccggcgcctgtaatcccagctactcgggagactgaggcagagaactgcttgaacctgggaggcagaggttgcagtgatccgagatcgcgtcactgcactccagcgtgggcgacagagcgagactccgtttcagaaaagaaaaaaaaaaaaaaaaaaaagggagtcggggtggagctctcattggctcgttgcatgtgagtgtccctacggcctagaaatacaagagaagcacatcggaacgggctggaaatccacccagttaactagagggctttgaaccttttattaacttggaggttgactctcctgtcaactcgattcccttttggctgtttggcagggtcagtgagacatcccctgggtcgctcgaccccgtaggacggttcagggagccctccaggtcttcgtttctcctcttccccgcacagtgctgttatccagctgggggatccaacgcacacttaaggctccagcaaagtggctccgctgccggatgggagtgccccagtgtgctggatgaagctggcgcatgcaccatgtcatcatgtgtctctagccagcccagcagcaaccgggccgccccccaggatgagctggggggcaggggcagcagcagcagcgaaagccagaagccctgtgaggccctgcggggcctctcatccttgagcatccacctgggcatggagtccttcattgtggtcaccgagtgtgagccgggctgtgctgtggacctcggcttggcgcgggaccggcccctggaggccgatggccaagaggtcccccttgacacctccgggtcccaggcccggccccacctctccggtcgcaagctgtctctgcaagagcggtcccagggtgggctggcagccggtggcagcctggacatgaacggacgctgcatctgcccgtccctgccctactcacccgtcagctccccgcagtcctcgcctcggctgccccggcggccgacagtggagtctcaccacgtctccatcacgggtatgcaggactgtgtgcagctgaatcagtataccctgaaggatgaaattggaaagggctcctatggtgtcgtcaagttggcctacaatgaaaatgacaatacctactatgcaatgaaggtgctgtccaaaaagaagctgatccggcaggccggctttccacgtcgccctccaccccgaggcacccggccagctcctggaggctgcatccagcccaggggccccattgagcaggtgtaccaggaaattgccatcctcaagaagctggaccaccccaatgtggtgaagctggtggaggtcctggatgaccccaatgaggaccatctgtacatggtgttcgaactggtcaaccaagggcccgtgatggaagtgcccaccctcaaaccactctctgaagaccaggcccgtttctacttccaggatctgatcaaaggcatcgagtacttacactaccagaagatcatccaccgtgacatcaaaccttccaacctcctggtcggagaagatgggcacatcaagatcgctgactttggtgtgagcaatgaattcaagggcagtgacgcgctcctctccaacaccgtgggcacgcccgccttcatggcacccgagtcgctctctgagacccgcaagatcttctctgggaaggccttggatgtttgggccatgggtgtgacactatactgctttgtctttggccagtgcccattcatggacgagcggatcatgtgtttacacagtaagatcaagagtcaggccctggaatttccagaccagcccgacatagctgaggacttgaaggacctgatcacccgtatgctggacaagaaccccgagtcgaggatcgtggtgccggaaatcaagctgcacccctgggtcacgaggcatggggcggagccgttgccgtcggaggatgagaactgcacgctggtcgaagtgactgaagaggaggtcgagaactcagtcaaacacattcccagcttggcaaccgtgatcctggtgaagaccatgatacgtaaacgctcctttgggaacccattcgagggcagccggcgggaggaacgctcactgtcagcgcctggaaacttgctcacgaagcaaggcagcgaagacaacctccagggcaccgacccgccccccgtgggggaggaggaagtgctcttgtgagaggcagtccctgcgtggaaagttgctgggcccccgcccccggctcccccgcacgcatgcatccactgcggccggaggaggccatggagcccgagtagctgcctggatcgctcgacctcgcatgcgcgccgcgtcgcctctggggggctgctgcaccgcgtttccatagcagcatgtcctacggaaacccagcacgtgtgtagagcctcgatcgtcatctctggttatttgttttttcctttgttgttttaaaggggacaaaaaaaaaaaaaggacttgactccatgacgtcgaccgtggccgctggctggctggacaggcgggtgtgaggagttgcagacccaaacccacgtgcattttgggacaattgctttttaaaacgtttttatgccaaaaatccttcattgtgattttcagaaccacgtcagatataccaagtgactgtgtgtggggtttgacaactgtggaaaggcgagcagaaaactccggcggtctgaggccatggaggtggttgctgcatttgagagggagtagggggctagatgtggctcctagtgcaaaccggaaaccatggcaccttccagagccgtggtctcaaggagtcagagcagggctggccctcagtagctgcagggagctttgatgcaacttatttgtaagaaggatttttaaattttttatgggtagaattgtagtcaggaaaacagaaagggcttgaaatttaataagtgctgctggaaggggattttccaagcctggaagggtattcagcagctgtggtggggaaacatttctcctgaaagactgaacgtgtttcttcatgacagctgctcaaagcaggtttctgagatagctgaccgagctctggtaaatctctttgtcaaattacgaaaacttcagggtgaaatcctatgcttccatgtacattacatggcttaagattaaacaaaaacatttttcaagtctctaactagagtgaactctagagcacagtagttcagaaactatttagagcttccaggatatatttcacagcttcaggcatgtgatcagttagagccgatgaaacctatgcccgcctgtatatatattagcagcttagctagttcataacctgtatattctaaagactgctaaggttttgttttcattttaaatcctagctgattgttgtggtcaatgaaatacccagtttctggagggccaggtgggaaatgctttcactggaccaacacacaaatgatcatcctgaggatctgagcttccctagactccacacaataaccttggggcacccttttagagaagactgttgaaacccacagcactcgttggggtatgaggaaaccagggcttggcacaggaagttcccctttgtagctaaaagtccagaaagaaagggttcatctttttgacttccaactgatattgggaagtttggttgaggttcaagtgtgactccttccagagccacaggtaggggagtgtgaagttgagggggaggaaagctggaaggactctgccttgggagattcccagctctgctttccagcgcttggtggaatctgggctggggaaagacggcaccgggaaactctgcttccccattgtttccatctgatcagctgtggtgtgaggacttctcagacaaaggcaaggcctcgtgcccctgcccagcccattcatggagccctgggccttcttggcttccatagatcctaagctcttgactgtagtttagccagacttgttttgctatcttataagcagttcagaattagggaatgctggttttgaagagcaaaggacaggtagtctagagagggtcgtctggcctgcttgctgggtctttgtaacccagcacttcctcttgccctcctggctttatgtttatggggagaggactcaatagctccaccccttctggcaccagatggggcttggttagtttgcaataagcaccttgcagaggttaaagccagcgggtccctagtcttaggcccagcctgcttgtgtgggctctggcctggcctggtggctggcccagggggcagcagtgcttagagcttctgcagggcttctcttgtttacacagctgcatcagacaatgccatttctccccaccacggaaccttccatctaagatttcttccagggaatgccagcaatcaggcagcacccagctgtgggggcagtggggtgggggagacccacattgatgactttttttttttcttttaatgaagaaacaccaaagaaagctgtggaaaggacctgccccacatgaaaaggataagccaagatggctgtaaacacagagcatttgagctgccactcttggagcacattgatttttcaaaagccagctctgtcaggaaaggaggtgctgttatgagcagctcttccagtgggcaaagaggacgcccataatttcttccattgctagctcatctgtgggaccaatttggtgtaagcaacctgtggcctgcacttgtggcctcgaaggaagcacaaaccctccatccacttcccatttcctctgcccttttccacctcccccttccatcccaccagctgccagtggctcccagaaagccttattgagccccttgttgacacttggggctgcggaggcctctccctactggtctggcctttcctgagaggcaggtcttccgtcctcagagcctttctggaacaaggagaatgcctgtgcaggtggacacacaggcctggcctgtcgctctcacttgtcttccagcggggagcttcacgttgccgagtggaagaaccatgacctccacttgcttccaaggtgctagggaagtttcagggtacgctggttcccctctccagctggaggccgagtttctggggactgcagatttttctactctgtgatcgattcaatgcccgatgcttctgtttcattcccgaccctttctactatgcattttccttttatcaggtgtataaagttaaatactgtgtatttatcactaaaaagtacatgaacttaagagacaactaagcctttcgtgtttttccacaggtgtttaagcttctctgtacagttgaaataaacagacagcaaaatggt

SEQ ID NO: 3043 - DNA, 5598 bp, Homo sapiens
  source 1..5598: mol_type = unassigned DNA; mol_type = unassigned DNA
gagcctggggaggtcgagggtgcagcgagccgtgatcgtgctactgcactccagcctgggcaacacagagagaccctgtctcaaaacaaacaaacaaacaaacaaacaaacaaacaaaaaaaacaaagaaaaaaaaatgggagtgggccgggcgcggtgactcacacctgtaatcccagcactttcggaggccaaggcgggtggatcacgaggtcaggaattcaagattagcctggacaacatggtgaaaccccatctctacgaaaaatacaaaaattagccaagtatggtggccggcgcctgtaatcccagctactcgggagactgaggcagagaactgcttgaacctgggaggcagaggttgcagtgatccgagatcgcgtcactgcactccagcgtgggcgacagagcgagactccgtttcagaaaagaaaaaaaaaaaaaaaaaaaagggagtcggggtggagctctcattggctcgttgcatgtgagtgtccctacggcctagaaatacaagagaagcacatcggaacgggctggaaatccacccagttaactagagggctttgaaccttttattaacttggaggttgactctcctgtcaactcgattcccttttggctgtttggcagggtcagtgagacatcccctgggtcgctcgaccccgtaggacggttcagggagccctccaggtcttcgtttctcctcttccccgcacagtgctgttatccagctgggggatccaacgcacacttaaggctccagcaaagtggctccgctgccggatgggagtgccccagtgtgctggatgaagctggcgcatgcaccatgtcatcatgtgtctctagccagcccagcagcaaccgggccgccccccaggatgagctggggggcaggggcagcagcagcagcgaaagccagaagccctgtgaggccctgcggggcctctcatccttgagcatccacctgggcatggagtccttcattgtggtcaccgagtgtgagccgggctgtgctgtggacctcggcttggcgcgggaccggcccctggaggccgatggccaagaggtcccccttgacacctccgggtcccaggcccggccccacctctccggtcgcaagctgtctctgcaagagcggtcccagggtgggctggcagccggtggcagcctggacatgaacggacgctgcatctgcccgtccctgccctactcacccgtcagctccccgcagtcctcgcctcggctgccccggcggccgacagtggagtctcaccacgtctccatcacgggtatgcaggactgtgtgcagctgaatcagtataccctgaaggatgaaattggaaagggctcctatggtgtcgtcaagttggcctacaatgaaaatgacaatacctactatgcaatgaaggtgctgtccaaaaagaagctgatccggcaggccggctttccacgtcgccctccaccccgaggcacccggccagctcctggaggctgcatccagcccaggggccccattgagcaggtgtaccaggaaattgccatcctcaagaagctggaccaccccaatgtggtgaagctggtggaggtcctggatgaccccaatgaggaccatctgtacatggtgttcgaactggtcaaccaagggcccgtgatggaagtgcccaccctcaaaccactctctgaagaccaggcccgtttctacttccaggatctgatcaaaggcatcgagtacttacactaccagaagatcatccaccgtgacatcaaaccttccaacctcctggtcggagaagatgggcacatcaagatcgctgactttggtgtgagcaatgaattcaagggcagtgacgcgctcctctccaacaccgtgggcacgcccgccttcatggcacccgagtcgctctctgagacccgcaagatcttctctgggaaggccttggatgtttgggccatgggtgtgacactatactgctttgtctttggccagtgcccattcatggacgagcggatcatgtgtttacacagtaagatcaagagtcaggccctggaatttccagaccagcccgacatagctgaggacttgaaggacctgatcacccgtatgctggacaagaaccccgagtcgaggatcgtggtgccggaaatcaagctgcacccctgggtcacgaggcatggggcggagccgttgccgtcggaggatgagaactgcacgctggtcgaagtgactgaagaggaggtcgagaactcagtcaaacacattcccagcttggcaaccgtgatcctggtgaagaccatgatacgtaaacgctcctttgggaacccattcgagggcagccggcgggaggaacgctcactgtcagcgcctggaaacttgctcaccaaaaaaccaaccagggaatgtgagtccctgtctgagctcaaggaagcaaggcagcgaagacaacctccagggcaccgacccgccccccgtgggggaggaggaagtgctcttgtgagaggcagtccctgcgtggaaagttgctgggcccccgcccccggctcccccgcacgcatgcatccactgcggccggaggaggccatggagcccgagtagctgcctggatcgctcgacctcgcatgcgcgccgcgtcgcctctggggggctgctgcaccgcgtttccatagcagcatgtcctacggaaacccagcacgtgtgtagagcctcgatcgtcatctctggttatttgttttttcctttgttgttttaaaggggacaaaaaaaaaaaaaggacttgactccatgacgtcgaccgtggccgctggctggctggacaggcgggtgtgaggagttgcagacccaaacccacgtgcattttgggacaattgctttttaaaacgtttttatgccaaaaatccttcattgtgattttcagaaccacgtcagatataccaagtgactgtgtgtggggtttgacaactgtggaaaggcgagcagaaaactccggcggtctgaggccatggaggtggttgctgcatttgagagggagtagggggctagatgtggctcctagtgcaaaccggaaaccatggcaccttccagagccgtggtctcaaggagtcagagcagggctggccctcagtagctgcagggagctttgatgcaacttatttgtaagaaggatttttaaattttttatgggtagaattgtagtcaggaaaacagaaagggcttgaaatttaataagtgctgctggaaggggattttccaagcctggaagggtattcagcagctgtggtggggaaacatttctcctgaaagactgaacgtgtttcttcatgacagctgctcaaagcaggtttctgagatagctgaccgagctctggtaaatctctttgtcaaattacgaaaacttcagggtgaaatcctatgcttccatgtacattacatggcttaagattaaacaaaaacatttttcaagtctctaactagagtgaactctagagcacagtagttcagaaactatttagagcttccaggatatatttcacagcttcaggcatgtgatcagttagagccgatgaaacctatgcccgcctgtatatatattagcagcttagctagttcataacctgtatattctaaagactgctaaggttttgttttcattttaaatcctagctgattgttgtggtcaatgaaatacccagtttctggagggccaggtgggaaatgctttcactggaccaacacacaaatgatcatcctgaggatctgagcttccctagactccacacaataaccttggggcacccttttagagaagactgttgaaacccacagcactcgttggggtatgaggaaaccagggcttggcacaggaagttcccctttgtagctaaaagtccagaaagaaagggttcatctttttgacttccaactgatattgggaagtttggttgaggttcaagtgtgactccttccagagccacaggtaggggagtgtgaagttgagggggaggaaagctggaaggactctgccttgggagattcccagctctgctttccagcgcttggtggaatctgggctggggaaagacggcaccgggaaactctgcttccccattgtttccatctgatcagctgtggtgtgaggacttctcagacaaaggcaaggcctcgtgcccctgcccagcccattcatggagccctgggccttcttggcttccatagatcctaagctcttgactgtagtttagccagacttgttttgctatcttataagcagttcagaattagggaatgctggttttgaagagcaaaggacaggtagtctagagagggtcgtctggcctgcttgctgggtctttgtaacccagcacttcctcttgccctcctggctttatgtttatggggagaggactcaatagctccaccccttctggcaccagatggggcttggttagtttgcaataagcaccttgcagaggttaaagccagcgggtccctagtcttaggcccagcctgcttgtgtgggctctggcctggcctggtggctggcccagggggcagcagtgcttagagcttctgcagggcttctcttgtttacacagctgcatcagacaatgccatttctccccaccacggaaccttccatctaagatttcttccagggaatgccagcaatcaggcagcacccagctgtgggggcagtggggtgggggagacccacattgatgactttttttttttcttttaatgaagaaacaccaaagaaagctgtggaaaggacctgccccacatgaaaaggataagccaagatggctgtaaacacagagcatttgagctgccactcttggagcacattgatttttcaaaagccagctctgtcaggaaaggaggtgctgttatgagcagctcttccagtgggcaaagaggacgcccataatttcttccattgctagctcatctgtgggaccaatttggtgtaagcaacctgtggcctgcacttgtggcctcgaaggaagcacaaaccctccatccacttcccatttcctctgcccttttccacctcccccttccatcccaccagctgccagtggctcccagaaagccttattgagccccttgttgacacttggggctgcggaggcctctccctactggtctggcctttcctgagaggcaggtcttccgtcctcagagcctttctggaacaaggagaatgcctgtgcaggtggacacacaggcctggcctgtcgctctcacttgtcttccagcggggagcttcacgttgccgagtggaagaaccatgacctccacttgcttccaaggtgctagggaagtttcagggtacgctggttcccctctccagctggaggccgagtttctggggactgcagatttttctactctgtgatcgattcaatgcccgatgcttctgtttcattcccgaccctttctactatgcattttccttttatcaggtgtataaagttaaatactgtgtatttatcactaaaaagtacatgaacttaagagacaactaagcctttcgtgtttttccacaggtgtttaagcttctctgtacagttgaaataaacagacagcaaaatggt

SEQ ID NO: 3044 - DNA, 3797 bp, Homo sapiens
  source 1..3797: mol_type = unassigned DNA; mol_type = unassigned DNA
gccattaggatctcacactctgggggttttccctatcttccatcttaactgggaaacacgctgccaaatgcagccctcctgttggcaaacgcagccacgtggatgctgcctcctccctgctcatatctattctctctttttctcccccgccatccgtctcctgcctattccatgtggctgtgccaaggtcctggatgaccccaatgaggaccatctgtacatggtgttcgaactggtcaaccaagggcccgtgatggaagtgcccaccctcaaaccactctctgaagaccaggcccgtttctacttccaggatctgatcaaaggcatcgagtacttacactaccagaagatcatccaccgtgacatcaaaccttccaacctcctggtcggagaagatgggcacatcaagatcgctgactttggtgtgagcaatgaattcaagggcagtgacgcgctcctctccaacaccgtgggcacgcccgccttcatggcacccgagtcgctctctgagacccgcaagatcttctctgggaaggccttggatgtttgggccatgggtgtgacactatactgctttgtctttggccagtgcccattcatggacgagcggatcatgtgtttacacagtaagatcaagagtcaggccctggaatttccagaccagcccgacatagctgaggacttgaaggacctgatcacccgtatgctggacaagaaccccgagtcgaggatcgtggtgccggaaatcaagctgcacccctgggtcacgaggcatggggcggagccgttgccgtcggaggatgagaactgcacgctggtcgaagtgactgaagaggaggtcgagaactcagtcaaacacattcccagcttggcaaccgtgatcctggtgaagaccatgatacgtaaacgctcctttgggaacccattcgagggcagccggcgggaggaacgctcactgtcagcgcctggaaacttgctcaccaaaaaaccaaccagggaatgtgagtccctgtctgagctcaaggggacaaaaaaaaaaaaaggacttgactccatgacgtcgaccgtggccgctggctggctggacaggcgggtgtgaggagttgcagacccaaacccacgtgcattttgggacaattgctttttaaaacgtttttatgccaaaaatccttcattgtgattttcagaaccacgtcagatataccaagtgactgtgtgtggggtttgacaactgtggaaaggcgagcagaaaactccggcggtctgaggccatggaggtggttgctgcatttgagagggagtagggggctagatgtggctcctagtgcaaaccggaaaccatggcaccttccagagccgtggtctcaaggagtcagagcagggctggccctcagtagctgcagggagctttgatgcaacttatttgtaagaaggatttttaaattttttatgggtagaattgtagtcaggaaaacagaaagggcttgaaatttaataagtgctgctggaaggggattttccaagcctggaagggtattcagcagctgtggtggggaaacatttctcctgaaagactgaacgtgtttcttcatgacagctgctcaaagcaggtttctgagatagctgaccgagctctggtaaatctctttgtcaaattacgaaaacttcagggtgaaatcctatgcttccatgtacattacatggcttaagattaaacaaaaacatttttcaagtctctaactagagtgaactctagagcacagtagttcagaaactatttagagcttccaggatatatttcacagcttcaggcatgtgatcagttagagccgatgaaacctatgcccgcctgtatatatattagcagcttagctagttcataacctgtatattctaaagactgctaaggttttgttttcattttaaatcctagctgattgttgtggtcaatgaaatacccagtttctggagggccaggtgggaaatgctttcactggaccaacacacaaatgatcatcctgaggatctgagcttccctagactccacacaataaccttggggcacccttttagagaagactgttgaaacccacagcactcgttggggtatgaggaaaccagggcttggcacaggaagttcccctttgtagctaaaagtccagaaagaaagggttcatctttttgacttccaactgatattgggaagtttggttgaggttcaagtgtgactccttccagagccacaggtaggggagtgtgaagttgagggggaggaaagctggaaggactctgccttgggagattcccagctctgctttccagcgcttggtggaatctgggctggggaaagacggcaccgggaaactctgcttccccattgtttccatctgatcagctgtggtgtgaggacttctcagacaaaggcaaggcctcgtgcccctgcccagcccattcatggagccctgggccttcttggcttccatagatcctaagctcttgactgtagtttagccagacttgttttgctatcttataagcagttcagaattagggaatgctggttttgaagagcaaaggacaggtagtctagagagggtcgtctggcctgcttgctgggtctttgtaacccagcacttcctcttgccctcctggctttatgtttatggggagaggactcaatagctccaccccttctggcaccagatggggcttggttagtttgcaataagcaccttgcagaggttaaagccagcgggtccctagtcttaggcccagcctgcttgtgtgggctctggcctggcctggtggctggcccagggggcagcagtgcttagagcttctgcagggcttctcttgtttacacagctgcatcagacaatgccatttctccccaccacggaaccttccatctaagatttcttccagggaatgccagcaatcaggcagcacccagctgtgggggcagtggggtgggggagacccacattgatgactttttttttttcttttaatgaagaaacaccaaagaaagctgtggaaaggacctgccccacatgaaaaggataagccaagatggctgtaaacacagagcatttgagctgccactcttggagcacattgatttttcaaaagccagctctgtcaggaaaggaggtgctgttatgagcagctcttccagtgggcaaagaggacgcccataatttcttccattgctagctcatctgtgggaccaatttggtgtaagcaacctgtggcctgcacttgtggcctcgaaggaagcacaaaccctccatccacttcccatttcctctgcccttttccacctcccccttccatcccaccagctgccagtggctcccagaaagccttattgagccccttgttgacacttggggctgcggaggcctctccctactggtctggcctttcctgagaggcaggtcttccgtcctcagagcctttctggaacaaggagaatgcctgtgcaggtggacacacaggcctggcctgtcgctctcacttgtcttccagcggggagcttcacgttgccgagtggaagaaccatgacctccacttgcttccaaggtgctagggaagtttcagggtacgctggttcccctctccagctggaggccgagtttctggggactgcagatttttctactctgtgatcgattcaatgcccgatgcttctgtttcattcccgaccctttctactatgcattttccttttatcaggtgtataaagttaaatactgtgtatttatcactaaaaagtacatgaacttaagagacaa

SEQ ID NO: 3045 - DNA, 2006 bp, Homo sapiens
  source 1..2006: mol_type = unassigned DNA; mol_type = unassigned DNA
ccgagctgggggcgcagagcgcgggaggcggcggcggcgcggagcccaggtggctccgctgccggatgggagtgccccagtgtgctggatgaagctggcgcatgcaccatgtcatcatgtgtctctagccagcccagcagcaaccgggccgccccccaggatgagctggggggcaggggcagcagcagcagcgaaagccagaagccctgtgaggccctgcggggcctctcatccttgagcatccacctgggcatggagtccttcattgtggtcaccgagtgtgagccgggctgtgctgtggacctcggcttggcgcgggaccggcccctggaggccgatggccaagaggtcccccttgacacctccgggtcccaggcccggccccacctctccggtcgcaagctgtctctgcaagagcggtcccagggtgggctggcagccggtggcagcctggacatgaacggacgctgcatctgcccgtccctgccctactcacccgtcagctccccgcagtcctcgcctcggctgccccggcggccgacagtggagtctcaccacgtctccatcacgggtatgcaggactgtgtgcagctgaatcagtataccctgaaggatgaaattggaaagggctcctatggtgtcgtcaagttggcctacaatgaaaatgacaatacctactatgcaatgaaggtgctgtccaaaaagaagctgatccggcaggccggctttccacgtcgccctccaccccgaggcacccggccagctcctggaggctgcatccagcccaggggccccattgagcaggtgtaccaggaaattgccatcctcaagaagctggaccaccccaatgtggtgaagctggtggaggtcctggatgaccccaatgaggaccatctgtacatggtgttcgaactggtcaaccaagggcccgtgatggaagtgcccaccctcaaaccactctctgaagaccaggcccgtttctacttccaggatctgatcaaaggcatcgagtacttacactaccagaagatcatccaccgtgacatcaaaccttccaacctcctggtcggagaagatgggcacatcaagatcgctgactttggtgtgagcaatgaattcaagggcagtgacgcgctcctctccaacaccgtgggcacgcccgccttcatggcacccgagtcgctctctgagacccgcaagatcttctctgggaaggccttggatgtttgggccatgggtgtgacactatactgctttgtctttggccagtgcccattcatggacgagcggatcatgtgtttacacagtaagatcaagagtcaggccctggaatttccagaccagcccgacatagctgaggacttgaaggacctgatcacccgtatgctggacaagaaccccgagtcgaggatcgtggtgccggaaatcaagctgcacccctgggtcacgaggcatggggcggagccgttgccgtcggaggatgagaactgcacgctggtcgaagtgactgaagaggaggtcgagaactcagtcaaacacattcccagcttggcaaccgtgatcctggtgaagaccatgatacgtaaacgctcctttgggaacccattcgagggcagccggcgggaggaacgctcactgtcagcgcctggaaacttgctcacgaagcaaggcagcgaagacaacctccagggcaccgacccgccccccgtgggggaggaggaagtgctcttgtgagaggcagtccctgcgtggaaagttgctgggcccccgcccccggctcccccgcacgcatgcatccactgcggccggaggaggccatggagcccgagtagctgcctggatcgctcgacctcgcatgcgcgccgcgtcgcctctggggggctgctgcaccgcgtttccatagcagcatgtcctacggaaacccagcacgtgtgtagagcctcgatcgtcatctctggttatttgttttttcctttgttgttttaaaggggacaaaaaaaaaaaaa

SEQ ID NO: 3046 - DNA, 2116 bp, Homo sapiens
  source 1..2116: mol_type = unassigned DNA; mol_type = unassigned DNA
gcgcgcccgccgcccgggcggaggagaggagcgcgcggccgcgcagagcaagctgagccgagccgagccgagctgggggcgcagagcgcgggaggcggcggcggcgcggagcccaggtggctccgctgccggatgggagtgccccagtgtgctggatgaagctggcgcatgcaccatgtcatcatgtgtctctagccagcccagcagcaaccgggccgccccccaggatgagctggggggcaggggcagcagcagcagcgaaagccagaagccctgtgaggccctgcggggcctctcatccttgagcatccacctgggcatggagtccttcattgtggtcaccgagtgtgagccgggctgtgctgtggacctcggcttggcgcgggaccggcccctggaggccgatggccaagaggtcccccttgacacctccgggtcccaggcccggccccacctctccggtcgcaagctgtctctgcaagagcggtcccagggtgggctggcagccggtggcagcctggacatgaacggacgctgcatctgcccgtccctgccctactcacccgtcagctccccgcagtcctcgcctcggctgccccggcggccgacagtggagtctcaccacgtctccatcacgggtatgcaggactgtgtgcagctgaatcagtataccctgaaggatgaaattggaaagggctcctatggtgtcgtcaagttggcctacaatgaaaatgacaatacctactatgcaatgaaggtgctgtccaaaaagaagctgatccggcaggccggctttccacgtcgccctccaccccgaggcacccggccagctcctggaggctgcatccagcccaggggccccattgagcaggtgtaccaggaaattgccatcctcaagaagctggaccaccccaatgtggtgaagctggtggaggtcctggatgaccccaatgaggaccatctgtacatggtgttcgaactggtcaaccaagggcccgtgatggaagtgcccaccctcaaaccactctctgaagaccaggcccgtttctacttccaggatctgatcaaaggcatcgagtacttacactaccagaagatcatccaccgtgacatcaaaccttccaacctcctggtcggagaagatgggcacatcaagatcgctgactttggtgtgagcaatgaattcaagggcagtgacgcgctcctctccaacaccgtgggcacgcccgccttcatggcacccgagtcgctctctgagacccgcaagatcttctctgggaaggccttggatgtttgggccatgggtgtgacactatactgctttgtctttggccagtgcccattcatggacgagcggatcatgtgtttacacagtaagatcaagagtcaggccctggaatttccagaccagcccgacatagctgaggacttgaaggacctgatcacccgtatgctggacaagaaccccgagtcgaggatcgtggtgccggaaatcaagctgcacccctgggtcacgaggcatggggcggagccgttgccgtcggaggatgagaactgcacgctggtcgaagtgactgaagaggaggtcgagaactcagtcaaacacattcccagcttggcaaccgtgatcctggtgaagaccatgatacgtaaacgctcctttgggaacccattcgagggcagccggcgggaggaacgctcactgtcagcgcctggaaacttgctcaccaaaaaaccaaccagggaatgtgagtccctgtctgagctcaaggaagcaaggcagcgaagacaacctccagggcaccgacccgccccccgtgggggaggaggaagtgctcttgtgagaggcagtccctgcgtggaaagttgctgggcccccgcccccggctcccccgcacgcatgcatccactgcggccggaggaggccatggagcccgagtagctgcctggatcgctcgacctcgcatgcgcgccgcgtcgcctctggggggctgctgcaccgcgtttccatagcagcatgtcctacggaaacccagcacgtgtgtagagcctcgatcgtcatctctggttatttgttttttcctttgttgttttaaaggggacaaaaaaaaaaaaa

SEQ ID NO: 3047 - DNA, 2051 bp, Homo sapiens
  source 1..2051: mol_type = unassigned DNA; mol_type = unassigned DNA
cagagcaagctgagccgagccgagccgagctgggggcgcagagcgcgggaggcggcggcggcgcggagcccaggtggctccgctgccggatgggagtgccccagtgtgctggatgaagctggcgcatgcaccatgtcatcatgtgtctctagccagcccagcagcaaccgggccgccccccaggatgagctggggggcaggggcagcagcagcagcgaaagccagaagccctgtgaggccctgcggggcctctcatccttgagcatccacctgggcatggagtccttcattgtggtcaccgagtgtgagccgggctgtgctgtggacctcggcttggcgcgggaccggcccctggaggccgatggccaagaggtcccccttgacacctccgggtcccaggcccggccccacctctccggtcgcaagctgtctctgcaagagcggtcccagggtgggctggcagccggtggcagcctggacatgaacggacgctgcatctgcccgtccctgccctactcacccgtcagctccccgcagtcctcgcctcggctgccccggcggccgacagtggagtctcaccacgtctccatcacgggtatgcaggactgtgtgcagctgaatcagtataccctgaaggatgaaattggaaagggctcctatggtgtcgtcaagttggcctacaatgaaaatgacaatacctactatgcaatgaaggtgctgtccaaaaagaagctgatccggcaggccggctttccacgtcgccctccaccccgaggcacccggccagctcctggaggctgcatccagcccaggggccccattgagcaggtgtaccaggaaattgccatcctcaagaagctggaccaccccaatgtggtgaagctggtggaggtcctggatgaccccaatgaggaccatctgtacatggtgttcgaactggtcaaccaagggcccgtgatggaagtgcccaccctcaaaccactctctgaagaccaggcccgtttctacttccaggatctgatcaaaggcatcgagtacttacactaccagaagatcatccaccgtgacatcaaaccttccaacctcctggtcggagaagatgggcacatcaagatcgctgactttggtgtgagcaatgaattcaagggcagtgacgcgctcctctccaacaccgtgggcacgcccgccttcatggcacccgagtcgctctctgagacccgcaagatcttctctgggaaggccttggatgtttgggccatgggtgtgacactatactgctttgtctttggccagtgcccattcatggacgagcggatcatgtgtttacacagtaagatcaagagtcaggccctggaatttccagaccagcccgacatagctgaggacttgaaggacctgatcacccgtatgctggacaagaaccccgagtcgaggatcgtggtgccggaaatcaagctgcacccctgggtcacgaggcatggggcggagccgttgccgtcggaggatgagaactgcacgctggtcgaagtgactgaagaggaggtcgagaactcagtcaaacacattcccagcttggcaaccgtgatcctggtgaagaccatgatacgtaaacgctcctttgggaacccattcgagggcagccggcgggaggaacgctcactgtcagcgcctggaaacttgctcaccaaaaaaccaaccagggaatgtgagtccctgtctgagctcaaggaagcaaggcagcgaagacaacctccagggcaccgacccgccccccgtgggggaggaggaagtgctcttgtgagaggcagtccctgcgtggaaagttgctgggcccccgcccccggctcccccgcacgcatgcatccactgcggccggaggaggccatggagcccgagtagctgcctggatcgctcgacctcgcatgcgcgccgcgtcgcctctggggggctgctgcaccgcgtttccatagcagcatgtcctacggaaacccagcacgtgtgtagagcctcgatcgtcatctctggttatttgttttttcctttgttgtttt

SEQ ID NO: 3048 - DNA, 2587 bp, Homo sapiens
  source 1..2587: mol_type = unassigned DNA; mol_type = unassigned DNA
cccatctctacgaaaaatacaaaaattagccaagtatggtggccggcgcctgtaatcccagctactcgggagactgaggcagagaactgcttgaacctgggaggcagaggttgcagtgatccgagatcgcgtcactgcactccagcgtgggcgacagagcgagactccgtttcagaaaagaaaaaaaaaaaaaaaaaaaagggagtcggggtggagctctcattggctcgttgcatgtgagtgtccctacggcctagaaatacaagagaagcacatcggaacgggctggaaatccacccagttaactagagggctttgaaccttttattaacttggaggttgactctcctgtcaactcgattcccttttggctgtttggcagggtcagtgagacatcccctgggtcgctcgaccccgtaggacggttcagggagccctccaggtcttcgtttctcctcttccccgcacagtgctgttatccagctgggggatccaacgcacacttaaggctccagcaaagtggctccgctgccggatgggagtgccccagtgtgctggatgaagctggcgcatgcaccatgtcatcatgtgtctctagccagcccagcagcaaccgggccgccccccaggatgagctggggggcaggggcagcagcagcagcgaaagccagaagccctgtgaggccctgcggggcctctcatccttgagcatccacctgggcatggagtccttcattgtggtcaccgagtgtgagccgggctgtgctgtggacctcggcttggcgcgggaccggcccctggaggccgatggccaagaggtcccccttgacacctccgggtcccaggcccggccccacctctccggtcgcaagctgtctctgcaagagcggtcccagggtgggctggcagccggtggcagcctggacatgaacggacgctgcatctgcccgtccctgccctactcacccgtcagctccccgcagtcctcgcctcggctgccccggcggccgacagtggagtctcaccacgtctccatcacgggtatgcaggactgtgtgcagctgaatcagtataccctgaaggatgaaattggaaagggctcctatggtgtcgtcaagttggcctacaatgaaaatgacaatacctactatgcaatgaaggtgctgtccaaaaagaagctgatccggcaggccggctttccacgtcgccctccaccccgaggcacccggccagctcctggaggctgcatccagcccaggggccccattgagcaggtgtaccaggaaattgccatcctcaagaagctggaccaccccaatgtggtgaagctggtggaggtcctggatgaccccaatgaggaccatctgtacatggtgttcgaactggtcaaccaagggcccgtgatggaagtgcccaccctcaaaccactctctgaagaccaggcccgtttctacttccaggatctgatcaaaggcatcgagtacttacactaccagaagatcatccaccgtgacatcaaaccttccaacctcctggtcggagaagatgggcacatcaagatcgctgactttggtgtgagcaatgaattcaagggcagtgacgcgctcctctccaacaccgtgggcacgcccgccttcatggcacccgagtcgctctctgagacccgcaagatcttctctgggaaggccttggatgtttgggccatgggtgtgacactatactgctttgtctttggccagtgcccattcatggacgagcggatcatgtgtttacacagtaagatcaagagtcaggccctggaatttccagaccagcccgacatagctgaggacttgaaggacctgatcacccgtatgctggacaagaaccccgagtcgaggatcgtggtgccggaaatcaagatcctggtgaagaccatgatacgtaaacgctcctttgggaacccattcgagggcagccggcgggaggaacgctcactgtcagcgcctggaaacttgctcaccaaaaaaccaaccagggaatgtgagtccctgtctgagctcaagacctagaaaataagtccccttcctgcctgttgcaaagtaacgtaagagttccctcacccgagtggatgcagaccttcttgctgtcagccacccttccttcatacacatagccagcccaggtgaccagaacctcccaggacagatgaggctttgtgtccttatgagactgggagaacctgctgggcacccctgctgcaggtgctgtggtgggtggggaccccactgcccttcccactgagcacatcatggctacctgacttggtgggagctccaggcagtcacttctgtttcttaaacatagctttactgaggtacaattcacataccatgtaattcacccacgggaagtgtatgattcagtggtttctaatacagacttctgcagccattaccaccgtcaactttacgacattttcatcagcccaagaagacaccctacactccttagctgtccccatccaactcccccaccccagtaaccactcagaataggtatggatttgcctattctggacgtttcgtataaatggcgtcatacacta

SEQ ID NO: 3049 - DNA, 2967 bp, Homo sapiens
  source 1..2967: mol_type = unassigned DNA; mol_type = unassigned DNA
gagcctggggaggtcgagggtgcagcgagccgtgatcgtgctactgcactccagcctgggcaacacagagagaccctgtctcaaaacaaacaaacaaacaaacaaacaaacaaacaaaaaaaacaaagaaaaaaaaatgggagtgggccgggcgcggtgactcacacctgtaatcccagcactttcggaggccaaggcgggtggatcacgaggtcaggaattcaagattagcctggacaacatggtgaaaccccatctctacgaaaaatacaaaaattagccaagtatggtggccggcgcctgtaatcccagctactcgggagactgaggcagagaactgcttgaacctgggaggcagaggttgcagtgatccgagatcgcgtcactgcactccagcgtgggcgacagagcgagactccgtttcagaaaagaaaaaaaaaaaaaaaaaaaagggagtcggggtggagctctcattggctcgttgcatgtgagtgtccctacggcctagaaatacaagagaagcacatcggaacgggctggaaatccacccagttaactagagggctttgaaccttttattaacttggaggttgactctcctgtcaactcgattcccttttggctgtttggcagggtcagtgagacatcccctgggtcgctcgaccccgtaggacggttcagggagccctccaggtcttcgtttctcctcttccccgcacagtgctgttatccagctgggggatccaacgcacacttaaggctccagcaaagtggctccgctgccggatgggagtgccccagtgtgctggatgaagctggcgcatgcaccatgtcatcatgtgtctctagccagcccagcagcaaccgggccgccccccaggatgagctggggggcaggggcagcagcagcagcgaaagccagaagccctgtgaggccctgcggggcctctcatccttgagcatccacctgggcatggagtccttcattgtggtcaccgagtgtgagccgggctgtgctgtggacctcggcttggcgcgggaccggcccctggaggccgatggccaagaggtcccccttgacacctccgggtcccaggcccggccccacctctccggtcgcaagctgtctctgcaagagcggtcccagggtgggctggcagccggtggcagcctggacatgaacggacgctgcatctgcccgtccctgccctactcacccgtcagctccccgcagtcctcgcctcggctgccccggcggccgacagtggagtctcaccacgtctccatcacgggtatgcaggactgtgtgcagctgaatcagtataccctgaaggatgaaattggaaagggctcctatggtgtcgtcaagttggcctacaatgaaaatgacaatacctactatgcaatgaaggtgctgtccaaaaagaagctgatccggcaggccggctttccacgtcgccctccaccccgaggcacccggccagctcctggaggctgcatccagcccaggggccccattgagcaggtgtaccaggaaattgccatcctcaagaagctggaccaccccaatgtggtgaagctggtggaggtcctggatgaccccaatgaggaccatctgtacatggtgttcgaactggtcaaccaagggcccgtgatggaagtgcccaccctcaaaccactctctgaagaccaggcccgtttctacttccaggatctgatcaaaggcatcgagtacttacactaccagaagatcatccaccgtgacatcaaaccttccaacctcctggtcggagaagatgggcacatcaagatcgctgactttggtgtgagcaatgaattcaagggcagtgacgcgctcctctccaacaccgtgggcacgcccgccttcatggcacccgagtcgctctctgagacccgcaagatcttctctgggaaggccttggatgtttgggccatgggtgtgacactatactgctttgtctttggccagtgcccattcatggacgagcggatcatgtgtttacacagtaagatcaagagtcaggccctggaatttccagaccagcccgacatagctgaggacttgaaggacctgatcacccgtatgctggacaagaaccccgagtcgaggatcgtggtgccggaaatcaagctgcacccctgggtcacgaggcatggggcggagccgttgccgtcggaggatgagaactgcacgctggtcgaagtgactgaagaggaggtcgagaactcagtcaaacacattcccagcttggcaaccgtgatcctggtgaagaccatgatacgtaaacgctcctttgggaacccattcgagggcagccggcgggaggaacgctcactgtcagcgcctggaaacttgctcaccaaaaaaccaaccagggaatgtgagtccctgtctgagctcaagacctagaaaataagtccccttcctgcctgttgcaaagtaacgtaagagttccctcacccgagtggatgcagaccttcttgctgtcagccacccttccttcatacacatagccagcccaggtgaccagaacctcccaggacagatgaggctttgtgtccttatgagactgggagaacctgctgggcacccctgctgcaggtgctgtggtgggtggggaccccactgcccttcccactgagcacatcatggctacctgacttggtgggagctccaggcagtcacttctgtttcttaaacatagctttactgaggtacaattcacataccatgtaattcacccacgggaagtgtatgattcagtggtttctaatacagacttctgcagccattaccaccgtcaactttacgacattttcatcagcccaagaagacaccctacactccttagctgtccccatccaactcccccaccccagtaaccactcagaataggtatggatttgcctattctggacgtttcgtataaatggcgtcatacacta

SEQ ID NO: 3050 - DNA, 809 bp, Homo sapiens
  source 1..809: mol_type = unassigned DNA; mol_type = unassigned DNA
gccgagctgggggcgcagagcgcgggaggcggcggcggcgcggagcccaggtggctccgctgccggatgggagtgccccagtgtgctggatgaagctggcgcatgcaccatgtcatcatgtgtctctagccagcccagcagcaaccgggccgccccccaggatgagctggggggcaggggcagcagcagcagcgaaagccagaagccctgtgaggccctgcggggcctctcatccttgagcatccacctgggcatggagtccttcattgtggtcaccgagtgtgagccgggctgtgctgtggacctcggcttggcgcgggaccggcccctggaggccgatggccaagaggtcccccttgacacctccgggtcccaggcccggccccacctctccggtcgcaagctgtctctgcaagagcggtcccagggtgggctggcagccggtggcagcctggacatgaacggacgctgcatctgcccgtccctgccctactcacccgtcagctccccgcagtcctcgcctcggctgccccggcggccgacagtggagtctcaccacgtctccatcacgggatctgatcaaaggcatcgagtacttacactaccagaagatcatccaccgtgacatcaaaccttccaacctcctggtcggagaagatgggcacatcaagatcgctgactttggtgtgagcaatgaattcaagggcagtgacgcgctcctctccaacaccgtgggcacgcccgccttcatggcacccgagtcgctctctgagacccgcaagatcttctctgggaaggtaagcttgggc

SEQ ID NO: 3051 - DNA, 547 bp, Homo sapiens
  source 1..547: mol_type = unassigned DNA; mol_type = unassigned DNA
attgtggtcaccgagtgtgagccgggctgtgctgtggacctcggcttggcgcgggaccggcccctggaggccgatggccaagaggtcccccttgacacctccgggtcccaggcccggccccacctctccggtcgcaagctgtctctgcaagagcggtcccagggtgggctggcagccggtggcagcctggacatgaacggacgctgcatctgcccgtccctgccctactcacccgtcagctccccgcagtcctcgcctcggctgccccggcggccgacagtggagtctcaccacgtctccatcacgggactgtgtgcagctgaatcagtataccctgaaggatgaaattggaaagatcttaacttctggatagtatgtcatgggcatctccctttatccagggctcctatggtgtcgtcaagttggcctacaatgaaaatgacaatacctactatgcaatgaaggtgctgtccaaaaagaagctgatccggcaggccggctttccacgtcgccctccaccccgaggcacccggccagctcctggagg

SEQ ID NO: 3052 - DNA, 567 bp, Homo sapiens
  source 1..567: mol_type = unassigned DNA; mol_type = unassigned DNA
attgtggtcaccgagtgtgagccgggctgtgctgtggacctcggcttggcgcgggaccggcccctggaggccgatggccaagaggtcccccttgacacctccgggtcccaggcccggccccacctctccggtcgcaagctgtctctgcaagagcggtcccagggtgggctggcagccggtggcagcctggacatgaacggacgctgcatctgcccgtccctgccctactcacccgtcagctccccgcagtcctcgcctcggctgccccggcggccgacagtggagtctcaccacgtctccatcacgggtatgcaggactgtgtgcagctgaatcagtataccctgaaggatgaaattggaaagtagagacgcggtttcatcatgttggccaggctggtctcaaactccttaactcaagtgatccgcctgcctcggcctcccaaagtattgggattacagggctcctatggtgtcgtcaagttggcctacaatgaaaatgacaatacctactatgcaatgaaggtgctgtccaaaaagaagctgatccggcaggccggctttccacgt

SEQ ID NO: 3053 - DNA, 563 bp, Homo sapiens
  source 1..563: mol_type = unassigned DNA; mol_type = unassigned DNA
aacgcacacttaaggctccagcaaagtaagtgccaaaaaggggagaatgggaagaatatgctgtatttcacaaaaagcatctaagtagccatctggaaaagccagaatgaacttcaatggtgcatccaggtggctccgctgccggatgggagtgccccagtgtgctggatgaagctggcgcatgcaccatgtcatcatgtgtctctagccagcccagcagcaaccgggccgccccccaggatgagctggggggcaggggcagcagcagcagcgaaagccagaagccctgtgaggccctgcggggcctctcatccttgagcatccacctgggcatggagtccttcattgtggtcaccgagtgtgagccgggctgtgctgtggacctcggcttggcgcgggaccggcccctggaggccgatggccaagaggtcccccttgacacctccgggtcccaggcccggccccacctctccggtcgcaagctgtctctgcaagagcggtcccagggtgggctggcagccggtggcagcctggacatgaacggacgctgcatctgcccgtcc

SEQ ID NO: 3054 - DNA, 543 bp, Homo sapiens
  source 1..543: mol_type = unassigned DNA; mol_type = unassigned DNA
gagtcggtggtggcccaaagtccaggccgcatccaccgcccggcgcctagcgcaggggcagcagccgggtcgccacaggaggggccccgggtgttcttgccggcttgggggaactttcccagggtcagcccggaggcgccctgcagccccggcatttggctaaacaaagcaagcgctgccggcgcggcccgcccgagggcgccgcgggaagaacctgggcaggtggctccgctgccggatgggagtgccccagtgtgctggatgaagctggcgcatgcaccatgtcatcatgtgtctctagccagcccagcagcaaccgggccgccccccaggatgagctggggggcaggggcagcagcagcagcgaaagccagaagccctgtgaggccctgcggggcctctcatccttgagcatccacctgggcatggagtccttcattgtggtcaccgagtgtgagccgggctgtgctgtggacctcggcttggcgcgggaccggcccctggaggccgatggccaagaggtcccccttgacacctccgggt

SEQ ID NO: 3055 - DNA, 3157 bp, Homo sapiens
  source 1..3157: mol_type = unassigned DNA; mol_type = unassigned DNA
gctggaggttcgctagccgaagcggctgcatctggcgccgcgtctgccccgcgtgctcggagcggattctgcccgccgtccccggagccctcggcgccccgctgagcccgcgatcacttcctccctgtgaccaaccggcgctgcaggttagagcctggcaatgccgtttgggtgtgtgactctgggcgacaagaagaactataaccagccatcggaggtgactgacagatatgatttgggacaggtcatcaagactgaggagttttgtgaaatcttccgggccaaggacaagacgacaggcaagctgcacacctgcaagaagttccagaagcgggacggccgcaaggtgcggaaagctgccaagaacgagataggcatcctcaagatggtgaagcatcccaacatcctacagctggtggatgtgtttgtgacccgcaaggagtactttatcttcctggagctggccacggggagggaggtgtttgactggatcctggaccagggctactactcggagcgagacacaagcaacgtggtacggcaagtcctggaggccgtggcctatttgcactcactcaagatcgtgcacaggaatctcaagctggagaacctggtttactacaaccggctgaagaactcgaagattgtcatcagtgacttccatctggctaagctagaaaatggcctcatcaaggagccctgtgggacccccgagtatctgggcaagcagggggtggggcaggggcagggggataatggggggcagccttcagggagctgctctgggcagggggaaaatgtgctcatctcaggaagctggtgtggatggtactggacctggctaggcctgatactgaccagcagatgggcgctgtgtttgtagccccagaggtggtaggccggcagcggtatggacgccctgtggactgctgggccattggagtcatcatgtacatcctgctttcaggcaatccacctttctatgaggaggtggaagaagatgattatgagaaccatgataagaatctcttccgcaagatcctggctggtgactatgagtttgactctccatattgggatgatatttcgcaggcagccaaagacctggtcacaaggctgatggaggtggagcaagaccagcggatcactgcagaagaggccatctcccatgagtggatttctggcaatgctgcttctgataagaacatcaaggatggtgtctgtgcccagattgaaaagaactttgccagggccaagtggaagaaggctgtccgagtgaccaccctcatgaaacggctccgggcaccagagcagtccagcacggctgcagcccagtcggcctcagccacagacactgccacccccggggctgcaggtggggccacagctgcagctgcgagtggagctacctcagcccctgagggtgatgctgctcgtgctgcaaagagtgataatgtggcccccgcagaccgtagtgccaccccagccacagatggaagtgccaccccagccactgatggcagtgtcaccccagccaccgatggaagcatcactccagccactgatgggagtgtcaccccagccactgacaggagcgctactccagccactgatgggagagccacaccagccacagaagagagcactgtgcccaccacccaaagcagtgccatgctggccaccaaggcagctgccacccctgagccggctatggcccagccggacagcacagccccagagggcgccacaggccaggctccaccctctagtaaaggggaagaggctgctggttatgcccaggagtctcaaagggaggaggccagctgagtaggcagcctggtgagggggggcaggggatgggcaggagggtgggagagtggatgaggggcttctcactgtacatagagtcactggcatgatgccctcgctcccccatgcccccacatcccagtggggcataactaggggtcacgggagagcagtctcgtctcctgtgtgtatgtgtgtgagtggtgggcaggccagtggcagggccggccccagcccctgcatggattccttgtggcttttctgtcttttgctagcttcaccagtttctgttccttgtgggatgctgctctagggatactcagggggctcctgctctccttccccttcccttcttgcctcaccattcccctaggcaggccctgcaggtcccacactctcccaggccctaaacttgggcggccttgccctgagagctggtcctccagcgaggccctgtcagcggtcttaggctcctgcacatgaaggtgtgtgcctgtggtgtgtgggctgctctaggagcagatacaggctggtatagaggatgcagaaaggtagggcagtatgtttaagtccagacttggcacatggctagggatactgctcactagctgtggaggtcctcaggagtggagagaatgagtaggagggcagaagcttccatttttgtccttcctaagaccctgttatttgtgttatttcctgcctttccgagtcctgcagtgggctgccctgtaccctgaacctcatgagcctctaagggaaaggaggaacaattaggacgtggcaatgagacctggcagggcagagtacaagcccagcacccagtgtcccagccttactgggtccttaccctgggccaaacagggagggctgatacctccttgctcttcctagatgcccacctcctacaatctcagcccacaagtcctctccaccctagggggcttgctgcatggcaataactcataatctgatttggaggtttgccctttacaggggcagattttctgctcagttcaacaatgaaatgaagaggaactccctctttctacagctcacttctatcagaggcccaggtgcctcagagccacattgagttgctttttctgggatgaggaagtagggttaaactccccagtttcctgagggaggctcctgacaggtgccctttgtcagaccctaccacagcctggataggcagccacattggtcctcgcccttgctcggcactccgtggtggtcctgcccttctccctgcatgcctgtgggtctgctctggtgtgtgaaggtcggtgggttaactgtgtgcctactgaacctggcaaataaacatcaccctgcaaagcct

SEQ ID NO: 3056 - DNA, 2913 bp, Homo sapiens
  source 1..2913: mol_type = unassigned DNA; mol_type = unassigned DNA
atgctggaggttcgctagccgaagcggctgcatctggcgccgcgtctgccccgcgtgctcggagcggattctgcccgccgtccccggagccctcggcgccccgctgagcccgcgatcacttcctccctgtgaccaaccggcgctgcaggttagagcctggcaatgccgtttgggtgtgtgactctgggcgacaagaagaactataaccagccatcggaggtgactgacagatatgatttgggacaggtcatcaagactgaggagttttgtgaaatcttccgggccaaggacaagacgacaggcaagctgcacacctgcaagaagttccagaagcgggacggccgcaaggtgcggaaagctgccaagaacgagataggcatcctcaagatggtgaagcatcccaacatcctacagctggtggatgtgtttgtgacccgcaaggagtactttatcttcctggagctggccacggggagggaggtgtttgactggatcctggaccagggctactactcggagcgagacacaagcaacgtggtacggcaagtcctggaggccgtggcctatttgcactcactcaagatcgtgcacaggaatctcaagctggagaacctggtttactacaaccggctgaagaactcgaagattgtcatcagtgacttccatctggctaagctagaaaatggcctcatcaaggagccctgtgggacccccgagtatctgggcaatccacctttctatgaggaggtggaagaagatgattatgagaaccatgataagaatctcttccgcaagatcctggctggtgactatgagtttgactctccatattgggatgatatttcgcaggcagccaaagacctggtcacaaggctgatggaggtggagcaagaccagcggatcactgcagaagaggccatctcccatgagtggatttctggcaatgctgcttctgataagaacatcaaggatggtgtctgtgcccagattgaaaagaactttgccagggccaagtggaagaaggctgtccgagtgaccaccctcatgaaacggctccgggcaccagagcagtccagcacggctgcagcccagtcggcctcagccacagacactgccacccccggggctgcaggtggggccacagctgcagctgcgagtggagctacctcagcccctgagggtgatgctgctcgtgctgcaaagagtgataatgtggcccccgcagaccgtagtgccaccccagccacagatggaagtgccaccccagccactgatggcagtgtcaccccagccaccgatggaagcatcactccagccactgatgggagtgtcaccccagccactgacaggagcgctactccagccactgatgggagagccacaccagccacagaagagagcactgtgcccaccacccaaagcagtgccatgctggccaccaaggcagctgccacccctgagccggctatggcccagccggacagcacagccccagagggcgccacaggccaggctccaccctctagtaaaggggaagaggctgctggttatgcccaggagtctcaaagggaggaggccagctgagtaggcagcctggtgagggggggcaggggatgggcaggagggtgggagagtggatgaggggcttctcactgtacatagagtcactggcatgatgccctcgctcccccatgcccccacatcccagtggggcataactaggggtcacgggagagcagtctcgtctcctgtgtgtatgtgtgtgagtggtgggcaggccagtggcagggccggccccagcccctgcatggattccttgtggcttttctgtcttttgctagcttcaccagtttctgttccttgtgggatgctgctctagggatactcagggggctcctgctctccttccccttcccttcttgcctcaccattcccctaggcaggccctgcaggtcccacactctcccaggccctaaacttgggcggccttgccctgagagctggtcctccagcgaggccctgtcagcggtcttaggctcctgcacatgaaggtgtgtgcctgtggtgtgtgggctgctctaggagcagatacaggctggtatagaggatgcagaaaggtagggcagtatgtttaagtccagacttggcacatggctagggatactgctcactagctgtggaggtcctcaggagtggagagaatgagtaggagggcagaagcttccatttttgtccttcctaagaccctgttatttgtgttatttcctgcctttccgagtcctgcagtgggctgccctgtaccctgaacctcatgagcctctaagggaaaggaggaacaattaggacgtggcaatgagacctggcagggcagagtacaagcccagcacccagtgtcccagccttactgggtccttaccctgggccaaacagggagggctgatacctccttgctcttcctagatgcccacctcctacaatctcagcccacaagtcctctccaccctagggggcttgctgcatggcaataactcataatctgatttggaggtttgccctttacaggggcagattttctgctcagttcaacaatgaaatgaagaggaactccctctttctacagctcacttctatcagaggcccaggtgcctcagagccacattgagttgctttttctgggatgaggaagtagggttaaactccccagtttcctgagggaggctcctgacaggtgccctttgtcagaccctaccacagcctggataggcagccacattggtcctcgcccttgctcggcactccgtggtggtcctgcccttctccctgcatgcctgtgggtctgctctggtgtgtgaaggtcggtgggttaactgtgtgcctactgaacctggcaaataaacatcaccctgcaaagcc

SEQ ID NO: 3057 - DNA, 2905 bp, Homo sapiens
  source 1..2905: mol_type = unassigned DNA; mol_type = unassigned DNA
gatgctggaggttcgctagccgaagcggctgcatctggcgccgcgtctgccccgcgtgctcggagcggattctgcccgccgtccccggagccctcggcgccccgctgagcccgcgatcacttcctccctgtgaccaaccggcgctgcaggttagagcctggcaatgccgtttgggtgtgtgactctgggcgacaagaagaactataaccagccatcggaggtgactgacagatatgatttgggacaggtcatcaagactgaggagttttgtgaaatcttccgggccaaggacaagacgacaggcaagctgcacacctgcaagaagttccagaagcgggacggccgcaaggtgcggaaagctgccaagaacgagataggcatcctcaagatggtgaagcatcccaacatcctacagctggtggatgtgtttgtgacccgcaaggagtactttatcttcctggagctggccacggggagggaggtgtttgactggatcctggaccagggctactactcggagcgagacacaagcaacgtggtacggcaagtcctggaggccgtggcctatttgcactcactcaagatcgtgcacaggaatctcaagctggagaacctggtttactacaaccggctgaagaactcgaagattgtcatcagtgacttccatctggctaagctagaaaatggcctcatcaaggagccctgtgggacccccgagtatctggccccagaggtggtaggccggcagcggtatggacgccctgtggactgctgggccattggagtcatcatgtacatcctgctttcaggcaatccacctttctatgaggaggtggaagaagatgattatgagaaccatgataagaatctcttccgcaagatcctggctggtgactatgagtttgactctccatattgggatgatatttcgcaggcagccaaagacctggtcacaaggctgatggaggtggagcaagaccagcggatcactgcagaagaggccatctcccatgagtggatttctggcaatgctgcttctgataagaacatcaaggatggtgtctgtgcccagattgaaaagaactttgccagggccaagtggaagaaggctgtccgagtgaccaccctcatgaaacggctccgggcaccagagcagtccagcacggctgcagcccagtcggcctcagccacagacactgccacccccggggctgcagaccgtagtgccaccccagccacagatggaagtgccaccccagccactgatggcagtgtcaccccagccaccgatggaagcatcactccagccactgatgggagtgtcaccccagccactgacaggagcgctactccagccactgatgggagagccacaccagccacagaagagagcactgtgcccaccacccaaagcagtgccatgctggccaccaaggcagctgccacccctgagccggctatggcccagccggacagcacagccccagagggcgccacaggccaggctccaccctctagtaaaggggaagaggctgctggttatgcccaggagtctcaaagggaggaggccagctgagtaggcagcctggtgagggggggcaggggatgggcaggagggtgggagagtggatgaggggcttctcactgtacatagagtcactggcatgatgccctcgctcccccatgcccccacatcccagtggggcataactaggggtcacgggagagcagtctcgtctcctgtgtgtatgtgtgtgagtggtgggcaggccagtggcagggccggccccagcccctgcatggattccttgtggcttttctgtcttttgctagcttcaccagtttctgttccttgtgggatgctgctctagggatactcagggggctcctgctctccttccccttcccttcttgcctcaccattcccctaggcaggccctgcaggtcccacactctcccaggccctaaacttgggcggccttgccctgagagctggtcctccagcgaggccctgtcagcggtcttaggctcctgcacatgaaggtgtgtgcctgtggtgtgtgggctgctctaggagcagatacaggctggtatagaggatgcagaaaggtagggcagtatgtttaagtccagacttggcacatggctagggatactgctcactagctgtggaggtcctcaggagtggagagaatgagtaggagggcagaagcttccatttttgtccttcctaagaccctgttatttgtgttatttcctgcctttccgagtcctgcagtgggctgccctgtaccctgaacctcatgagcctctaagggaaaggaggaacaattaggacgtggcaatgagacctggcagggcagagtacaagcccagcacccagtgtcccagccttactgggtccttaccctgggccaaacagggagggctgatacctccttgctcttcctagatgcccacctcctacaatctcagcccacaagtcctctccaccctagggggcttgctgcatggcaataactcataatctgatttggaggtttgccctttacaggggcagattttctgctcagttcaacaatgaaatgaagaggaactccctctttctacagctcacttctatcagaggcccaggtgcctcagagccacattgagttgctttttctgggatgaggaagtagggttaaactccccagtttcctgagggaggctcctgacaggtgccctttgtcagaccctaccacagcctggataggcagccacattggtcctcgcccttgctcggcactccgtggtggtcctgcccttctccctgcatgcctgtgggtctgctctggtgtgtgaaggtcggtgggttaactgtgtgcctactgaacctggcaaataaacatcaccctgcaaagcc

SEQ ID NO: 3058 - DNA, 2818 bp, Homo sapiens
  source 1..2818: mol_type = unassigned DNA; mol_type = unassigned DNA
aatccggtgccggcaagcggctggcgatgctggaggttcgctagccgaagcggctgcatctggcgccgcgtctgccccgcgtgctcggagcggattctgcccgccgtccccggagccctcggcgccccgctgagcccgcgatcacttcctccctgtgaccaaccggcgctgcaggttagagcctggcaatgccgtttgggtgtgtgactctgggcgacaagaagaactataaccagccatcggaggtgactgacagatatgatttgggacaggtcatcaagactgaggagttttgtgaaatcttccgggccaaggacaagacgacaggcaagctgcacacctgcaagaagttccagaagcgggacggccgcaaggtgcggaaagctgccaagaacgagataggcatcctcaagatggtgaagcatcccaacatcctacagctggtggatgtgtttgtgacccgcaaggagtactttatcttcctggagctggccacggggagggaggtgtttgactggatcctggaccagggctactactcggagcgagacacaagcaacgtggtacggcaagtcctggaggccgtggcctatttgcactcactcaagatcgtgcacaggaatctcaagctggagaacctggtttactacaaccggctgaagaactcgaagattgtcatcagtgacttccatctggctaagctagaaaatggcctcatcaaggagccctgtgggacccccgagtatctggccccagaggtggtaggccggcagcggtatggacgccctgtggactgctgggccattggagtcatcatgtacatcctgctttcaggcaatccacctttctatgaggaggtggaagaagatgattatgagaaccatgataagaatctcttccgcaagatcctggctggtgactatgagtttgactctccatattgggatgatatttcgcaggcagccaaagacctggtcacaaggctgatggaggtggagcaagaccagcggatcactgcagaagaggccatctcccatgagtggatttctggcaatgctgcttctgataagaacatcaaggatggtgtctgtgcccagattgaaaagaactttgccagggccaagtggaagaccgtagtgccaccccagccacagatggaagtgccaccccagccactgatggcagtgtcaccccagccaccgatggaagcatcactccagccactgatgggagtgtcaccccagccactgacaggagcgctactccagccactgatgggagagccacaccagccacagaagagagcactgtgcccaccacccaaagcagtgccatgctggccaccaaggcagctgccacccctgagccggctatggcccagccggacagcacagccccagagggcgccacaggccaggctccaccctctagtaaaggggaagaggctgctggttatgcccaggagtctcaaagggaggaggccagctgagtaggcagcctggtgagggggggcaggggatgggcaggagggtgggagagtggatgaggggcttctcactgtacatagagtcactggcatgatgccctcgctcccccatgcccccacatcccagtggggcataactaggggtcacgggagagcagtctcgtctcctgtgtgtatgtgtgtgagtggtgggcaggccagtggcagggccggccccagcccctgcatggattccttgtggcttttctgtcttttgctagcttcaccagtttctgttccttgtgggatgctgctctagggatactcagggggctcctgctctccttccccttcccttcttgcctcaccattcccctaggcaggccctgcaggtcccacactctcccaggccctaaacttgggcggccttgccctgagagctggtcctccagcgaggccctgtcagcggtcttaggctcctgcacatgaaggtgtgtgcctgtggtgtgtgggctgctctaggagcagatacaggctggtatagaggatgcagaaaggtagggcagtatgtttaagtccagacttggcacatggctagggatactgctcactagctgtggaggtcctcaggagtggagagaatgagtaggagggcagaagcttccatttttgtccttcctaagaccctgttatttgtgttatttcctgcctttccgagtcctgcagtgggctgccctgtaccctgaacctcatgagcctctaagggaaaggaggaacaattaggacgtggcaatgagacctggcagggcagagtacaagcccagcacccagtgtcccagccttactgggtccttaccctgggccaaacagggagggctgatacctccttgctcttcctagatgcccacctcctacaatctcagcccacaagtcctctccaccctagggggcttgctgcatggcaataactcataatctgatttggaggtttgccctttacaggggcagattttctgctcagttcaacaatgaaatgaagaggaactccctctttctacagctcacttctatcagaggcccaggtgcctcagagccacattgagttgctttttctgggatgaggaagtagggttaaactccccagtttcctgagggaggctcctgacaggtgccctttgtcagaccctaccacagcctggataggcagccacattggtcctcgcccttgctcggcactccgtggtggtcctgcccttctccctgcatgcctgtgggtctgctctggtgtgtgaaggtcggtgggttaactgtgtgcctactgaacctggcaaataaacatcaccctgcaaagcc

SEQ ID NO: 3059 - DNA, 3314 bp, Homo sapiens
  source 1..3314: mol_type = unassigned DNA; mol_type = unassigned DNA
actaatgactggcaagcgatcctatgcagctccaggactcaggctttcccccaactctccactcaccaccccttacattgggcataggaggcctcctccggccccaggctgagggcctaagggagccattgagaaccttggccagggctaagcaggccagtgctcaccagcaccgctgccatcccgcgcgctcctgctctccagtgggattctgcccttaaggctccgccagggtcggggcggggccggttgggaggccccgcccccagcccgcccccggcccggggtgcgaatccggtgccggcaagcggctggcgatgctggaggttcgctagccgaagcggctgcatctggcgccgcgtctgccccgcgtgctcggagcggattctgcccgccgtccccggagccctcggcgccccgctgagcccgcgatcacttcctccctgtgaccaaccggcgctgcaggttagagcctggcaatgccgtttgggtgtgtgactctgggcgacaagaagaactataaccagccatcggaggtgactgacagatatgatttgggacaggtcatcaagactgaggagttttgtgaaatcttccgggccaaggacaagacgacaggcaagctgcacacctgcaagaagttccagaagcgggacggccgcaaggtgcggaaagctgccaagaacgagataggcatcctcaagatggtgaagcatcccaacatcctacagctggtggatgtgtttgtgacccgcaaggagtactttatcttcctggagctggccacggggagggaggtgtttgactggatcctggaccagggctactactcggagcgagacacaagcaacgtggtacggcaagtcctggaggccgtggcctatttgcactcactcaagatcgtgcacaggaatctcaagctggagaacctggtttactacaaccggctgaagaactcgaagattgtcatcagtgacttccatctggctaagctagaaaatggcctcatcaaggagccctgtgggacccccgagtatctggccccagaggtggtaggccggcagcggtatggacgccctgtggactgctgggccattggagtcatcatgtacatcctgctttcaggcaatccacctttctatgaggaggtggaagaagatgattatgagaaccatgataagaatctcttccgcaagatcctggctggtgactatgagtttgactctccatattgggatgatatttcgcaggcagccaaagacctggtcacaaggctgatggaggtggagcaagaccagcggatcactgcagaagaggccatctcccatgagtggatttctggcaatgctgcttctgataagaacatcaaggatggtgtctgtgcccagattgaaaagaactttgccagggccaagtggaagaaggctgtccgagtgaccaccctcatgaaacggctccgggcaccagagcagtccagcacggctgcagcccagtcggcctcagccacagacactgccacccccggggctgcaggtggggccacagctgcagctgcgagtggagctacctcagcccctgagggtgatgctgctcgtgctgcaaagagtgataatgtggcccccgcagaccgtagtgccaccccagccacagatggaagtgccaccccagccactgatggcagtgtcaccccagccaccgatggaagcatcactccagccactgatgggagtgtcaccccagccactgacaggagcgctactccagccactgatgggagagccacaccagccacagaagagagcactgtgcccaccacccaaagcagtgccatgctggccaccaaggcagctgccacccctgagccggctatggcccagccggacagcacagccccagagggcgccacaggccaggctccaccctctagtaaaggggaagaggctgctggttatgcccaggagtctcaaagggaggaggccagctgagtaggcagcctggtgagggggggcaggggatgggcaggagggtgggagagtggatgaggggcttctcactgtacatagagtcactggcatgatgccctcgctcccccatgcccccacatcccagtggggcataactaggggtcacgggagagcagtctcgtctcctgtgtgtatgtgtgtgagtggtgggcaggccagtggcagggccggccccagcccctgcatggattccttgtggcttttctgtcttttgctagcttcaccagtttctgttccttgtgggatgctgctctagggatactcagggggctcctgctctccttccccttcccttcttgcctcaccattcccctaggcaggccctgcaggtcccacactctcccaggccctaaacttgggcggccttgccctgagagctggtcctccagcgaggccctgtcagcggtcttaggctcctgcacatgaaggtgtgtgcctgtggtgtgtgggctgctctaggagcagatacaggctggtatagaggatgcagaaaggtagggcagtatgtttaagtccagacttggcacatggctagggatactgctcactagctgtggaggtcctcaggagtggagagaatgagtaggagggcagaagcttccatttttgtccttcctaagaccctgttatttgtgttatttcctgcctttccgagtcctgcagtgggctgccctgtaccctgaacctcatgagcctctaagggaaaggaggaacaattaggacgtggcaatgagacctggcagggcagagtacaagcccagcacccagtgtcccagccttactgggtccttaccctgggccaaacagggagggctgatacctccttgctcttcctagatgcccacctcctacaatctcagcccacaagtcctctccaccctagggggcttgctgcatggcaataactcataatctgatttggaggtttgccctttacaggggcagattttctgctcagttcaacaatgaaatgaagaggaactccctctttctacagctcacttctatcagaggcccaggtgcctcagagccacattgagttgctttttctgggatgaggaagtagggttaaactccccagtttcctgagggaggctcctgacaggtgccctttgtcagaccctaccacagcctggataggcagccacattggtcctcgcccttgctcggcactccgtggtggtcctgcccttctccctgcatgcctgtgggtctgctctggtgtgtgaaggtcggtgggttaactgtgtgcctactgaacctggcaaataaacatcaccctgcaaagcc

SEQ ID NO: 3060 - DNA, 1589 bp, Homo sapiens
  source 1..1589: mol_type = unassigned DNA; mol_type = unassigned DNA
gctggaggttcgctagccgaagcggctgcatctggcgccgcgtctgccccgcgtgctcggagcggattctgcccgccgtccccggagccctcggcgccccgctgagcccgcgatcacttcctccctgtgaccaaccggcgctgcaggttagagcctggcaatgccgtttgggtgtgtgactctgggcgacaagaagaactataaccagccatcggaggtgactgacagatatgatttgggacaggtcatcaagactgaggagttttgtgaaatcttccgggccaaggacaagacgacaggcaagctgcacacctgcaagaagttccagaagcgggacggccgcaagggtgaagcatcccaacatcctacagctggtggatgtgtttgtgacccgcaaggagtactttatcttcctggagctggccacggggagggaggtgtttgactggatcctggaccagggctactactcggagcgagacacaagcaacgtggtacggcaagtcctggaggccgtggcctatttgcactcactcaagatcgtgcacaggaatctcaagctggagaacctggtttactacaaccggctgaagaactcgaagattgtcatcagtgacttccatctggctaagctagaaaatggcctcatcaaggagccctgtgggacccccgagtatctggccccagaggtggtaggccggcagcggtatggacgccctgtggactgctgggccattggagtcatcatgtacatcctgctttcaggcaatccacctttctatgaggaggtggaagaagatgattatgagaaccatgataagaatctcttccgcaagatcctggctggtgactatgagtttgactctccatattgggatgatatttcgcaggcagccaaagacctggtcacaaggctgatggaggtggagcaagaccagcggatcactgcagaagaggccatctcccatgagtggatttctggcaatgctgcttctgataagaacatcaaggatggtgtctgtgcccagattgaaaagaactttgccagggccaagtggaagaaggctgtccgagtgaccaccctcatgaaacggctccgggcaccagagcagtccagcacggctgcagcccagtcggcctcagccacagacactgccacccccggggctgcagaccgtagtgccaccccagccacagatggaagtgccaccccagccactgatggcagtgtcaccccagccaccgatggaagcatcactccagccactgatgggagtgtcaccccagccactgacaggagcgctactccagccactgatgggagagccacaccagccacagaagagagcactgtgcccaccacccaaagcagtgccatgctggccaccaaggcagctgccacccctgagccggctatggcccagccggacagcacagccccagagggcgccacaggccaggctccaccctctagtaaaggggaagaggctgctggttatgcccaggagtctcaaagggaggaggccagctgagtaggcagcctggtgagggggggcaggggatgggcaggagggtgggagagtggatga

SEQ ID NO: 3061 - DNA, 1688 bp, Homo sapiens
  source 1..1688: mol_type = unassigned DNA; mol_type = unassigned DNA
gatgctggaggttcgctagccgaagcggctgcatctggcgccgcgtctgccccgcgtgctcggagcggattctgcccgccgtccccggagccctcggcgccccgctgagcccgcgatcacttcctccctgtgaccaaccggcgctgcaggttagagcctggcaatgccgtttgggtgtgtgactctgggcgacaagaagaactataaccagccatcggagtgaggagttttgtgaaatcttccgggccaaggacaagacgacaggcaagctgcacacctgcaagaagttccagaagcgggacggccgcaaggtgcggaaagctgccaagaacgagataggcatcctcaagatggtgaagcatcccaacatcctacagctggtggatgtgtttgtgacccgcaaggagtactttatcttcctggagctggccacggggagggaggtgtttgactggatcctggaccagggctactactcggagcgagacacaagcaacgtggtacggcaagtcctggaggccgtggcctatttgcactcactcaagatcgtgcacaggaatctcaagctggagaacctggtttactacaaccggctgaagaactcgaagattgtcatcagtgacttccatctggctaagctagaaaatggcctcatcaaggagccctgtgggacccccgagtatctggccccagaggtggtaggccggcagcggtatggacgccctgtggactgctgggccattggagtcatcatgtacatcctgctttcaggcaatccacctttctatgaggaggtggaagaagatgattatgagaaccatgataagaatctcttccgcaagatcctggctggtgactatgagtttgactctccatattgggatgatatttcgcaggcagccaaagacctggtcacaaggctgatggaggtggagcaagaccagcggatcactgcagaagaggccatctcccatgagtggatttctggcaatgctgcttctgataagaacatcaaggatggtgtctgtgcccagattgaaaagaactttgccagggccaagtggaagaaggctgtccgagtgaccaccctcatgaaacggctccgggcaccagagcagtccagcacggctgcagcccagtcggcctcagccacagacactgccacccccggggctgcaggtggggccacagctgcagctgcgagtggagctacctcagcccctgagggtgatgctgctcgtgctgcaaagagtgataatgtggcccccgcagaccgtagtgccaccccagccacagatggaagtgccaccccagccactgatggcagtgtcaccccagccaccgatggaagcatcactccagccactgatgggagtgtcaccccagccactgacaggagcgctactccagccactgatgggagagccacaccagccacagaagagagcactgtgcccaccacccaaagcagtgccatgctggccaccaaggcagctgccacccctgagccggctatggcccagccggacagcacagccccagagggcgccacaggccaggctccaccctctagtaaaggggaagaggctgctggttatgcccaggagtctcaaagggaggaggccagctgagtaggcagcctggtgagggggggcaggggatgggcaggagggtgggagagtggatga

SEQ ID NO: 3062 - DNA, 1475 bp, Homo sapiens
  source 1..1475: mol_type = unassigned DNA; mol_type = unassigned DNA
ggcgatgctggaggttcgctagccgaagcggctgcatctggcgccgcgtctgccccgcgtgctcggagcggattctgcccgccgtccccggagccctcggcgccccgctgagcccgcgatcacttcctccctgtgaccaaccggcgctgcaggttagagcctggcaatgccgtttgggtgtgtgactctgggcgacaagaagaactataaccagccatcggaggtgactgacagatatgatttgggacaggtcatcaagactgaggagttttgtgaaatcttccgggccaaggacaagacgacaggcaagctgcacacctgcaagaagttccagaagcgggacggccgcaaggtgcggaaagctgccaagaacgagataggcatcctcaagatggtgaagcatcccaacatcctacagctggtggatgtgtttgtgacccgcaaggagtactttatcttcctggagctgaatctcaagctggagaacctggtttactacaaccggctgaagaactcgaagattgtcatcagtgacttccatctggctaagctagaaaatggcctcatcaaggagccctgtgggacccccgagtatctggccccagaggtggtaggccggcagcggtatggacgccctgtggactgctgggccattggagtcatcatgtacatcctgctttcaggcaatccacctttctatgaggaggtggaagaagatgattatgagaaccatgataagaatctcttccgcaagatcctggctggtgactatgagtttgactctccatattgggatgatatttcgcaggcagccaaagacctggtcacaaggctgatggaggtggagcaagaccagcggatcactgcagaagaggccatctcccatgagtggatttctggcaatgctgcttctgataagaacatcaaggatggtgtctgtgcccagattgaaaagaactttgccagggccaagtggaagaaggctgtccgagtgaccaccctcatgaaacggctccgggcaccagagcagtccagcacggctgcagcccagtcggcctcagccacagacactgccacccccggggctgcagaccgtagtgccaccccagccacagatggaagtgccaccccagccactgatggcagtgtcaccccagccaccgatggaagcatcactccagccactgatgggagtgtcaccccagccactgacaggagcgctactccagccactgatgggagagccacaccagccacagaagagagcactgtgcccaccacccaaagcagtgccatgctggccaccaaggcagctgccacccctgagccggctatggcccagccggacagcacagccccagagggcgccacaggccaggctccaccctctagtaaaggggaagaggctgctggttatgcccaggagtctcaaagggaggaggccagctgagtaggcagcctggtgagggggggca

SEQ ID NO: 3063 - DNA, 589 bp, Homo sapiens
  source 1..589: mol_type = unassigned DNA; mol_type = unassigned DNA
ttgtagccccagaggtggtaggccggcagcggtatggacgccctgtggactgctgggccattggagtcatcatgtacatcctgtgagtggacagatggacaagcaggcttgcagtcagatggggtgggggcatgtgtctgtggcctttctgtgtgacccttcccccatgcaggctttcaggcaatccacctttctatgaggaggtggaagaagatgattatgagaaccatgataagaatctcttccgcaagatcctggctggtgactatgagtttgactctccatattgggatgatatttcgcaggcagccaaagacctggtcacaaggctgatggaggtggagcaagaccagcggatcactgcagaagaggccatctcccatgagtggatttctggcaatgctgcttctgataagaacatcaaggatggtgtctgtgcccagattgaaaagaactttgccagggccaagtggaagaaggctgtccgagtgaccaccctcatgaaacggctccgggcaccagagcagtccagcacggctgcagcccagtcggcctcagccacagacactgccacccccggggctgcagg

SEQ ID NO: 3064 - DNA, 1035 bp, Homo sapiens
  source 1..1035: mol_type = unassigned DNA; mol_type = unassigned DNA
atgctggaggttcgctagccgaagcggctgcatctggcgccgcgtctgccccgcgtgctcggagcggattctgcccgccgtccccggagccctcggcgccccgctgagcccgcgatcacttcctccctgtgaccaaccggcgctgcaggttagagcctggcaatgccgtttgggtgtgtgactctgggcgacaagaagaactataaccagccatcggaggtgactgacagatatgatttgggacaggtcatcaagactgaggagttttgtgaaatcttccgggccaaggacaagacgacaggcaagctgcacacctgcaagaagttccagaagcgggacggccgcaaggtgcggaaagctgccaagaacgagataggcatcctcaagatggtgaagcatcccaacatcctacagctggtggatgtgtttgtgacccgcaaggagtactttatcttcctggagctggctactactcggagcgagacacaagcaacgtggtacggcaagtcctggaggccgtggcctatttgcactcactcaagatcgtgcacaggaatctcaagctggagaacctggtttactacaaccggctgaagaactcgaagattgtcatcagtgacttccatctggctaagctagaaaatggcctcatcaaggagccctgtgggacccccgagtatctggccccagaggtggtaggccggcagcggtatggacgccctgtggactgctgggccattggagtcatcatgtacatcctgctttcaggcaatccacctttctatgaggaggtggaagaagatgattatgagaaccatgataagaatctcttccgcaagatcctggctggtgactatgagtttgactctccatattgggatgatatttcgcaggcagccaaagacctggtcacaaggctgatggaggtggagcaagaccagcggatcactgcagaagaggccatctcccatgagtggatttctggcaatgctgcttctgataagaacatcaaggatggtgtctgtgcccagattg

SEQ ID NO: 3065 - DNA, 1062 bp, Homo sapiens
  source 1..1062: mol_type = unassigned DNA; mol_type = unassigned DNA
gcaggttagagcctggcaatgccgtttgggtgtgtgactctgggcgacaagaagaactataaccagccatcggaggtgactgacagatatgatttgggacaggtcatcaagactgaggagttttgtgaaatcttccgggccaaggacaagacgacaggcaagctgcacacctgcaagaagttccagaagcgggacggccgcaaggtgcggaaagctgccaagaacgagataggcatcctcaagatggtgaagcatcccaacatcctacagctggtggatgtgtttgtgacccgcaaggagtactttatcttcctggagctgtgagtgtgggtctggggacccaagattccccagcgcccagggctttcacctgtcccaccctctgcagctaaggaaaccccctttctggacccttggcgtcccaggtccctgtgccttgctcagccagctgcctggcgtaggcagctcacccaagtgctcctgccctacccctgattctgcccacgccaggctcaggggctggtgtccctcagggccacggggagggaggtgtttgactggatcctggaccagggctactactcggagcgagacacaagcaacgtggtacggcaagtcctggaggccgtggcctatttgcactcactcaagatcgtgcacaggaatctcaagctggagaacctggtttactacaaccggctgaagaactcgaagattgtcatcagtgacttccatctggctaagctagaaaatggcctcatcaaggagccctgtgggacccccgagtatctggccccagaggtggtaggccggcagcggtatggacgccctgtggactgctgggccattggagtcatcatgtacatcctgctttcaggcaatccacctttctatgaggaggtggaagaagatgattatgagaaccatgataagaatctcttccgcaagatcctggctggtgactatgagtttgactctccatattgggatgatatttcgcaggcagccaaagacctggtcacaaggctgatggaggtggagcaagaccagcggatcactgca

SEQ ID NO: 3066 - DNA, 561 bp, Homo sapiens
  source 1..561: mol_type = unassigned DNA; mol_type = unassigned DNA
tgcgaatccggtgccggcaagcggctggcgatgctggaggttcgctagccgaagcggctgcatctggcgccgcgtctgccccgcgtgctcggagcggattctgcccgccgtccccggagccctcggcgccccgctgagcccgcgatcacttcctccctgtgaccaaccggcgctgcaggttagagcctggcaatgccgtttgggtgtgtgactctgggcgacaagaagaactataaccagccatcggaggtgtttgactggatcctggaccagggctactactcggagcgagacacaagcaacgtggtacggcaagtcctggaggccgtggcctatttgcactcactcaagatcgtgcacaggaatctcaagctggagaacctggtttactacaaccggctgaagaactcgaagattgtcatcagtgacttccatctggctaagctagaaaatggcctcatcaaggagccctgtgggacccccgaccccagaggtggtaggccggcagcggtatggacgccctgtggactgctgggccattggagtcatcatgtacatcct

SEQ ID NO: 3067 - DNA, 1014 bp, Homo sapiens
  source 1..1014: mol_type = unassigned DNA; mol_type = unassigned DNA
gcaggttagagcctggcaatgccgtttgggtgtgtgactctgggcgacaagaagaactataaccagccatcggaggtgactgacagatatgatttgggacaggtcatcaagactgaggagttttgtgaaatcttccgggccaaggacaagacgacaggcaagctgcacacctgcaagaagttccagaagcgggacggccgcaaggtgcggaaagctgccaagaacgagataggcatcctcaagatggtgaagcatcccaacatcctacagctggtggatgtgtttgtgacccgcaaggagtactttatcttcctggagctgtgagtgtgggtctggggacccaagattccccagcgcccagggctttcacctgtcccaccctctgcagctaaggaaaccccctttctggacccttggcgtcccaggtccctgtgccttgctcagccagctgcctggcgtaggcagctcacccaagtgctcctgccctacccctgattctgcccacgccaggctcaggggctggtgtccctcagggccacggggagggaggtgtttgactggatcctggaccagggctactactcggagcgagacacaagcaacgtggtacggcaagtcctggaggccgtggcctatttgcactcactcaagatcgtgcacaggaatctcaagctggagaacctggtttactacaaccggctgaagaactcgaagattgtcatcagtgacttccatctggctaagctagaaaatggcctcatcaaggagccctgtgggacccccgagtatctgggcaagcagggggtggggcaggggcagggggataatggggggcagccttcagggagctgctctgggcagggggaaaatgtgctcatctcaggaagctggtgtggatggtactggacctggctaggcctgatactgaccagcagatgggcgctgtgtttgtagccccagaggtggtaggccggcagcggtatggacgccctgtggactgctgggccattggag

SEQ ID NO: 3068 - DNA, 513 bp, Homo sapiens
  source 1..513: mol_type = unassigned DNA; mol_type = unassigned DNA
atgctggaggttcgctagccgaagcggctgcatctggcgccgcgtctgccccgcgtgctcggagcggattctgcccgccgtccccggagccctcggcgccccgctgagcccgcgatcacttcctccctgtgaccaaccggcgctgcaggttagagcctggcaatgccgtttgggtgtgtgactctgggcgacaagaagaactataaccagccatcggaggtgtttgactggatcctggaccagggctactactcggagcgagacacaagcaacgtggtacggcaagtcctggaggccgtggcctatttgcactcactcaagatcgtgcacaggaatctcaagctggagaacctggtttactacaaccggctgaagaactcgaagattgtcatcagtgacttccatctggctaagctagaaaatggcctcatcaaggagccctgtgggacccccgagtatctgggcaagcagggggtggggcaggggcagggggataatggggggcagccttca

SEQ ID NO: 3069 - DNA, 598 bp, Homo sapiens
  source 1..598: mol_type = unassigned DNA; mol_type = unassigned DNA
atgctggaggttcgctagccgaagcggctgcatctggcgccgcgtctgccccgcgtgctcggagcggattctgcccgccgtccccggagccctcggcgccccgctgagcccgcgatcacttcctccctgtgaccaaccggcgctgcaggttagagcctggcaatgccgtttgggtgtgtgactctgggcgacaagaagaactataaccagccatcggaggtgactgacagatatgatttgggacaggtcatcaagacgtgagtgccgggcctgtcagtgaggagttttgtgaaatcttccgggccaaggacaagacgacaggcaagctgcacacctgcaagaagttccagaagcgggacggccgcaaggtgcggaaagctgccaagaacgagataggcatcctcaagatggtgaagcatcccaacatcctacagctggtggatgtgtttgtgacccgcaaggagtactttatcttcctggagctggccacggggagggaggtgtttgactggatcctggaccagggctactactcggagcgagacacaagcaacgtggtacggcaagtcctggaggccgtggcctatttgcactcact

SEQ ID NO: 3070 - DNA, 583 bp, Homo sapiens
  source 1..583: mol_type = unassigned DNA; mol_type = unassigned DNA
atgctggaggttcgctagccgaagcggctgcatctggcgccgcgtctgccccgcgtgctcggagcggattctgcccgccgtccccggagccctcggcgccccgctgagcccgcgatcacttcctccctgtgaccaaccggcgctgcaggttagagcctggcaatgccgtttgggtgtgtgactctgggcgacaagaagaactataaccagccatcggaggtgactgacagatatgatttgggacaggtcatcaagacgtgagtgccgggcctgtcaggcaaggctgggtgggctggtgagcaggggctagggaagtggcagtggagtgcagctgatgctaaggccaggcctgagtgggtgcctgtcggctgcagtgaggagttttgtgaaatcttccgggccaaggacaagacgacaggcaagctgcacacctgcaagaagttccagaagcgggacggccgcaaggtgcggaaagctgccaagaacgagataggcatcctcaagatggtgaagcatcccaacatcctacagctggtggatgtgtttgtgacccgcaaggagtactttatcttcctggagctgt

SEQ ID NO: 3071 - DNA, 1485 bp, Homo sapiens
  source 1..1485: mol_type = unassigned DNA; mol_type = unassigned DNA
atgccgtttgggtgtgtgactctgggcgacaagaagaactataaccagccatcggaggtgactgacagatatgatttgggacaggtcatcaagactgaggagttttgtgaaatcttccgggccaaggacaagacgacaggcaagctgcacacctgcaagaagttccagaagcgggacggccgcaaggtgcggaaagctgccaagaacgagataggcatcctcaagatggtgaagcatcccaacatcctacagctggtggatgtgtttgtgacccgcaaggagtactttatcttcctggagctggccacggggagggaggtgtttgactggatcctggaccagggctactactcggagcgagacacaagcaacgtggtacggcaagtcctggaggccgtggcctatttgcactcactcaagatcgtgcacaggaatctcaagctggagaacctggtttactacaaccggctgaagaactcgaagattgtcatcagtgacttccatctggctaagctagaaaatggcctcatcaaggagccctgtgggacccccgagtatctgggcaatccacctttctatgaggaggtggaagaagatgattatgagaaccatgataagaatctcttccgcaagatcctggctggtgactatgagtttgactctccatattgggatgatatttcgcaggcagccaaagacctggtcacaaggctgatggaggtggagcaagaccagcggatcactgcagaagaggccatctcccatgagtggatttctggcaatgctgcttctgataagaacatcaaggatggtgtctgtgcccagattgaaaagaactttgccagggccaagtggaagaaggctgtccgagtgaccaccctcatgaaacggctccgggcaccagagcagtccagcacggctgcagcccagtcggcctcagccacagacactgccacccccggggctgcaggtggggccacagctgcagctgcgagtggagctacctcagcccctgagggtgatgctgctcgtgctgcaaagagtgataatgtggcccccgcagaccgtagtgccaccccagccacagatggaagtgccaccccagccactgatggcagtgtcaccccagccaccgatggaagcatcactccagccactgatgggagtgtcaccccagccactgacaggagcgctactccagccactgatgggagagccacaccagccacagaagagagcactgtgcccaccacccaaagcagtgccatgctggccaccaaggcagctgccacccctgagccggctatggcccagccggacagcacagccccagagggcgccacaggccaggctccaccctctagtaaaggggaagaggctgctggttatgcccaggagtctcaaagggaggaggccagctgagtaggcagcctggtgagggggggcaggggatgggcaggagggtgggagagtggatgaggggct

SEQ ID NO: 3072 - DNA, 3316 bp, Homo sapiens
  source 1..3316: mol_type = unassigned DNA; mol_type = unassigned DNA
atattgggtctggggacacacatgccgtctcttgattcctaaggatccattacccatttctctgcacagatcttcgggtatccaacctatctgtgcctccttcagccaggagcctccggatctttccagacttctttgcaatactgcctcatgcactgaatccatttctcgcatagcctggcgcttggcaggcaggctggcgttccctggctctgccttccccatctccctgtcttttctcccacggcccatctgcccctcctttcctccacccccttctcctctctgctcccctttatttccactccccacccgcgtggctttgctctccctctcccccctcagctcgtctgtatttggagctccggaagctgccggcgactctcccctggagcagcgtgactgacaccggctcctattcagctgggaggagggagaggggaggagaaggggagggccgcgggaggagggtacgagtggccgaccacggatttgcattgccgaggacgggaccccagggcagcgaagcagaatggccaacatgcagggactggtggaaagactggaacgagctgtcagccgcctggagtcgctgtctgcagagtcccacaggccccctgggaactgcggggaagtcaatggtgtcattgcaggtgtggcaccctccgtggaagcctttgacaagctgatggacagtatggtggccgagtttttaaagaacagtaggatccttgctggggacgtggagacccatgcagaaatggtgcacagtgctttccaggcccagcgggctttccttctgatggcctctcagtaccaacaaccccacgagaatgacgtggccgcacttctgaaacccatatcggaaaagattcaggaaatccaaactttcagagagagaaaccgggggagtaacatgtttaatcatctttcggccgtcagcgaaagcatccctgcccttggatggatagctgtgtctcccaaacctggtccttatgtcaaggagatgaatgacgctgccaccttttacactaacagggtcttaaaggactacaaacacagtgatttgcgtcatgtggattgggtgaagtcatatttgaacatttggagtgaacttcaagcatacatcaaggaacaccacaccacgggcctcacatggagcaaaacaggtcctgtagcatccacagtatcagcgttttctgtcctctcctctgggcctggccttcctccaccccctcctcctctgcctcctccagggccacctccacttttcgagaatgaaggcaaaaaagaggaatcttctccttcacgctcagctttatttgcccaacttaaccagggagaagcaattacaaaagggctccgccatgtcacagatgaccagaagacatacaaaaatcccagcctgcgggctcaaggagggcaaactcaatctcccaccaaaagtcacactccaagtcccacatctcctaaatcttatccttctcaaaaacatgccccagtgttggagttggaaggaaagaaatggagagtggagtaccaagaggacaggaatgaccttgtgatttcagagactgagctgaaacaagtggcttacattttcaaatgcgaaaaatcaactattcagataaaagggaaagtaaactccattataattgacaactgtaaaaaactcggcctggtgtttgacaatgtggtgggcattgtggaagtgatcaactcccaggacattcaaatccaggtaatggggagagtgccaacaatttccattaataagacagaaggttgccacatatacctcagtgaagatgcattagactgtgagatcgtgagcgccaagtcatctgaaatgaacatacttatccctcaggatggtgattatagagaatttcccattcctgaacagttcaagacagcatgggatggatccaagttaatcactgaacctgcagaaattatggcctaacttcctgagagaccgaaccccctcacctgaatccccctctatcaaacaaacaaaaaagcagcagtaaagagctagaagttgcagtagcccctactgctttagctttggcctccaacgattctgtgctatagatacagcactgtttctggcacgcctcgtgggcattttgaaatatttaacgtttcctcatgatttgcctttgtgtgtgattttagttccacatgatgacttgtgaacattagggatttaaaggaaaaaaaaaaagaattctgttcccctcatatcatgaacacagtaactgataggtaaaaagactgcatgattcacttttacacttatatttcattgctagttaaaaaataaaacctttgagaatctaagatgtacatttttaccttttaggcaatttcaatataatgtagaagtagtagtgtgccctgaaaaatgtacacgttttttcttattgttaccacatgttcacctttatcagcgtggatactgtcagcatgagtacatatttcaacccacgcttgtaaaagacataagagtttataaaggaccaaattcagttccttggtccttggaagacctatattctctgtagttactgaaaaccgaaagtcaattctaattattcatcttacatatttttccaccatgtcatttgaaaacttgcttttcttctgcataagagattcttatgccaaaaacattaaacagaagaaatcattttttttgctatgtaatacctcgcaactttgctctaaaatcaagctcagttattattttccaagtttgaacatgttaaatatcagatgccttgtaaattatgtctttaacgttttcttatagactaatttcctcttttccacctgccagacttgctaaccaagctcgaaaatgaacatgaaaaagccatacatgtattatttctcctaaaacctaaggcattatctgttggtttggcttgctgctcctattttgtagtcttgatagtagatgcttcttcagcgtaagagtagctatgatattcctttttatcttttcagtacatagtgctgaaaaatctgcaacttcttggatcatatttaatgaattatagtataatgcttgcaggcccagtacaagcatatatattgtgcctcttacagcctttggaatacattgtttccattttttaaatatcttctatatccatatagtattcaaattattaatgctcatgtaccaaggttttgctataaaagttttgtctgtatgaataatgtggctttagtaaataatcatttttcaactgtaaacttattctgaaataaagtaaaattctaattgtttaaatactgtgatgaa

SEQ ID NO: 3073 - DNA, 1430 bp, Homo sapiens
  source 1..1430: mol_type = unassigned DNA; mol_type = unassigned DNA
attcagctgggaggagggagaggggaggagaaggggagggccgcgggaggagggtacgagtggccgaccacggatttgcattgccgaggacgggaccccagggcagcgaagcagaatggccaacatgcagggactggtggaaagactggaacgagctgtcagccgcctggagtcgctgtctgcagagtcccacaggccccctgggaactgcggggaagtcaatggtgtcattgcaggtgtggcaccctccgtggaagcctttgacaagctgatggacagtatggtggccgagtttttaaagaacagtaggatccttgctggggacgtggagacccatgcagaaatggtgcacagtgctttccaggcccagcgggctttccttctgatggcctctcagtaccaacaaccccacgagggtcctgtagcatccacagtatcagcgttttctgtcctctcctctgggcctggccttcctccaccccctcctcctctgcctcctccagggccacctccacttttcgagaatgaaggcaaaaaagaggaatcttctccttcacgctcagctttatttgcccaacttaaccagggagaagcaattacaaaagggctccgccatgtcacagatgaccagaagacatacaaaaatcccagcctgcgggctcaaggagggcaaactcaatctcccaccaaaagtcacactccaagtcccacatctcctaaatcttatccttctcaaaaacatgccccagtgttggagttggaaggaaagaaatggagagtggagtaccaagaggacaggaatgaccttgtgatttcagagactgagctgaaacaagtggcttacattttcaaatgcgaaaaatcaactattcagataaaagggaaagtaaactccattataattgacaactgtaaaaaactcggcctggtgtttgacaatgtggtgggcattgtggaagtgatcaactcccaggacattcaaatccaggtaatggggagagtgccaacaatttccattaataagacagaaggttgccacatatacctcagtgaagatgcattagactgtgagatcgtgagcgccaagtcatctgaaatgaacatacttatccctcaggatggtgattatagagaatttcccattcctgaacagttcaagacagcatgggatggatccaagttaatcactgaacctgcagaaattatggcctaacttcctgagagaccgaaccccctcacctgaatccccctctatcaaacaaacaaaaaagcagcagtaaagagctagaagttgcagtagcccctactgctttagctttggcctccaacgattctgtgctatagatacagcactgtttctggcacgcctcgtgggcattttgaaatatttaacgtttcctcatgatttgcctttgtgtgtgattttagtt

SEQ ID NO: 3074 - DNA, 1812 bp, Homo sapiens
  source 1..1812: mol_type = unassigned DNA; mol_type = unassigned DNA
ggagggagaggggaggagaaggggagggccgcgggaggagggtacgagtggccgaccacggatttgcattgccgaggacgggaccccagggcagcgaagcagaatggccaacatgcagggactggtggaaagactggaacgagctgtcagccgcctggagtcgctgtctgcagagtcccacaggccccctgggaactgcggggaagtcaatggtgtcattgcaggtgtggcaccctccgtggaagcctttgacaagctgatggacagtatggtggccgagtttttaaagaacagtaggatccttgctggggacgtggagacccataatgacgtggccgcacttctgaaacccatatcggaaaagattcaggaaatccaaactttcagagagagaaaccgggggagtaacatgtttaatcatctttcggccgtcagcgaaagcatccctgcccttggatggatagctgtgtctcccaaacctggtccttatgtcaaggagatgaatgacgctgccaccttttacactaacagggtcttaaaggactacaaacacagtgatttgcgtcatgtggattgggtgaagtcatatttgaacatttggagtgaacttcaagcatacatcaaggaacaccacaccacgggcctcacatggagcaaaacaggtcctgtagcatccacagtatcagcgttttctgtcctctcctctgggcctggccttcctccaccccctcctcctctgcctcctccagggccacctccacttttcgagaatgaaggcaaaaaagaggaatcttctccttcacgctcagctttatttgcccaacttaaccagggagaagcaattacaaaagggctccgccatgtcacagatgaccagaagacatacaaaaatcccagcctgcgggctcaaggagggcaaactcaatctcccaccaaaagtcacactccaagtcccacatctcctaaatcttatccttctcaaaaacatgccccagtgttggagttggaaggaaagaaatggagagtggagtaccaagaggacaggaatgaccttgtgatttcagagactgagctgaaacaagtggcttacattttcaaatgcgaaaaatcaactattcagataaaagggaaagtaaactccattataattgacaactgtaaaaaactcggcctggtgtttgacaatgtggtgggcattgtggaagtgatcaactcccaggacattcaaatccaggtaatggggagagtgccaacaatttccattaataagacagaaggttgccacatatacctcagtgaagatgcattagactgtgagatcgtgagcgccaagtcatctgaaatgaacatacttatccctcaggatggtgattatagagaatttcccattcctgaacagttcaagacagcatgggatggatccaagttaatcactgaacctgcagaaattatggcctaacttcctgagagaccgaaccccctcacctgaatccccctctatcaaacaaacaaaaaagcagcagtaaagagctagaagttgcagtagcccctactgctttagctttggcctccaacgattctgtgctatagatacagcactgtttctggcacgcctcgtgggcattttgaaatatttaacgtttcctcatgatttgcctttgtgtgtgattttagttccacatgatgacttgtgaacattagggatttaaaggaaaaaaaaaaagaattctgttcccctcatatcatgaacacagtaactgataggtaaaaagactgcatgattcacttttacacttatatttcattgctagt

SEQ ID NO: 3075 - DNA, 861 bp, Homo sapiens
  source 1..861: mol_type = unassigned DNA; mol_type = unassigned DNA
aaggggagggccgcgggaggagggtacgagtggccgaccacggatttgcattgccgaggacgggaccccagggcagcgaagcagaatggccaacatgcagggactggtggaaagactggaacgagctgtcagccgcctggagtcgctgtctgcagagtcccacaggccccctgggaactgcggggaagtcaatggtgtcattgcaggtgtggcaccctccgtggaagcctttgacaagctgatggacagtatggtggccgagtttttaaagaacagtaggatccttgctggggacgtggagacccatgagtaccaagaggacaggaatgaccttgtgatttcagagactgagctgaaacaagtggcttacattttcaaatgcgaaaaatcaactattcagataaaagggaaagtaaactccattataattgacaactgtaaaaaactcggcctggtgtttgacaatgtggtgggcattgtggaagtgatcaactcccaggacattcaaatccaggtaatggggagagtgccaacaatttccattaataagacagaaggttgccacatatacctcagtgaagatgcattagactgtgagatcgtgagcgccaagtcatctgaaatgaacatacttatccctcaggatggtgattatagagaatttcccattcctgaacagttcaagacagcatgggatggatccaagttaatcactgaacctgcagaaattatggcctaacttcctgagagaccgaaccccctcacctgaatccccctctatcaaacaaacaaaaaagcagcagtaaagagctagaagttgcagtagcccctactgctttagctttggcctccaacgattct

SEQ ID NO: 3076 - DNA, 1378 bp, Homo sapiens
  source 1..1378: mol_type = unassigned DNA; mol_type = unassigned DNA
attgccgaggacgggaccccagggcagcgaagcagaatggccaacatgcagggactggtggaaagactggaacgagctgtcagccgcctggagtcgctgtctgcagagtcccacaggccccctgggaactgcggggaagtcaatggtgtcattgcaggtgtggcaccctccgtggaagcctttgacaagctgatggacagtatggtggccgagtttttaaagaacagtaggatccttgctggggacgtggagacccataatgacgtggccgcacttctgaaacccatatcggaaaagattcaggaaatccaaactttcagagagagaaaccgggggagtaacatgtttaatcatctttcggccgtcagcgaaagcatccctgcccttggatggatagctgtgtctcccaaacctggtccttatgtcaaggagatgaatgacgctgccaccttttacactaacagggtcttaaaggactacaaacacagtgatttgcgtcatgtggattgggtgaagtcatatttgaacatttggagtgaacttcaagcatacatcaaggaacaccacaccacgggcctcacatggagcaaaacaaatgagaagagacggaggcaaagataagtgactttgcaaggggcagctcacggagatccagtgaagggaacatctaatcagtttgatttcgagtccactgtacgggtcctgtagcatccacagtatcagcgttttctgtcctctcctctgggcctggccttcctccaccccctcctcctctgcctcctccagggccacctccacttttcgagaatgaaggcaaaaaagaggaatcttctccttcacgctcagctttatttgcccaacttaaccagggagaagcaattacaaaagggctccgccatgtcacagatgaccagaagacatacaaaaatcccagcctgcgggctcaaggagggcaaactcaatctcccaccaaaagtcacactccaagtcccacatctcctaaatcttatccttctcaaaaacatgccccagtgttggagttggaaggaaagaaatggagagtggagtaccaagaggacaggaatgaccttgtgatttcagagactgagctgaaacaagtggcttacattttcaaatgcgaaaaatcaactattcagataaaagggaaagtaaactccattataattgacaactgtaaaaaactcggcctggtgtttgacaatgtggtgggcattgtggaagtgatcaactcccaggacattcaaatccaggtaatggggagagtgccaacaatttccattaataagacagaaggttgccacatatacctcagtgaagatgcattagactgtgagatcgtgagcgccaagtcatctga

SEQ ID NO: 3077 - DNA, 1404 bp, Homo sapiens
  source 1..1404: mol_type = unassigned DNA; mol_type = unassigned DNA
attgccgaggacgggaccccagggcagcgaagcagaatggccaacatgcagggactggtggaaagactggaacgagctgtcagccgcctggagtcgctgtctgcagagtcccacaggccccctgggaactgcggggaagtcaatggtgtcattgcaggtgtggcaccctccgtggaagcctttgacaagctgatggacagtatggtggccgagtttttaaagaacagtaggatccttgctggggacgtggagacccatgcagaaatggtgcacagtgctttccaggcccagcgggctttccttctgatggcctctcagtaccaacaaccccacgagaatgacgtggccgcacttctgaaacccatatcggaaaagattcaggaaatccaaactttcagagagagaaaccgggggagtaacatgtttaatcatctttcggccgtcagcgaaagcatccctgcccttggatggatagctgtgggtcctgtagcatccacagtatcagcgttttctgtcctctcctctgggcctggccttcctccaccccctcctcctctgcctcctccagggccacctccacttttcgagaatgaaggcaaaaaagaggaatcttctccttcacgctcagctttatttgcccaacttaaccagggagaagcaattacaaaagggctccgccatgtcacagatgaccagaagacatacaaaaatcccagcctgcgggctcaaggagggcaaactcaatctcccaccaaaagtcacactccaagtcccacatctcctaaatcttatccttctcaaaaacatgccccagtgttggagttggaaggaaagaaatggagagtggagtaccaagaggacaggaatgaccttgtgatttcagagactgagctgaaacaagtggcttacattttcaaatgcgaaaaatcaactattcagataaaagggaaagtaaactccattataattgacaactgtaaaaaactcggcctggtgtttgacaatgtggtgggcattgtggaagtgatcaactcccaggacattcaaatccaggtaatggggagagtgccaacaatttccattaataagacagaaggttgccacatatacctcagtgaagatgcattagactgtgagatcgtgagcgccaagtcatctgaaatgaacatacttatccctcaggatggtgattatagagaatttcccattcctgaacagttcaagacagcatgggatggatccaagttaatcactgaacctgcagaaattatggcctaacttcctgagagaccgaaccccctcacctgaatccccctctatcaaacaaacaaaaaagcagcagtaaagagctagaagttgcagtagcccctactgctttagctttggcctccaacgattctgtgc

SEQ ID NO: 3078 - DNA, 891 bp, Homo sapiens
  source 1..891: mol_type = unassigned DNA; mol_type = unassigned DNA
agggcagcgaagcagaatggccaacatgcagggactggtggaaagactggaacgagctgtcagccgcctggagtcgctgtctgcagagtcccacaggccccctgggaactgcggggaagtcaatggtgtcattgcaggtgtggcaccctccgtggaagcctttgacaagctgatggacagtatggtggccgagtttttaaagaacagtaggatccttgctggggacgtggagacccatgcagaaatggtgcacagtgctttccaggcccagcgggctttccttctgatggcctctcagtaccaacaaccccacgaggccaacaagttttaggatataatgagtaattgacctgggaaattaaacaaaaataatttcaccgccaaccacagactgtacccataatggaggctggctgtctcacagacttttgctgctggccagagtgaatgactcagcacaagtcaaccccaggagagaaacaatacagagctcacccctggctgattgagggccagaagcgccattcttgtagaatgacgtggccgcacttctgaaacccatatcggaaaagattcaggaaatccaaactttcagagagagaaaccgggggagtaacatgtttaatcatctttcggccgtcagcgaaagcatccctgcccttggatggatagctgtgtctcccaaacctggtccttatgtcaaggagatgaatgacgctgccaccttttacactaacagggtcttaaaggactacaaacacagtgatttgcgtcatgtggattgggtgaagtcatatttgaacatttggagtgaacttcaagcatacatcaaggaacaccacaccacgggcctcacatggagcaaaacaggtcctgtagcatccacagtat

SEQ ID NO: 3079 - DNA, 2776 bp, Homo sapiens
  source 1..2776: mol_type = unassigned DNA; mol_type = unassigned DNA
tcccctttatttccactccccacccgcgtggctttgctctccctctcccccctcagctcgtctgtatttggagctccggaagctgccggcgactctcccctggagcagcgtgactgacaccggctcctattcagctgggaggagggagaggggaggagaaggggagggccgcgggaggagggtacgagtggccgaccacggatttgcattgccgaggacgggaccccagggcagcgaagcagaatggccaacatgcagggactggtggaaagactggaacgagctgtcagccgcctggagtcgctgtctgcagagtcccacaggccccctgggaactgcggggaagtcaatggtgtcattgcaggtgtggcaccctccgtggaagcctttgacaagctgatggacagtatggtggccgagtttttaaagaacagtaggatccttgctggggacgtggagacccatgcagaaatggtgcacagtgctttccaggcccagcgggctttccttctgatggcctctcagtaccaacaaccccacgagaatgacgtggccgcacttctgaaacccatatcggaaaagattcaggaaatccaaactttcagagagagaaaccgggggagtaacatgtttaatcatctttcggccgtcagcgaaagcatccctgcccttggatggatagctgtgcctccaccccctcctcctctgcctcctccagggccacctccacttttcgagaatgaaggcaaaaaagaggaatcttctccttcacgctcagctttatttgcccaacttaaccagggagaagcaattacaaaagggctccgccatgtcacagatgaccagaagacatacaaaaatcccagcctgcgggctcaaggagggcaaactcaatctcccaccaaaagtcacactccaagtcccacatctcctaaatcttatccttctcaaaaacatgccccagtgttggagttggaaggaaagaaatggagagtggagtaccaagaggacaggaatgaccttgtgatttcagagactgagctgaaacaagtggcttacattttcaaatgcgaaaaatcaactattcagataaaagggaaagtaaactccattataattgacaactgtaaaaaactcggcctggtgtttgacaatgtggtgggcattgtggaagtgatcaactcccaggacattcaaatccaggtaatggggagagtgccaacaatttccattaataagacagaaggttgccacatatacctcagtgaagatgcattagactgtgagatcgtgagcgccaagtcatctgaaatgaacatacttatccctcaggatggtgattatagagaatttcccattcctgaacagttcaagacagcatgggatggatccaagttaatcactgaacctgcagaaattatggcctaacttcctgagagaccgaaccccctcacctgaatccccctctatcaaacaaacaaaaaagcagcagtaaagagctagaagttgcagtagcccctactgctttagctttggcctccaacgattctgtgctatagatacagcactgtttctggcacgcctcgtgggcattttgaaatatttaacgtttcctcatgatttgcctttgtgtgtgattttagttccacatgatgacttgtgaacattagggatttaaaggaaaaaaaaaaagaattctgttcccctcatatcatgaacacagtaactgataggtaaaaagactgcatgattcacttttacacttatatttcattgctagttaaaaaataaaacctttgagaatctaagatgtacatttttaccttttaggcaatttcaatataatgtagaagtagtagtgtgccctgaaaaatgtacacgttttttcttattgttaccacatgttcacctttatcagcgtggatactgtcagcatgagtacatatttcaacccacgcttgtaaaagacataagagtttataaaggaccaaattcagttccttggtccttggaagacctatattctctgtagttactgaaaaccgaaagtcaattctaattattcatcttacatatttttccaccatgtcatttgaaaacttgcttttcttctgcataagagattcttatgccaaaaacattaaacagaagaaatcattttttttgctatgtaatacctcgcaactttgctctaaaatcaagctcagttattattttccaagtttgaacatgttaaatatcagatgccttgtaaattatgtctttaacgttttcttatagactaatttcctcttttccacctgccagacttgctaaccaagctcgaaaatgaacatgaaaaagccatacatgtattatttctcctaaaacctaaggcattatctgttggtttggcttgctgctcctattttgtagtcttgatagtagatgcttcttcagcgtaagagtagctatgatattcctttttatcttttcagtacatagtgctgaaaaatctgcaacttcttggatcatatttaatgaattatagtataatgcttgcaggcccagtacaagcatatatattgtgcctcttacagcctttggaatacattgtttccattttttaaatatcttctatatccatatagtattcaaattattaatgctcatgtaccaaggttttgctataaaagttttgtctgtatgaataatgtggctttagtaaataatcatttttcaactgtaaacttattctgaaataaagtaaaattctaattgtttaaatactgtgatg

SEQ ID NO: 3080 - DNA, 2686 bp, Homo sapiens
  source 1..2686: mol_type = unassigned DNA; mol_type = unassigned DNA
gactctcccctggagcagcgtgactgacaccggctcctattcagctgggaggagggagaggggaggagaaggggagggccgcgggaggagggtacgagtggccgaccacggatttgcattgccgaggacgggaccccagggcagcgaagcagaatggccaacatgcagggactggtggaaagactggaacgagctgtcagccgcctggagtcgctgtctgcagagtcccacaggccccctgggaactgcggggaagtcaatggtgtcattgcaggtgtggcaccctccgtggaagcctttgacaagctgatggacagtatggtggccgagtttttaaagaacagtaggatccttgctggggacgtggagacccatgcagaaatggtgcacagtgctttccaggcccagcgggctttccttctgatggcctctcagtaccaacaaccccacgagaatgacgtggccgcacttctgaaacccatatcggaaaagattcaggaaatccaaactttcagagagagaaaccgggggagtaacatgtttaatcatctttcggccgtcagcgaaagcatccctgcccttggatggatagctgtgtctcccaaacctcctcctctgcctcctccagggccacctccacttttcgagaatgaaggcaaaaaagaggaatcttctccttcacgctcagctttatttgcccaacttaaccagggagaagcaattacaaaagggctccgccatgtcacagatgaccagaagacatacaaaaatcccagcctgcgggctcaaggagggcaaactcaatctcccaccaaaagtcacactccaagtcccacatctcctaaatcttatccttctcaaaaacatgccccagtgttggagttggaaggaaagaaatggagagtggagtaccaagaggacaggaatgaccttgtgatttcagagactgagctgaaacaagtggcttacattttcaaatgcgaaaaatcaactattcagataaaagggaaagtaaactccattataattgacaactgtaaaaaactcggcctggtgtttgacaatgtggtgggcattgtggaagtgatcaactcccaggacattcaaatccaggtaatggggagagtgccaacaatttccattaataagacagaaggttgccacatatacctcagtgaagatgcattagactgtgagatcgtgagcgccaagtcatctgaaatgaacatacttatccctcaggatggtgattatagagaatttcccattcctgaacagttcaagacagcatgggatggatccaagttaatcactgaacctgcagaaattatggcctaacttcctgagagaccgaaccccctcacctgaatccccctctatcaaacaaacaaaaaagcagcagtaaagagctagaagttgcagtagcccctactgctttagctttggcctccaacgattctgtgctatagatacagcactgtttctggcacgcctcgtgggcattttgaaatatttaacgtttcctcatgatttgcctttgtgtgtgattttagttccacatgatgacttgtgaacattagggatttaaaggaaaaaaaaaaagaattctgttcccctcatatcatgaacacagtaactgataggtaaaaagactgcatgattcacttttacacttatatttcattgctagttaaaaaataaaacctttgagaatctaagatgtacatttttaccttttaggcaatttcaatataatgtagaagtagtagtgtgccctgaaaaatgtacacgttttttcttattgttaccacatgttcacctttatcagcgtggatactgtcagcatgagtacatatttcaacccacgcttgtaaaagacataagagtttataaaggaccaaattcagttccttggtccttggaagacctatattctctgtagttactgaaaaccgaaagtcaattctaattattcatcttacatatttttccaccatgtcatttgaaaacttgcttttcttctgcataagagattcttatgccaaaaacattaaacagaagaaatcattttttttgctatgtaatacctcgcaactttgctctaaaatcaagctcagttattattttccaagtttgaacatgttaaatatcagatgccttgtaaattatgtctttaacgttttcttatagactaatttcctcttttccacctgccagacttgctaaccaagctcgaaaatgaacatgaaaaagccatacatgtattatttctcctaaaacctaaggcattatctgttggtttggcttgctgctcctattttgtagtcttgatagtagatgcttcttcagcgtaagagtagctatgatattcctttttatcttttcagtacatagtgctgaaaaatctgcaacttcttggatcatatttaatgaattatagtataatgcttgcaggcccagtacaagcatatatattgtgcctcttacagcctttggaatacattgtttccattttttaaatatcttctatatccatatagtattcaaattattaatgctcatgtaccaaggttttgctataaaagttttgtctgtatgaataatgtggctttagtaaataatcatttttcaactgtaaacttattctgaaataaagtaaaattctaattgtttaaatactgtgatg

SEQ ID NO: 3081 - DNA, 571 bp, Homo sapiens
  source 1..571: mol_type = unassigned DNA; mol_type = unassigned DNA
acccttctctgtccctggacacctgcgcagaaagcctaggagctggttccacccatcactcaccaggttaggtatttcaggatgtcggaggagatcatcacgccggtgtactgcactggggtgtcagcccaagtgcagaagcagcgggccagggagctgggcctgggccgccatgagaatgccatcaagtacctgggccaggattatgagcagctgcgggtgcgatgcctgcagagtgggaccctcttccgtgatgaggccttccccccggtaccccagagcctgggttacaaggacctgggtcccaattcctccaagacctatggcatcaagtggaagcgtcccacggaactgctgtcaaacccccagttcattgtggatggagctacccgcacagacatctgccagggagcactgggggactgctggctcttggcggccatcgcctccctcactctcaacgacaccctcctgcaccgagtggttccgcacggccagagcttccagaatggctatgccggcatcttccatttccagctgtggcaatttggggagtgggtggacgtggtcg

SEQ ID NO: 3082 - DNA, 593 bp, Homo sapiens
  source 1..593: mol_type = unassigned DNA; mol_type = unassigned DNA
gacacatgggcgcttccaggatgtcggaggagatcatcacgccggtgtactgcactggggtgtcagcccaagtgcagaagcagcgggccagggagctgggcctgggccgccatgagaatgccatcaagtacctgggccaggattatgagcagctgcgggtgcgatgcctgcagagtgggaccctcttccgtgatgaggccttccccccggtaccccagagcctgggttacaaggacctgggtcccaattcctccaagacctatggcatcaagtggaagcgtcccacggaactgctgtcaaacccccagttcattgtggatggagctacccgcacagacatctgccagggagcactgggggactgctggctcttggcggccatcgcctccctcactctcaacgacaccctcctgcaccgagtggttccgcacggccagagcttccagaatggctatgccggcatcttccatttccagctgtggcaatttggggagtgggtggacgtggtcgtggatgacctgctgcccatcaaggacgggaagctagtgttcgtgcactctgccgaaggcaacgagttctggagcgccctgctt

SEQ ID NO: 3083 - DNA, 3083 bp, Homo sapiens
  source 1..3083: mol_type = unassigned DNA; mol_type = unassigned DNA
gaaagtcgggccgaacggggcagggacttacccaaggtcacgcagcgagcccggtccccctgcgttccccggggagcgctgagccgggacgcggcggtggggtggggaaggggagtggcgcggccctgcggggtgaggctgccgtttgctgagtgtccggcaggggtctgctcgctgccagcccggcccctcctcagagcagctgccgcagcccgaggatgtcggaggagatcatcacgccggtgtactgcactggggtgtcagcccaagtgcagaagcagcgggccagggagctgggcctgggccgccatgagaatgccatcaagtacctgggccaggattatgagcagctgcgggtgcgatgcctgcagagtgggaccctcttccgtgatgaggccttccccccggtaccccagagcctgggttacaaggacctgggtcccaattcctccaagacctatggcatcaagtggaagcgtcccacggaactgctgtcaaacccccagttcattgtggatggagctacccgcacagacatctgccagggagcactgggggactgctggctcttggcggccatcgcctccctcactctcaacgacaccctcctgcaccgagtggttccgcacggccagagcttccagaatggctatgccggcatcttccatttccagctgtggcaatttggggagtgggtggacgtggtcgtggatgacctgctgcccatcaaggacgggaagctagtgttcgtgcactctgccgaaggcaacgagttctggagcgccctgcttgagaaggcctatgccaaggtaaatggcagctacgaggccctgtcagggggcagcacctcagagggctttgaggacttcacaggcggggttaccgagtggtacgagttgcgcaaggctcccagtgacctctaccagatcatcctcaaggcgctggagcggggctccctgctgggctgctccatagacatctccagcgttctagacatggaggccatcactttcaagaagttggtgaagggccatgcctactctgtgaccggggccaagcaggtgaactaccgaggccaggtggtgagcctgatccggatgcggaacccctggggcgaggtggagtggacgggagcctggagcgacagctcctcagagtggaacaacgtggacccatatgaacgggaccagctccgggtcaagatggaggacggggagttctggatgtcattccgagacttcatgcgggagttcacccgcctggagatctgcaacctcacacccgacgccctcaagagccggaccatccgcaaatggaacaccacactctacgaaggcacctggcggcgggggagcaccgcggggggctgccgaaactacccagccaccttctgggtgaaccctcagttcaagatccggctggatgagacggatgacccggacgactacggggaccgcgagtcaggctgcagcttcgtgctcgcccttatgcagaagcaccgtcgccgcgagcgccgcttcggccgcgacatggagactattggcttcgcggtctacgaggtccctccggagctggtgggccagccggccgtacacttgaagcgtgacttcttcctggccaatgcgtctcgggcgcgctcagagcagttcatcaacctgcgagaggtcagcacccgcttccgcctgccacccggggagtatgtggtggtgccctccaccttcgagcccaacaaggagggcgacttcgtgctgcgcttcttctcagagaagagtgctgggactgtggagctggatgaccagatccaggccaatctccccgatgagcaagtgctctcagaagaggagattgacgagaacttcaaggccctcttcaggcagctggcaggggaggacatggagatcagcgtgaaggagttgcggacaatcctcaataggatcatcagcaaacacaaagacctgcggaccaagggcttcagcctagagtcgtgccgcagcatggtgaacctcatggatcgtgatggcaatgggaagctgggcctggtggagttcaacatcctgtggaaccgcatccggaattacctgtccatcttccggaagtttgacctggacaagtcgggcagcatgagtgcctacgagatgcggatggccattgagtcggcaggcttcaagctcaacaagaagctgtacgagctcatcatcacccgctactcggagcccgacctggcggtcgactttgacaatttcgtttgctgcctggtgcggctagagaccatgttccgatttttcaaaactctggacacagatctggatggagttgtgacctttgacttgtttaagtggttgcagctgaccatgtttgcatgaggcagggactcggtcccccttgccgtgctcccctccctcctcgtctgccaagcctcgcctcctaccacaccacaccaggccaccccagctgcaagtgccttccttggagcagagaggcagcctcgtcctcctgtcccctctcctcccagccaccatcgttcatctgctccgggcagaactgtgtggcccctgcctgtgccagccatgggctcgggatggactccctgggccccacccattgccaagccaggaaggcagctttcgcttgttcctgcctcgggacagccccgggtttccccagcatcctgatgtgtcccctctccccacttcagaggccacccactcagcaccaccggcctggccttgcctgcagactataaactataaccactagctcgacacagtctgcagtccaggcgtgtggagccgcctcccggctcggggaggccccggggctgggaacgcctgtgccttcctgcgccgaagccaacgccccctctgtccttccctggccctgctgccgaccaggagctgcccagcctgtgggcggtcggccttccctccttcgctccttttttatattagtgattttaaaggggactcttcagggacttgtgtactggttatgggggtgccagaggcactaggcttggggtggggaggtcccgtgttccatatagaggaaccccaaataataaaaggccccacatctgtctgtga

SEQ ID NO: 3084 - DNA, 582 bp, Homo sapiens
  source 1..582: mol_type = unassigned DNA; mol_type = unassigned DNA
gcgctggcccctccccggggactgctctgccttttactaatttgtcctctcgcggaattggcccccggcctgcggagggaggggcggggagacaccgatgtcggaggagatcatcacgccggtgtactgcactggggtgtcagcccaagtgcagaagcagcgggccagggagctgggcctgggccgccatgagaatgccatcaagtacctgggccaggattatgagcagctgcgggtgcgatgcctgcagagtgggaccctcttccgtgatgaggccttccccccggtaccccagagcctgggttacaaggacctgggtcccaattcctccaagacctatggcatcaagtggaagcgtcccacggaactgctgtcaaacccccagttcattgtggatggagctacccgcacagacatctgccagggagcactgggggactgctggctcttggcggccatcgcctccctcactctcaacgacaccctcctgcaccgagtggttccgcacggccagagcttccagaatggctatgccggcatcttccatttccagctgtggcaatttggggagtgggtggacgt

SEQ ID NO: 3085 - DNA, 550 bp, Homo sapiens
  source 1..550: mol_type = unassigned DNA; mol_type = unassigned DNA
ctaatttgtcctctcgcggaattggcccccggcctgcggagggaggggcggggagacaccgtgagatgtcggaggagatcatcacgccggtgtactgcactggggtgtcagcccaagtgcagaagcagcgggccagggagctgggcctgggccgccatgagaatgccatcaagtacctgggccaggattatgagcagctgcgggtgcgatgcctgcagagtgggaccctcttccgtgatgaggccttccccccggtaccccagagcctgggttacaaggacctgggtcccaattcctccaagacctatggcatcaagtggaagcgtcccacggaactgctgtcaaacccccagttcattgtggatggagctacccgcacagacatctgccagggagcactgggggactgctggctcttggcggccatcgcctccctcactctcaacgacaccctcctgcaccgagtggttccgcacggccagagcttccagaatggctatgccggcatcttccatttccagctgtggcaatttggggagtgggtggacgt

SEQ ID NO: 3086 - DNA, 2792 bp, Homo sapiens
  source 1..2792: mol_type = unassigned DNA; mol_type = unassigned DNA
ctctcgcggaattggcccccggcctgcggagggaggggcggggagacaccgtgagtaagagatagtcagagaccgatgtcggaggagatcatcacgccggtgtactgcactggggtgtcagcccaagtgcagaagcagcgggccagggagctgggcctgggccgccatgagaatgccatcaagtacctgggccaggattatgagcagctgcgggtgcgatgcctgcagagtgggaccctcttccgtgatgaggccttccccccggtaccccagagcctgggttacaaggacctgggtcccaattcctccaagacctatggcatcaagtggaagcgtcccacggaactgctgtcaaacccccagttcattgtggatggagctacccgcacagacatctgccagggagcactgggggactgctggctcttggcggccatcgcctccctcactctcaacgacaccctcctgcaccgagtggttccgcacggccagagcttccagaatggctatgccggcatcttccatttccagctgtggcaatttggggagtgggtggacgtggtcgtggatgacctgctgcccatcaaggacgggaagctagtgttcgtgcactctgccgaaggcaacgagttctggagcgccctgcttgagaaggcctatgccaaggtaaatggcagctacgaggccctgtcagggggcagcacctcagagggctttgaggacttcacaggcggggttaccgagtggtacgagttgcgcaaggctcccagtgacctctaccagatcatcctcaaggcgctggagcggggctccctgctgggctgctccatagacatctccagcgttctagacatggaggccatcactttcaagaagttggtgaagggccatgcctactctgtgaccggggccaagcaggtgaactaccgaggccaggtggtgagcctgatccggatgcggaacccctggggcgaggtggagtggacgggagcctggagcgacagctcctcagagtggaacaacgtggacccatatgaacgggaccagctccgggtcaagatggaggacggggagttctggatgtcattccgagacttcatgcgggagttcacccgcctggagatctgcaacctcacacccgacgccctcaagagccggaccatccgcaaatggaacaccacactctacgaaggcacctggcggcgggggagcaccgcggggggctgccgaaactacccagccaccttctgggtgaaccctcagttcaagatccggctggatgagacggatgacccggacgactacggggaccgcgagtcaggctgcagcttcgtgctcgcccttatgcagaagcaccgtcgccgcgagcgccgcttcggccgcgacatggagactattggcttcgcggtctacgaggtccctccggagctggtgggccagccggccgtacacttgaagcgtgacttcttcctggccaatgcgtctcgggcgcgctcagagcagttcatcaacctgcgagaggtcagcacccgcttccgcctgccacccggggagtatgtggtggtgccctccaccttcgagcccaacaaggagggcgacttcgtgctgcgcttcttctcagagaagagtgctgggactgtggagctggatgaccagatccaggccaatctccccgatgagcaagtgctctcagaagaggagattgacgagaacttcaaggccctcttcaggcagctggcaggggaggacatggagatcagcgtgaaggagttgcggacaatcctcaataggatcatcagcaaacacaaagacctgcggaccaagggcttcagcctagagtcgtgccgcagcatggtgaacctcatggatcgtgatggcaatgggaagctgggcctggtggagttcaacatcctgtggaaccgcatccggaattacctgtccatcttccggaagtttgacctggacaagtcgggcagcatgagtgcctacgagatgcggatggccattgagtcggcaggcttcaagctcaacaagaagctgtacgagctcatcatcacccgctactcggagcccgacctggcggtcgactttgacaatttcgtttgctgcctggtgcggctagagaccatgttccgatttttcaaaactctggacacagatctggatggagttgtgacctttgacttgtttaagtggttgcagctgaccatgtttgcatgaggcagggactcggtcccccttgccgtgctcccctccctcctcgtctgccaagcctcgcctcctaccacaccacaccaggccaccccagctgcaagtgccttccttggagcagagaggcagcctcgtcctcctgtcccctctcctcccagccaccatcgttcatctgctccgggcagaactgtgtggcccctgcctgtgccagccatgggctcgggatggactccctgggccccacccattgccaagccaggaaggcagctttcgcttgttcctgcctcgggacagccccgggtttccccagcatcctgatgtgtcccctctccccacttcagaggccacccactcagcaccaccggcctggccttgcctgcagactataaactataaccactagctcgacacagtctgcagtccaggcgtgtggagccgcctcccggctcggggaggccccggggctgggaacgcctgtgccttcctgcgccgaagccaacgccccctctgtccttccctggccctgctgccgaccaggagctgcccagcctgtgggcggtcggccttccctccttcgctcc

SEQ ID NO: 3087 - DNA, 2960 bp, Homo sapiens
  source 1..2960: mol_type = unassigned DNA; mol_type = unassigned DNA
tggcccccggcctgcggagggaggggcggggagacaccgtgagtaagagatagtcagagaccgtgccggagagataagggagagccgagaggaagcggggatgtcggaggagatcatcacgccggtgtactgcactggggtgtcagcccaagtgcagaagcagcgggccagggagctgggcctgggccgccatgagaatgccatcaagtacctgggccaggattatgagcagctgcgggtgcgatgcctgcagagtgggaccctcttccgtgatgaggccttccccccggtaccccagagcctgggttacaaggacctgggtcccaattcctccaagacctatggcatcaagtggaagcgtcccacggaactgctgtcaaacccccagttcattgtggatggagctacccgcacagacatctgccagggagcactgggggactgctggctcttggcggccatcgcctccctcactctcaacgacaccctcctgcaccgagtggttccgcacggccagagcttccagaatggctatgccggcatcttccatttccagctgtggcaatttggggagtgggtggacgtggtcgtggatgacctgctgcccatcaaggacgggaagctagtgttcgtgcactctgccgaaggcaacgagttctggagcgccctgcttgagaaggcctatgccaaggtaaatggcagctacgaggccctgtcagggggcagcacctcagagggctttgaggacttcacaggcggggttaccgagtggtacgagttgcgcaaggctcccagtgacctctaccagatcatcctcaaggcgctggagcggggctccctgctgggctgctccatagacatctccagcgttctagacatggaggccatcactttcaagaagttggtgaagggccatgcctactctgtgaccggggccaagcaggtgaactaccgaggccaggtggtgagcctgatccggatgcggaacccctggggcgaggtggagtggacgggagcctggagcgacagctcctcagagtggaacaacgtggacccatatgaacgggaccagctccgggtcaagatggaggacggggagttctggatgtcattccgagacttcatgcgggagttcacccgcctggagatctgcaacctcacacccgacgccctcaagagccggaccatccgcaaatggaacaccacactctacgaaggcacctggcggcgggggagcaccgcggggggctgccgaaactacccagccaccttctgggtgaaccctcagttcaagatccggctggatgagacggatgacccggacgactacggggaccgcgagtcaggctgcagcttcgtgctcgcccttatgcagaagcaccgtcgccgcgagcgccgcttcggccgcgacatggagactattggcttcgcggtctacgaggtccctccggagctggtgggccagccggccgtacacttgaagcgtgacttcttcctggccaatgcgtctcgggcgcgctcagagcagttcatcaacctgcgagaggtcagcacccgcttccgcctgccacccggggagtatgtggtggtgccctccaccttcgagcccaacaaggagggcgacttcgtgctgcgcttcttctcagagaagagtgctgggactgtggagctggatgaccagatccaggccaatctccccgatgagcaagtgctctcagaagaggagattgacgagaacttcaaggccctcttcaggcagctggcaggggaggacatggagatcagcgtgaaggagttgcggacaatcctcaataggatcatcagcaaacacaaagacctgcggaccaagggcttcagcctagagtcgtgccgcagcatggtgaacctcatggatcgtgatggcaatgggaagctgggcctggtggagttcaacatcctgtggaaccgcatccggaattacctgtccatcttccggaagtttgacctggacaagtcgggcagcatgagtgcctacgagatgcggatggccattgagtcggcaggcttcaagctcaacaagaagctgtacgagctcatcatcacccgctactcggagcccgacctggcggtcgactttgacaatttcgtttgctgcctggtgcggctagagaccatgttccgatttttcaaaactctggacacagatctggatggagttgtgacctttgacttgtttaagtggttgcagctgaccatgtttgcatgaggcagggactcggtcccccttgccgtgctcccctccctcctcgtctgccaagcctcgcctcctaccacaccacaccaggccaccccagctgcaagtgccttccttggagcagagaggcagcctcgtcctcctgtcccctctcctcccagccaccatcgttcatctgctccgggcagaactgtgtggcccctgcctgtgccagccatgggctcgggatggactccctgggccccacccattgccaagccaggaaggcagctttcgcttgttcctgcctcgggacagccccgggtttccccagcatcctgatgtgtcccctctccccacttcagaggccacccactcagcaccaccggcctggccttgcctgcagactataaactataaccactagctcgacacagtctgcagtccaggcgtgtggagccgcctcccggctcggggaggccccggggctgggaacgcctgtgccttcctgcgccgaagccaacgccccctctgtccttccctggccctgctgccgaccaggagctgcccagcctgtgggcggtcggccttccctccttcgctccttttttatattagtgattttaaaggggactcttcagggacttgtgtactggttatgggggtgccagaggcactaggcttggggtggggaggtcccgtgttccatatagaggaaccccaaataataaaaggccccacatctgtc

SEQ ID NO: 3088 - DNA, 577 bp, Homo sapiens
  source 1..577: mol_type = unassigned DNA; mol_type = unassigned DNA
agagaccgtgccggagagataagggagagccgagaggaagcggggatgtcggaggagatcatcacgccggtgtactgcactggggtgtcagcccaagtgcagaagcagcgggccagggagctgggcctgggccgccatgagaatgccatcaagtacctgggccaggattatgagcagctgcgggtgcgatgcctgcagagtgggaccctcttccgtgatgaggccttccccccggtaccccagagcctgggttacaaggacctgggtcccaattcctccaagacctatggcatcaagtggaagcgtcccacggaactgctgtcaaacccccagttcattgtggatggagctacccgcacagacatctgccagggagcactgggggactgctggctcttggcggccatcgcctccctcactctcaacgacaccctcctgcaccgagtggttccgcacggccagagcttccagaatggctatgccggcatcttccatttccaggtgagggctcccctggggaggaggggcagcaggcactgggggagatgcggaaggatgacccacaatacctgcagtt

SEQ ID NO: 3089 - DNA, 3007 bp, Homo sapiens
  source 1..3007: mol_type = unassigned DNA
aaggagagagggagggcggagggcggaggggcggcgggaggagggcggggaggagcgctcttcctggttgggccctgccctgagctgccaccgggaagccagcctcagggactgcagcgacccccaaacacccctcccccaggatgtcggaggagatcatcacgccggtgtactgcactggggtgtcagcccaagtgcagaagcagcgggccagggagctgggcctgggccgccatgagaatgccatcaagtacctgggccaggattatgagcagctgcgggtgcgatgcctgcagagtgggaccctcttccgtgatgaggccttccccccggtaccccagagcctgggttacaaggacctgggtcccaattcctccaagacctatggcatcaagtggaagcgtcccacggaactgctgtcaaacccccagttcattgtggatggagctacccgcacagacatctgccagggagcactgggggactgctggctcttggcggccatcgcctccctcactctcaacgacaccctcctgcaccgagtggttccgcacggccagagcttccagaatggctatgccggcatcttccatttccagctgtggcaatttggggagtgggtggacgtggtcgtggatgacctgctgcccatcaaggacgggaagctagtgttcgtgcactctgccgaaggcaacgagttctggagcgccctgcttgagaaggcctatgccaaggtaaatggcagctacgaggccctgtcagggggcagcacctcagagggctttgaggacttcacaggcggggttaccgagtggtacgagttgcgcaaggctcccagtgacctctaccagatcatcctcaaggcgctggagcggggctccctgctgggctgctccatagacatctccagcgttctagacatggaggccatcactttcaagaagttggtgaagggccatgcctactctgtgaccggggccaagcaggtgaactaccgaggccaggtggtgagcctgatccggatgcggaacccctggggcgaggtggagtggacgggagcctggagcgacagctcctcagagtggaacaacgtggacccatatgaacgggaccagctccgggtcaagatggaggacggggagttctggatgtcattccgagacttcatgcgggagttcacccgcctggagatctgcaacctcacacccgacgccctcaagagccggaccatccgcaaatggaacaccacactctacgaaggcacctggcggcgggggagcaccgcggggggctgccgaaactacccagccaccttctgggtgaaccctcagttcaagatccggctggatgagacggatgacccggacgactacggggaccgcgagtcaggctgcagcttcgtgctcgcccttatgcagaagcaccgtcgccgcgagcgccgcttcggccgcgacatggagactattggcttcgcggtctacgaggtccctccggagctggtgggccagccggccgtacacttgaagcgtgacttcttcctggccaatgcgtctcgggcgcgctcagagcagttcatcaacctgcgagaggtcagcacccgcttccgcctgccacccggggagtatgtggtggtgccctccaccttcgagcccaacaaggagggcgacttcgtgctgcgcttcttctcagagaagagtgctgggactgtggagctggatgaccagatccaggccaatctccccgatgagcaagtgctctcagaagaggagattgacgagaacttcaaggccctcttcaggcagctggcaggggaggacatggagatcagcgtgaaggagttgcggacaatcctcaataggatcatcagcaaacacaaagacctgcggaccaagggcttcagcctagagtcgtgccgcagcatggtgaacctcatggatcgtgatggcaatgggaagctgggcctggtggagttcaacatcctgtggaaccgcatccggaattacctgtccatcttccggaagtttgacctggacaagtcgggcagcatgagtgcctacgagatgcggatggccattgagtcggcaggcttcaagctcaacaagaagctgtacgagctcatcatcacccgctactcggagcccgacctggcggtcgactttgacaatttcgtttgctgcctggtgcggctagagaccatgttccgatttttcaaaactctggacacagatctggatggagttgtgacctttgacttgtttaagtggttgcagctgaccatgtttgcatgaggcagggactcggtcccccttgccgtgctcccctccctcctcgtctgccaagcctcgcctcctaccacaccacaccaggccaccccagctgcaagtgccttccttggagcagagaggcagcctcgtcctcctgtcccctctcctcccagccaccatcgttcatctgctccgggcagaactgtgtggcccctgcctgtgccagccatgggctcgggatggactccctgggccccacccattgccaagccaggaaggcagctttcgcttgttcctgcctcgggacagccccgggtttccccagcatcctgatgtgtcccctctccccacttcagaggccacccactcagcaccaccggcctggccttgcctgcagactataaactataaccactagctcgacacagtctgcagtccaggcgtgtggagccgcctcccggctcggggaggccccggggctgggaacgcctgtgccttcctgcgccgaagccaacgccccctctgtccttccctggccctgctgccgaccaggagctgcccagcctgtgggcggtcggccttccctccttcgctccttttttatattagtgattttaaaggggactcttcagggacttgtgtactggttatgggggtgccagaggcactaggcttggggtggggaggtcccgtgttccatatagaggaaccccaaataataaaaggccccacatctgtctgtg

SEQ ID NO: 3090 - DNA, 341 bp, Homo sapiens
  source 1..341: mol_type = unassigned DNA
gggaggagcgctcttcctggttgggccctgccctgagctgccaccgggaagccagcctcagggactgcagcgacccccaaacacccctcccccagcctgggttacaaggacctgggtcccaattcctccaagacctatggcatcaagtggaagcgtcccacggaactgctgtcaaacccccagttcattgtggatggagctacccgcacagacatctgccagggagcactgggggactgctggctcttggcggccatcgcctccctcactctcaacgacaccctcctgcaccgagtggttccgcacggccagagcttccagaatggctatgccggcatctt

SEQ ID NO: 3091 - DNA, 568 bp, Homo sapiens
  source 1..568: mol_type = unassigned DNA
cttcctggttgggccctgccctgagctgccaccgggaagccagcctcagggactgcagcgacccccaaacacccctcccccaggtaagaagctgggtagccgagccgggattccttgaccctggccactgctcctgggctgaggggctgccccagcacggtcccttctcgggggcctctgcgttcctggagcaggggtgggggctggcggagcggcacagcccaggcgcctgtcccagcctggctcaccgctgtccccaggggctgggctagggcccaccagctctgatatcgagcctgctgcgggggcctgaggagggggaccccgaccgtctggggttttcagcccacggcaaggggccggtgcaccaggagcttggatgtcggaggagatcatcacgccggtgtactgcactggggtgtcagcccaagtgcagaagcagcgggccagggagctgggcctgggccgccatgagaatgccatcaagtacctgggccaggattatgagcagctgcgggtgcgatgcctgcagagtgggaccctcttccgtgatgaggccttccccccg

SEQ ID NO: 3092 - DNA, 558 bp, Homo sapiens
  source 1..558: mol_type = unassigned DNA
cttcctggttgggccctgccctgagctgccaccgggaagccagcctcagggactgcagcgacccccaaacacccctcccccaggatgtcggaggagatcatcacgccggtgtactgcactggggtgtcagcccaagtgcagaagcagcgggccagggagctgggcctgggccgccatgagaatgccatcaagtacctgggccaggattatgagcagctgcgggtgcgatgcctgcagagtgggaccctcttccgtgatgaggccttccccccggtaccccagagcctgggttacaaggacctgggtcccaattcctccaagacctatggcatcaagtggaagcgtcccacggggactgctggctcttggcggccatcgcctccctcactctcaacgacaccctcctgcaccgagtggttccgcacggccagagcttccagaatggctatgccggcatcttccatttccagctgtggcaatttggggagtgggtggacgtggtcgtggatgacctgctgcccatcaaggacgggaagctagtgttcgtgcactctgccg

SEQ ID NO: 3093 - DNA, 584 bp, Homo sapiens
  source 1..584: mol_type = unassigned DNA; mol_type = unassigned DNA
cctggttgggccctgccctgagctgccaccgggaagccagcctcagggactgcagcgacccccaaacacccctcccccaggatgtcggaggagatcatcacgccggtgtactgcactggggtgtcagcccaagtgcagaagcagcgggccagggagctgggcctgggccgccatgagaatgccatcaagtacctgggccaggattatgagcagctgcgggtgcgatgcctgcagagtgggaccctcttccgtgatgaggccttccccccggtaccccagagcctgggttacaaggacctgggtcccaattcctccaagacctatggcatcaagtggaagcgtcccacggaactgctgtcaaacccccagttcattgtggatggagctacccgcacagacatctgccagggagcactgggggactgctggctcttggcggccatcgcctccctcactctcaacgacaccctcctgcaccgagtggttccgcacggccagagcttccagaatggctatgccggcatcttccatttccaggtactcaccgtgcccctcccccacagctgtggcaatttggggagtgg

SEQ ID NO: 3094 - DNA, 581 bp, Homo sapiens
  source 1..581: mol_type = unassigned DNA; mol_type = unassigned DNA
gttgggccctgccctgagctgccaccgggaagccagcctcagggactgcagcgacccccaaacacccctcccccagttccttgtgctgtctggaggctccgccctgccccacctgacctgctggctcactacagagctgcaagcccctgacaatgggatccgggaaaggagaggatgtcggaggagatcatcacgccggtgtactgcactggggtgtcagcccaagtgcagaagcagcgggccagggagctgggcctgggccgccatgagaatgccatcaagtacctgggccaggattatgagcagctgcgggtgcgatgcctgcagagtgggaccctcttccgtgatgaggccttccccccggtaccccagagcctgggttacaaggacctgggtcccaattcctccaagacctatggcatcaagtggaagcgtcccacggaactgctgtcaaacccccagttcattgtggatggagctacccgcacagacatctgccagggagcactgggggactgctggctcttggcggccatcgcctccctcactctcaacgacaccctcctgcaccgagtggttcc

SEQ ID NO: 3095 - DNA, 754 bp, Homo sapiens
  source 1..754: mol_type = unassigned DNA; mol_type = unassigned DNA
cacccctcccccaggatgtcggaggagatcatcacgccggtgtactgcactggggtgtcagcccaagtgcagaagcagcgggccagggagctgggcctgggccgccatgagaatgccatcaagtacctgggccaggattatgagcagctgcgggtgcgatgcctgcagagtgggaccctcttccgtgatgaggccttccccccggtaccccagagcctgggttacaaggacctgggtcccaattcctccaagacctatggcatcaagtggaagcgtcccacggaactgctgtcaaacccccagttcattgtggatggagctacccgcacagacatctgccagggagcactgggggactgctggctcttggcggccatcgcctccctcactctcaacgacaccctcctgcaccgagtggttccgcacggccagagcttccagaatggctatgccggcatcttccatttccagctgtggcaatttggggagtgggtggacgtggtcgtggatgacctgctgcccatcaaggacgggaagctagtgttcgtgcactctgccgaaggcaacgagttctggagcgccctgcttgagaaggcctatgccaaatctccagcgttctagacatggaggccatcactttcaagaagttggtgaagggccatgcctactctgtgaccggggccaagcaggtgaactaccgaggccaggtggtgagcctgatccggatgcggaacccctggggcgaggtggagtg

SEQ ID NO: 3096 - DNA, 496 bp, Homo sapiens
  source 1..496: mol_type = unassigned DNA; mol_type = unassigned DNA
actacagagctgcaagcccctgacaatgggatccgggaaaggagaggtggccggcacgcctgggaactgggaaatccctttcctggattcactgggagcaccgggaggtggctgagaaccctacttctgatgtcggaggagatcatcacgccggtgtactgcactggggtgtcagcccaagtgcagaagcagcgggccagggagctgggcctgggccgccatgagaatgccatcaagtacctgggccaggattatgagcagctgcgggtgcgatgcctgcagagtgggaccctcttccgtgatgaggccttccccccggtaccccagagcctgggttacaaggacctgggtcccaattcctccaagacctatggcatcaagtggaagcgtcccacggaactgctgtcaaacccccagttcattgtggatggagctacccgcacagacatctgccagggagcactgggggactgctggctcttggcggccatcgcct

SEQ ID NO: 3097 - DNA, 564 bp, Homo sapiens
  source 1..564: mol_type = unassigned DNA; mol_type = unassigned DNA
actacagagctgcaagcccctgacaatgggatccgggaaaggagaggtggccggcacgcctgggaactgggaaatccctttcctggattcactgggagcaccgggaggatgtcggaggagatcatcacgccggtgtactgcactggggtgtcagcccaagtgcagaagcagcgggccagggagctgggcctgggccgccatgagaatgccatcaagtacctgggccaggattatgagcagctgcgggtgcgatgcctgcagagtgggaccctcttccgtgatgaggccttccccccggtaccccagagcctgggttacaaggacctgggtcccaattcctccaagacctatggcatcaagtggaagcgtcccacggaactgctgtcaaacccccagttcattgtggatggagctacccgcacagacatctgccagggagcactgggggactgctggctcttggcggccatcgcctccctcactctcaacgacaccctcctgcaccgagtggttccgcacggccagagcttccagaatggctatgccggcatcttccatttccag

SEQ ID NO: 3098 - DNA, 573 bp, Homo sapiens
  source 1..573: mol_type = unassigned DNA; mol_type = unassigned DNA
cctgacaatgggatccgggaaaggagaggtggccggcacgcctgggaactgggaaatccctttcctggattcactgggagcaccgggaggtggctgagaaccctacttctgtgaggggagcagtgaggatgtcggaggagatcatcacgccggtgtactgcactggggtgtcagcccaagtgcagaagcagcgggccagggagctgggcctgggccgccatgagaatgccatcaagtacctgggccaggattatgagcagctgcgggtgcgatgcctgcagagtgggaccctcttccgtgatgaggccttccccccggtaccccagagcctgggttacaaggacctgggtcccaattcctccaagacctatggcatcaagtggaagcgtcccacggaactgctgtcaaacccccagttcattgtggatggagctacccgcacagacatctgccagggagcactgggggactgctggctcttggcggccatcgcctccctcactctcaacgacaccctcctgcaccgagtggttccgcacggccagagcttccagaatggctatgccggcatct

SEQ ID NO: 3099 - DNA, 3086 bp, Homo sapiens
  source 1..3086: mol_type = unassigned DNA; mol_type = unassigned DNA
gggatccgggaaaggagaggtggccggcacgcctgggaactgggaaatccctttcctggattcactgggagcaccgggaggtggctgagaaccctacttctgtgaggggagcagtgaggcagggaaaccctaggtttggggatggataagcaggggcaggagagcagagcttgcaggcaggagcccaggttctagtcttgggaaggcctgggttctgagcaggcccatctgtccggcaggatgtcggaggagatcatcacgccggtgtactgcactggggtgtcagcccaagtgcagaagcagcgggccagggagctgggcctgggccgccatgagaatgccatcaagtacctgggccaggattatgagcagctgcgggtgcgatgcctgcagagtgggaccctcttccgtgatgaggccttccccccggtaccccagagcctgggttacaaggacctgggtcccaattcctccaagacctatggcatcaagtggaagcgtcccacggaactgctgtcaaacccccagttcattgtggatggagctacccgcacagacatctgccagggagcactgggggactgctggctcttggcggccatcgcctccctcactctcaacgacaccctcctgcaccgagtggttccgcacggccagagcttccagaatggctatgccggcatcttccatttccagctgtggcaatttggggagtgggtggacgtggtcgtggatgacctgctgcccatcaaggacgggaagctagtgttcgtgcactctgccgaaggcaacgagttctggagcgccctgcttgagaaggcctatgccaaggtaaatggcagctacgaggccctgtcagggggcagcacctcagagggctttgaggacttcacaggcggggttaccgagtggtacgagttgcgcaaggctcccagtgacctctaccagatcatcctcaaggcgctggagcggggctccctgctgggctgctccatagacatctccagcgttctagacatggaggccatcactttcaagaagttggtgaagggccatgcctactctgtgaccggggccaagcaggtgaactaccgaggccaggtggtgagcctgatccggatgcggaacccctggggcgaggtggagtggacgggagcctggagcgacagctcctcagagtggaacaacgtggacccatatgaacgggaccagctccgggtcaagatggaggacggggagttctggatgtcattccgagacttcatgcgggagttcacccgcctggagatctgcaacctcacacccgacgccctcaagagccggaccatccgcaaatggaacaccacactctacgaaggcacctggcggcgggggagcaccgcggggggctgccgaaactacccagccaccttctgggtgaaccctcagttcaagatccggctggatgagacggatgacccggacgactacggggaccgcgagtcaggctgcagcttcgtgctcgcccttatgcagaagcaccgtcgccgcgagcgccgcttcggccgcgacatggagactattggcttcgcggtctacgaggtccctccggagctggtgggccagccggccgtacacttgaagcgtgacttcttcctggccaatgcgtctcgggcgcgctcagagcagttcatcaacctgcgagaggtcagcacccgcttccgcctgccacccggggagtatgtggtggtgccctccaccttcgagcccaacaaggagggcgacttcgtgctgcgcttcttctcagagaagagtgctgggactgtggagctggatgaccagatccaggccaatctccccgatgagcaagtgctctcagaagaggagattgacgagaacttcaaggccctcttcaggcagctggcaggggaggacatggagatcagcgtgaaggagttgcggacaatcctcaataggatcatcagcaaacacaaagacctgcggaccaagggcttcagcctagagtcgtgccgcagcatggtgaacctcatggatcgtgatggcaatgggaagctgggcctggtggagttcaacatcctgtggaaccgcatccggaattacctgtccatcttccggaagtttgacctggacaagtcgggcagcatgagtgcctacgagatgcggatggccattgagtcggcaggcttcaagctcaacaagaagctgtacgagctcatcatcacccgctactcggagcccgacctggcggtcgactttgacaatttcgtttgctgcctggtgcggctagagaccatgttccgatttttcaaaactctggacacagatctggatggagttgtgacctttgacttgtttaagtggttgcagctgaccatgtttgcatgaggcagggactcggtcccccttgccgtgctcccctccctcctcgtctgccaagcctcgcctcctaccacaccacaccaggccaccccagctgcaagtgccttccttggagcagagaggcagcctcgtcctcctgtcccctctcctcccagccaccatcgttcatctgctccgggcagaactgtgtggcccctgcctgtgccagccatgggctcgggatggactccctgggccccacccattgccaagccaggaaggcagctttcgcttgttcctgcctcgggacagccccgggtttccccagcatcctgatgtgtcccctctccccacttcagaggccacccactcagcaccaccggcctggccttgcctgcagactataaactataaccactagctcgacacagtctgcagtccaggcgtgtggagccgcctcccggctcggggaggccccggggctgggaacgcctgtgccttcctgcgccgaagccaacgccccctctgtccttccctggccctgctgccgaccaggagctgcccagcctgtgggcggtcggccttccctccttcgctccttttttatattagtgattttaaaggggactcttcagggacttgtgtactggttatgggggtgccagaggcactaggcttggggtggggaggtcccgtgttccatatagaggaaccccaaataataaaag

SEQ ID NO: 3100 - DNA, 690 bp, Homo sapiens
  source 1..690: mol_type = unassigned DNA; mol_type = unassigned DNA
agattcctgggtcttttctgcaagctgaggggagttaagtggcaccctggccaaggaaccccagattctccctagcacccgcttccccccccggggcaggttggtagagcaggctaatgtgcatccctcctgccccaggggactgctggctcttggcggccatcgcctccctcactctcaacgacaccctcctgcaccgagtggttccgcacggccagagcttccagaatggctatgccggcatcttccatttccagctgtggcaatttggggagtgggtggacgtggtcgtggatgacctgctgcccatcaaggacgggaagctagtgttcgtgcactctgccgaaggcaacgagttctggagcgccctgcttgagaaggcctatgccaaggtaaatggcagctacgaggccctgtcagggggcagcacctcagagggctttgaggacttcacaggcggggttaccgagtggtacgagttgcgcaaggctcccagtgacctctaccagatcatcctcaaggcgctggagcggggctccctgctgggctgctccatagacatctccagcgttctagacatggaggccatcactttcaagaagttggtgaagggccatgcctactctgtgaccggggccaagcaggtgaactaccgaggccaggtggtgagcctgatccggatgcggaacc

SEQ ID NO: 3101 - DNA, 879 bp, Homo sapiens
  source 1..879: mol_type = unassigned DNA; mol_type = unassigned DNA
gagtgggtggacgtggtcgtggatgacctgctgcccatcaaggacgggaagctagtgttcgtgcactctgccgaaggcaacgagttctggagcgccctgcttgagaaggcctatgccaagtgagtagcggctgagggggcaactccagcttccagctccccctaggggtgggggctcatgactgtcttctcagagggtcctgcttgatgccagagtgctgacctggagctgcccacagggtaaatggcagctacgaggccctgtcagggggcagcacctcagagggctttgaggacttcacaggcggggttaccgagtggtacgagttgcgcaaggctcccagtgacctctaccagatcatcctcaaggcgctggagcggggctccctgctgggctgctccatagacatctccagcgttctagacatggaggccatcactttcaagaagttggtgaagggccatgcctactctgtgaccggggccaagcaggtactgccctgggtggggccttccctgaagggcggttcctgccccctggcctgtccttgcctctctggcacctgaccagggctgtggaaggtgctggctcctcctttcccctcctgcagcaccttatctctcttctggggacacccatctgagatgcctatcatgtcctgccctgactgactgtagttcatgtgtgcagctgcctgcctgggctgtgaattccaagaggacaggcttcatctgggtgctgagcagggcttggagaggatgagggtatgggaggcggagtgttaaagtgcgtgcatgggccaggtgcactggctcacacctgtaatcccaacactttgggaggctgaggtgggcagatcacctgaggtcaggagttcga

SEQ ID NO: 3102 - DNA, 878 bp, Homo sapiens
  source 1..878: mol_type = unassigned DNA; mol_type = unassigned DNA
gctctggcaaataggtgaactaccgaggccaggtggtgagcctgatccggatgcggaacccctggggcgaggtggagtggacgggagcctggagcgacagctcctcagagtggaacaacgtggacccatatgaacgggaccagctccgggtcaagatggaggacggggagttctggatgtcattccgagacttcatgcgggagttcacccgcctggagatctgcaacctcacacccgacgccctcaagagccggaccatccgcaaatggaacaccacactctacgaaggcacctggcggcgggggagcaccgcggggggctgccgaaactacccagccaccttctgggtgaaccctcagttcaagatccggctggatgagacggatgacccggacgactacggggaccgcgagtcaggctgcagcttcgtgctcgcccttatgcagaagcaccgtcgccgcgagcgccgcttcggccgcgacatggagactattggcttcgcggtctacgaggtccctccggaggtaggtgtggcaccatgacccacctgcagtcacacacccctgatggtgccagaggggagcaacccagtggcaaacccaccctggcctggagagctaagaagtcaccttgtttcactgcttgaaaaatgcttctccccacctgttcagtgggcagagcaaacattgctctcctgagggtcagcacaggtagtcagtgagggagctggatttgagccctggtcctcagagcccctgtctgacatgtacacatgaggcttttcctgccttgccatctacaccaagtaagtgccaactagggcggtccagcaatgtcaggagcagggcattagacaggctgagagttctgtacccttg

SEQ ID NO: 3103 - DNA, 348 bp, Homo sapiens
  source 1..348: mol_type = unassigned DNA; mol_type = unassigned DNA
cagactggccctgatgagaccaccccctagaagcggaaccttggcgcttgaccttgaggaggccacctgggctgggccgggggaagacaggccagggtagacaggccccagggacagaggccaggcaggtcagtgcccaccagccctggcagagccctgctcctcacagctcctcagagtggaacaacgtggacccatatgaacgggaccagctccgggtcaagatggaggacggggagttctggatgtcattccgagacttcatgcgggagttcacccgcctggagatctgcaacctcacacccgacgccctcaagagccggaccatccgcaaatggaacaccacac

SEQ ID NO: 3104 - DNA, 572 bp, Homo sapiens
  source 1..572: mol_type = unassigned DNA; mol_type = unassigned DNA
gtttttgaaactgaatcttactctgtcgcccaggctggagtgctgtggcacgatctcagctcactgcaacctccgcctcccagaggtggagtttcaccatattgtccaggctggtctcaaaactcctgacctcaagtgatccgtctgcctgggcctcccaaagcgctgggattacagccaccttctgggtgaaccctcagttcaagatccggctggatgagacggatgacccggacgactacggggaccgcgagtcaggctgcagcttcgtgctcgcccttatgcagaagcaccgtcgccgcgagcgccgcttcggccgcgacatggagactattggcttcgcggtctacgaggtccctccggagctggtgggccagccggccgtacacttgaagcgtgacttcttcctggccaatgcgtctcgggcgcgctcagagcagttcatcaacctgcgagaggtcagcacccgcttccgcctgccacccggggagtatgtggtggtgccctccaccttcgagcccaacaaggagggcgacttcgtgctgcgcttcttctcagagaagagtgctggg

SEQ ID NO: 3105 - DNA, 643 bp, Homo sapiens
  source 1..643: mol_type = unassigned DNA; mol_type = unassigned DNA
ctgcagtgagtagggttgttacattttacagatgaggaaactgaggcaaaatgtcttgttagggtcacacaggctgtgagtgagccatgccccagctctccagccccttggccaggacaaggagcctggagtctgggtctgggggtggcccctgagggtgggctgagtgggcagctgcagccctgctccctcctccctcccaccagctggtgggccagccggccgtacacttgaagcgtgacttcttcctggccaatgcgtctcgggcgcgctcagagcagttcatcaacctgcgagaggtcagcacccgcttccgcctgccacccggggagtatgtggtggtgccctccaccttcgagcccaacaaggagggcgacttcgtgctgcgcttcttctcagagaagagtgctgggactgtggagctggatgaccagatccaggccaatctccccgatgagcaagtgctctcagaagaggagattgacgagaacttcaaggccctcttcaggcagctggcaggggaggacatggagatcagcgtgaaggagttgcggacaatcctcaataggatcatcagcaaacacaaagacctgcggaccaagggcttcagcctagagtcgtgccgcagcatggtgaacctcat

SEQ ID NO: 3106 - DNA, 2828 bp, Homo sapiens
  source 1..2828: mol_type = unassigned DNA; mol_type = unassigned DNA
tgggattagcagcgcagcctggccaggcacagtggctcacacctgtagtcccaacactctgggaggccgaggcaggagtcgcttcagcccaggagttcaacaccagcctggacaatatggagagaccctgtctctgcaaaaaagtacaaaaattagctgggcgtggtggcatgcacctatagtcccagctactcaggaggctgagttgggaggatggcttgagaccagggaggttaaggctgcagtgagctgtgatcacatcagtgcactccagcctgggcaacagagcaagaccctgtctcaaaaaaaaaagcaggagcagcaccttagtgccaaagaaaagtctacctttcctcccagagcctcctgggccaggctgagtggcttggggaacaccacgtgactggcttcactccccagggcagacaactgctggcctctcatcccctcccctcccctttgctgccactgacctccatccacacggtttccttaagcagagcttttctcctcctcttctctgctagtgaagcactgcttaccctcctagcctacagcaagccctgccctgccccatctttctacccaatttctcgctcttctgtttcacactcatttctttttactttggactaattgtggctgttgggactttggcttgattgctaaaatactttacttgtacttcctgatgatacaaacaatcctgcccacttcctctgccagatattgcacccactcgtcaggatttgtgcgtccttgactctgccccacccagtgctcccagcaggggcaggtgcaggaagctcactaggtggagatgttggaattggtttttcttgcagacaaagacctgcggaccaagggcttcagcctagagtcgtgccgcagcatggtgaacctcatggatgtatccttccgtttgcttttgtctcctgagtggggttttgggtggaggtatcggtgctgggagaactgtcccaggacagcacagagaacaggacagagccatgcggagtgtggacacacagtgccccatgctcagatgtctccctggacgtcttcctgttggttgggagggagaaactgaggcacagacctgtgtcaagtgaaaggtggagcaagacctgggtccccattgaccctgaggctggtgctatttctgacccctccccagcccactccactgcagcccagctcagagaataaggcaagcccggctgtgggctgactgtacatggcttttgctgcttctcctcacccagccccaagtcgacttgccggctcggcggccatctccccttctgcacagttgcccactctcccatgactggtctaagtgatggaatttccttcttaacggccacccagcgtgatggcaatgggaagctgggcctggtggagttcaacatcctgtggaaccgcatccggaattacctgtccatcttccggaagtttgacctggacaagtcgggcagcatgagtgcctacgagatgcggatggccattgagtcggcaggcttcaagctcaacaagaagctgtacgagctcatcatcacccgctactcggagcccgacctggcggtcgactttgacaatttcgtttgctgcctggtgcggctagagaccatgttccgatttttcaaaactctggacacagatctggatggagttgtgacctttgacttgtttaaggtgggaacctccctgggcccatggttggggaagagttccaggcgatcgaattttcttatctggccagtgttccctgtcctttcctggaaatgagcctgggcctcagagccaaccctgaagcccgggccacctgaatcctgaaaggctggggtgggggtgtctggattctgggaaaggagcaggaggggaggtccaggcccttggaggcccctatgggagcagcactctggtttcccaggggtggaggaggtaagaaagtaacccctccatgaggttcctgaggtggctcctgagacgtggagttgggggctggacctggggtttgggtggggaagaagccagggagccatttctgcggccccagctgacctgcctgttctcccgcagtggttgcagctgaccatgtttgcatgaggcagggactcggtcccccttgccgtgctcccctccctcctcgtctgccaagcctcgcctcctaccacaccacaccaggccaccccagctgcaagtgccttccttggagcagagaggcagcctcgtcctcctgtcccctctcctcccagccaccatcgttcatctgctccgggcagaactgtgtggcccctgcctgtgccagccatgggctcgggatggactccctgggccccacccattgccaagccaggaaggcagctttcgcttgttcctgcctcgggacagccccgggtttccccagcatcctgatgtgtcccctctccccacttcagaggccacccactcagcaccaccggcctggccttgcctgcagactataaactataaccactagctcgacacagtctgcagtccaggcgtgtggagccgcctcccggctcggggaggccccggggctgggaacgcctgtgccttcctgcgccgaagccaacgccccctctgtccttccctggccctgctgccgaccaggagctgcccagcctgtgggcggtcggccttccctccttcgctccttttttatattagtgattttaaaggggactcttcagggacttgtgtactggttatgggggtgccagaggcactaggcttggggtggggaggtcccgtgttccatatagaggaaccccaaataataaaaggccccacatctgtctgtg

SEQ ID NO: 3107 - DNA, 643 bp, Homo sapiens
  source 1..643: mol_type = unassigned DNA; mol_type = unassigned DNA
cctccatccacacggtttccttaagcagagcttttctcctcctcttctctgctagtgaagcactgcttaccctcctagcctacagcaagccctgccctgccccatctttctacccaatttctcgctcttctgtttcacactcatttctttttactttggactaattgtggctgttgggactttggcttgattgctaaaatactttacttgtacttcctgatgatacaaacaatcctgcccacttcctctgccagatattgcacccactcgtcaggatttgtgcgtccttgactctgccccacccagtgctcccagcaggggcaggtgcaggaagctcactaggtggagatgttggaattggtttttcttgcagacaaagacctgcggaccaagggcttcagcctagagtcgtgccgcagcatggtgaacctcatggatcgtgatggcaatgggaagctgggcctggtggagttcaacatcctgtggaaccgcatccggaattacctgtccatcttccggaagtttgacctggacaagtcgggcagcatgagtgcctacgagatgcggatggccattgagtcggcaggcttcaagctcaacaagaagctgtacgagctcatcatcacccgctactcggagcccg

SEQ ID NO: 3108 - DNA, 1415 bp, Homo sapiens
  source 1..1415: mol_type = unassigned DNA; mol_type = unassigned DNA
taaaatactttacttgtacttcctgatgatacaaacaatcctgcccacttcctctgccagatattgcacccactcgtcaggatttgtgcgtccttgactctgccccacccagtgctcccagcaggggcaggtgcaggaagctcactaggtggagatgttggaattggtttttcttgcagacaaagacctgcggaccaagggcttcagcctagagtcgtgccgcagcatggtgaacctcatggatcgtgatggcaatgggaagctgggcctggtggagttcaacatcctgtggaaccgcatccggaattacctggtaggttgtccccactcacctcagtcatgcaggtgcgggccgggcaggtgggaagggccgggtgactcagcctggccctcaccctctgccgccacctcagtccatcttccggaagtttgacctggacaagtcgggcagcatgagtgcctacgagatgcggatggccattgagtcggcaggcttcaagctcaacaagaagctgtacgagctcatcatcacccgctactcggagcccgacctggcggtcgactttgacaatttcgtttgctgcctggtgcggctagagaccatgttccgatttttcaaaactctggacacagatctggatggagttgtgacctttgacttgtttaagtggttgcagctgaccatgtttgcatgaggcagggactcggtcccccttgccgtgctcccctccctcctcgtctgccaagcctcgcctcctaccacaccacaccaggccaccccagctgcaagtgccttccttggagcagagaggcagcctcgtcctcctgtcccctctcctcccagccaccatcgttcatctgctccgggcagaactgtgtggcccctgcctgtgccagccatgggctcgggatggactccctgggccccacccattgccaagccaggaaggcagctttcgcttgttcctgcctcgggacagccccgggtttccccagcatcctgatgtgtcccctctccccacttcagaggccacccactcagcaccaccggcctggccttgcctgcagactataaactataaccactagctcgacacagtctgcagtccaggcgtgtggagccgcctcccggctcggggaggccccggggctgggaacgcctgtgccttcctgcgccgaagccaacgccccctctgtccttccctggccctgctgccgaccaggagctgcccagcctgtgggcggtcggccttccctccttcgctccttttttatattagtgattttaaaggggactcttcagggacttgtgtactggttatgggggtgccagaggcactaggcttggggtggggaggtcccgtgttccatatagaggaaccccaaataataaaaggccccacatctgtctgtga

SEQ ID NO: 3109 - DNA, 2669 bp, Homo sapiens
  source 1..2669: mol_type = unassigned DNA; mol_type = unassigned DNA
atttctcaggagaacttatggcttcagaatcacagctcggtttttaagatggacataacctgtacgaccttctgatgggctttcaactttgaactggatgtggacacttttctctcagatgacagaattactccaacttcccctttgcagttgcttcctttccttgaaggtagctgtatcttattttctttaaaaagctttttcttccaaagccacttgccatgccgaccgtcattagcgcatctgtggctccaaggacagcggctgagccccggtccccagggccagttcctcacccggcccagagcaaggccactgaggctgggggtggaaacccaagtggcatctattcagccatcatcagccgcaattttcctattatcggagtgaaagagaagacattcgagcaacttcacaagaaatgtctagaaaagaaagttctttatgtggaccctgagttcccaccggatgagacctctctcttttatagccagaagttccccatccagttcgtctggaagagacctccggaaatttgcgagaatccccgatttatcattgatggagccaacagaactgacatctgtcaaggagagctaggggactgctggtttctcgcagccattgcctgcctgaccctgaaccagcaccttcttttccgagtcataccccatgatcaaagtttcatcgaaaactacgcagggatcttccacttccagttctggcgctatggagagtgggtggacgtggttatagatgactgcctgccaacgtacaacaatcaactggttttcaccaagtccaaccaccgcaatgagttctggagtgctctgctggagaaggcttatgctaagctccatggttcctacgaagctctgaaaggtgggaacaccacagaggccatggaggacttcacaggaggggtggcagagttttttgagatcagggatgctcctagtgacatgtacaagatcatgaagaaagccatcgagagaggctccctcatgggctgctccattgatgatggcacgaacatgacctatggaacctctccttctggtctgaacatgggggagttgattgcacggatggtaaggaatatggataactcactgctccaggactcagacctcgaccccagaggctcagatgaaagaccgacccggacaatcattccggttcagtatgagacaagaatggcctgcgggctggtcagaggtcacgcctactctgtcacggggctggatgaggtcccgttcaaaggtgagaaagtgaagctggtgcggctgcggaatccgtggggccaggtggagtggaacggttcttggagtgatagatggaaggactggagctttgtggacaaagatgagaaggcccgtctgcagcaccaggtcactgaggatggagagttctggatgtcctatgaggatttcatctaccatttcacaaagttggagatctgcaacctcacggccgatgctctgcagtctgacaagcttcagacctggacagtgtctgtgaacgagggccgctgggtacggggttgctctgccggaggctgccgcaacttcccagatactttctggaccaaccctcagtaccgtctgaagctcctggaggaggacgatgaccctgatgactcggaggtgatttgcagcttcctggtggccctgatgcagaagaaccggcggaaggaccggaagctaggggccagtctcttcaccattggcttcgccatctacgaggttcccaaagagatgcacgggaacaagcagcacctgcagaaggacttcttcctgtacaacgcctccaaggccaggagcaaaacctacatcaacatgcgggaggtgtcccagcgcttccgcctgcctcccagcgagtacgtcatcgtgccctccacctacgagccccaccaggagggggaattcatcctccgggtcttctctgaaaagaggaacctctctgaggaagttgaaaataccatctccgtggatcggccagtgcccatcatcttcgtttcggacagagcaaacagcaacaaggagctgggtgtggaccaggagtcagaggagggcaaaggcaaaacaagccctgataagcaaaagcagtccccacagccacagcctggcagctctgatcaggaaagtgaggaacagcaacaattccggaacattttcaagcagatagcaggagatgacatggagatctgtgcagatgagctcaagaaggtccttaacacagtcgtgaacaaacacaaggacctgaagacacacgggttcacactggagtcctgccgtagcatgattgcgctcatggatacagatggctctggaaagctcaacctgcaggagttccaccacctctggaacaagattaaggcctggcagaaaattttcaaacactatgacacagaccagtccggcaccatcaacagctacgagatgcgaaatgcagtcaacgacgcaggattccacctcaacaaccagctctatgacatcattaccatgcggtacgcagacaaacacatgaacatcgactttgacagtttcatctgctgcttcgttaggctggagggcatgttcagagcttttcatgcatttgacaaggatggagatggtatcatcaagctcaacgttctggagtggctgcagctcaccatgtatgcctga

SEQ ID NO: 3110 - DNA, 2955 bp, Homo sapiens
  source 1..2955: mol_type = unassigned DNA; mol_type = unassigned DNA
atttctcaggagaacttatggcttcagaatcacagctcggtttttaagatggacataacctgtacgaccttctgatgggctttcaactttgaactggatgtggacacttttctctcagatgacagaattactccaacttcccctttgcagttgcttcctttccttgaaggtagctgtatcttattttctttaaaaagctttttcttccaaagccacttgccatgccgaccgtcattagcgcatctgtggctccaaggacagcggctgagccccggtccccagggccagttcctcacccggcccagagcaaggccactgaggctgggggtggaaacccaagtggcatctattcagccatcatcagccgcaattttcctattatcggagtgaaagagaagacattcgagcaacttcacaagaaatgtctagaaaagaaagttctttatgtggaccctgagttcccaccggatgagacctctctcttttatagccagaagttccccatccagttcgtctggaagagacctccggaaatttgcgagaatccccgatttatcattgatggagccaacagaactgacatctgtcaaggagagctaggggactgctggtttctcgcagccattgcctgcctgaccctgaaccagcaccttcttttccgagtcataccccatgatcaaagtttcatcgaaaactacgcagggatcttccacttccagttctggcgctatggagagtgggtggacgtggttatagatgactgcctgccaacgtacaacaatcaactggttttcaccaagtccaaccaccgcaatgagttctggagtgctctgctggagaaggcttatgctaagctccatggttcctacgaagctctgaaaggtgggaacaccacagaggccatggaggacttcacaggaggggtggcagagttttttgagatcagggatgctcctagtgacatgtacaagatcatgaagaaagccatcgagagaggctccctcatgggctgctccattgatacaatcattccggttcagtatgagacaagaatggcctgcgggctggtcagaggtcacgcctactctgtcacggggctggatgaggtcccgttcaaaggtgagaaagtgaagctggtgcggctgcggaatccgtggggccaggtggagtggaacggttcttggagtgatagatggaaggactggagctttgtggacaaagatgagaaggcccgtctgcagcaccaggtcactgaggatggagagttctggatgtcctatgaggatttcatctaccatttcacaaagttggagatctgcaacctcacggccgatgctctgcagtctgacaagcttcagacctggacagtgtctgtgaacgagggccgctgggtacggggttgctctgccggaggctgccgcaacttcccagatactttctggaccaaccctcagtaccgtctgaagctcctggaggaggacgatgaccctgatgactcggaggtgatttgcagcttcctggtggccctgatgcagaagaaccggcggaaggaccggaagctaggggccagtctcttcaccattggcttcgccatctacgaggttcccaaagagatgcacgggaacaagcagcacctgcagaaggacttcttcctgtacaacgcctccaaggccaggagcaaaacctacatcaacatgcgggaggtgtcccagcgcttccgcctgcctcccagcgagtacgtcatcgtgccctccacctacgagccccaccaggagggggaattcatcctccgggtcttctctgaaaagaggaacctctctgaggaagttgaaaataccatctccgtggatcggccagtgccacagcctggcagctctgatcaggaaagtgaggaacagcaacaattccggaacattttcaagcagatagcaggagatgacatggagatctgtgcagatgagctcaagaaggtccttaacacagtcgtgaacaaacacaaggacctgaagacacacgggttcacactggagtcctgccgtagcatgattgcgctcatggatacagatggctctggaaagctcaacctgcaggagttccaccacctctggaacaagattaaggcctggcagaaaattttcaaacactatgacacagaccagtccggcaccatcaacagctacgagatgcgaaatgcagtcaacgacgcaggattccacctcaacaaccagctctatgacatcattaccatgcggtacgcagacaaacacatgaacatcgactttgacagtttcatctgctgcttcgttaggctggagggcatgttcagagcttttcatgcatttgacaaggatggagatggtatcatcaagctcaacgttctggagtggctgcagctcaccatgtatgcctgaaccaggctggcctcatccaaagccatgcaggatcactcaggatttcagtttcaccctctatttccaaagccatttacctcaaaggacccagcagctacacccctacaggcttccaggcacctcatcagtcatgctcctcctccattttaccccctacccatccttgatcggtcatgcctagcctgaccctttagtaaagcaatgaggtaggaagaacaaacccttgtccctttgccatgtggaggaaagtgcctgcctctggtccgagccgcctcggttctgaagcgagtgctcctgcttaccttgctctaggctgtctgcagaagcacctgccggtggcactcagcacctccttgtgctagagccctccatcaccttcacgctgtcccaccatgggccaggaaccaaaccagcactgggttctactgctgtggggtaaactaactcagtggaatagggctggttactttgggctgtccaactcataagtttggctgcattttgaaaaaagctgatctaaataaaggcatgtgtatggctggtc

SEQ ID NO: 3111 - DNA, 3228 bp, Homo sapiens
  source 1..3228: mol_type = unassigned DNA; mol_type = unassigned DNA
ttctcaggagaacttatggcttcagaatcacagctcggtttttaagatggacataacctgtacgaccttctgatgggctttcaactttgaactggatgtggacacttttctctcagatgacagaattactccaacttcccctttgcagttgcttcctttccttgaaggtagctgtatcttattttctttaaaaagctttttcttccaaagccacttgccatgccgaccgtcattagcgcatctgtggctccaaggacagcggctgagccccggtccccagggccagttcctcacccggcccagagcaaggccactgaggctgggggtggaaacccaagtggcatctattcagccatcatcagccgcaattttcctattatcggagtgaaagagaagacattcgagcaacttcacaagaaatgtctagaaaagaaagttctttatgtggaccctgagttcccaccggatgagacctctctcttttatagccagaagttccccatccagttcgtctggaagagacctccggaaatttgcgagaatccccgatttatcattgatggagccaacagaactgacatctgtcaaggagagctaggggactgctggtttctcgcagccattgcctgcctgaccctgaaccagcaccttcttttccgagtcataccccatgatcaaagtttcatcgaaaactacgcagggatcttccacttccagttctggcgctatggagagtgggtggacgtggttatagatgactgcctgccaacgtacaacaatcaactggttttcaccaagtccaaccaccgcaatgagttctggagtgctctgctggagaaggcttatgctaagctccatggttcctacgaagctctgaaaggtgggaacaccacagaggccatggaggacttcacaggaggggtggcagagttttttgagatcagggatgctcctagtgacatgtacaagatcatgaagaaagccatcgagagaggctccctcatgggctgctccattgatgatggcacgaacatgacctatggaacctctccttctggtctgaacatgggggagttgattgcacggatggtaaggaatatggataactcactgctccaggactcagacctcgaccccagaggctcagatgaaagaccgacccggacaatcattccggttcagtatgagacaagaatggcctgcgggctggtcagaggtcacgcctactctgtcacggggctggatgaggtcccgttcaaaggtgagaaagtgaagctggtgcggctgcggaatccgtggggccaggtggagtggaacggttcttggagtgatagatggaaggactggagctttgtggacaaagatgagaaggcccgtctgcagcaccaggtcactgaggatggagagttctggatgtcctatgaggatttcatctaccatttcacaaagttggagatctgcaacctcacggccgatgctctgcagtctgacaagcttcagacctggacagtgtctgtgaacgagggccgctgggtacggggttgctctgccggaggctgccgcaacttcccagatactttctggaccaaccctcagtaccgtctgaagctcctggaggaggacgatgaccctgatgactcggaggtgatttgcagcttcctggtggccctgatgcagaagaaccggcggaaggaccggaagctaggggccagtctcttcaccattggcttcgccatctacgaggttcccaaagagatgcacgggaacaagcagcacctgcagaaggacttcttcctgtacaacgcctccaaggccaggagcaaaacctacatcaacatgcgggaggtgtcccagcgcttccgcctgcctcccagcgagtacgtcatcgtgccctccacctacgagccccaccaggagggggaattcatcctccgggtcttctctgaaaagaggaacctctctgaggaagttgaaaataccatctccgtggatcggccagtgaaaaagaaaaaaaccaagcccatcatcttcgtttcggacagagcaaacagcaacaaggagctgggtgtggaccaggagtcagaggagggcaaaggcaaaacaagccctgataagcaaaagcagtccccacagccacagcctggcagctctgatcaggaaagtgaggaacagcaacaattccggaacattttcaagcagatagcaggagatgacatggagatctgtgcagatgagctcaagaaggtccttaacacagtcgtgaacaaacacaaggacctgaagacacacgggttcacactggagtcctgccgtagcatgattgcgctcatggatacagatggctctggaaagctcaacctgcaggagttccaccacctctggaacaagattaaggcctggcagaaaattttcaaacactatgacacagaccagtccggcaccatcaacagctacgagatgcgaaatgcagtcaacgacgcaggattccacctcaacaaccagctctatgacatcattaccatgcggtacgcagacaaacacatgaacatcgactttgacagtttcatctgctgcttcgttaggctggagggcatgttcagagcttttcatgcatttgacaaggatggagatggtatcatcaagctcaacgttctggagtggctgcagctcaccatgtatgcctgaaccaggctggcctcatccaaagccatgcaggatcactcaggatttcagtttcaccctctatttccaaagccatttacctcaaaggacccagcagctacacccctacaggcttccaggcacctcatcagtcatgctcctcctccattttaccccctacccatccttgatcggtcatgcctagcctgaccctttagtaaagcaatgaggtaggaagaacaaacccttgtccctttgccatgtggaggaaagtgcctgcctctggtccgagccgcctcggttctgaagcgagtgctcctgcttaccttgctctaggctgtctgcagaagcacctgccggtggcactcagcacctccttgtgctagagccctccatcaccttcacgctgtcccaccatgggccaggaaccaaaccagcactgggttctactgctgtggggtaaactaactcagtggaatagggctggttactttgggctgtccaactcataagtttggctgcattttgaaaaaagctgatctaaataaaggcatgtgtatggctggt

SEQ ID NO: 3112 - DNA, 2358 bp, Homo sapiens
  source 1..2358: mol_type = unassigned DNA; mol_type = unassigned DNA
agaggattaggcgtggactgagggtgcagtgggaaagaggcagcagggaaggcccagctctactcccagagcattcgccatgccctacctgctgtcaggattcttctgtgactgtgtgatccaagagagggacaggagaaatggagagggcaccatcgcacagcccctcaagtttgaggggcaggattttgtcgttctcaaagatgtctggcccagaagtgcctctttgaagattgtgtgttcctagcaggtgttcaggccctggcctcccatgagctgagccacaaaaccaagatttaggccatcacatggaaaaggccaaaggaaatttgcgagaatccccgatttatcattgatggagccaacagaactgacatctgtcaaggagagctaggggactgctggtttctcgcagccattgcctgcctgaccctgaaccagcaccttcttttccgagtcataccccatgatcaaagtttcatcgaaaactacgcagggatcttccacttccagttctggcgctatggagagtgggtggacgtggttatagatgactgcctgccaacgtacaacaatcaactggttttcaccaagtccaaccaccgcaatgagttctggagtgctctgctggagaaggcttatgctaagctccatggttcctacgaagctctgaaaggtgggaacaccacagaggccatggaggacttcacaggaggggtggcagagttttttgagatcagggatgctcctagtgacatgtacaagatcatgaagaaagccatcgagagaggctccctcatgggctgctccattgatacaatcattccggttcagtatgagacaagaatggcctgcgggctggtcagaggtcacgcctactctgtcacggggctggatgaggtcccgttcaaaggtgagaaagtgaagctggtgcggctgcggaatccgtggggccaggtggagtggaacggttcttggagtgatagatggaaggactggagctttgtggacaaagatgagaaggcccgtctgcagcaccaggtcactgaggatggagagttctggatgtcctatgaggatttcatctaccatttcacaaagttggagatctgcaacctcacggccgatgctctgcagtctgacaagcttcagacctggacagtgtctgtgaacgagggccgctgggtacggggttgctctgccggaggctgccgcaacttcccagatactttctggaccaaccctcagtaccgtctgaagctcctggaggaggacgatgaccctgatgactcggaggtgatttgcagcttcctggtggccctgatgcagaagaaccggcggaaggaccggaagctaggggccagtctcttcaccattggcttcgccatctacgaggttcccaaagagatgcacgggaacaagcagcacctgcagaaggacttcttcctgtacaacgcctccaaggccaggagcaaaacctacatcaacatgcgggaggtgtcccagcgcttccgcctgcctcccagcgagtacgtcatcgtgccctccacctacgagccccaccaggagggggaattcatcctccgggtcttctctgaaaagaggaacctctctgaggaagttgaaaataccatctccgtggatcggccagtgccacagcctggcagctctgatcaggaaagtgaggaacagcaacaattccggaacattttcaagcagatagcaggagatgacatggagatctgtgcagatgagctcaagaaggtccttaacacagtcgtgaacaaacacaaggacctgaagacacacgggttcacactggagtcctgccgtagcatgattgcgctcatggatacagatggctctggaaagctcaacctgcaggagttccaccacctctggaacaagattaaggcctggcagaaaattttcaaacactatgacacagaccagtccggcaccatcaacagctacgagatgcgaaatgcagtcaacgacgcaggattccacctcaacaaccagctctatgacatcattaccatgcggtacgcagacaaacacatgaacatcgactttgacagtttcatctgctgcttcgttaggctggagggcatgttcagagcttttcatgcatttgacaaggatggagatggtatcatcaagctcaacgttctggagtggctgcagctcaccatgtatgcctgaaccaggctggcctcatccaaagccatgcaggatcactcaggatttcagtttcaccctctatttccaaagccatttacctcaaaggacccagcagctacacccctacaggcttccaggcacctcatcagtcatgctcctcctccattttacccc

SEQ ID NO: 3113 - DNA, 1643 bp, Homo sapiens
  source 1..1643: mol_type = unassigned DNA; mol_type = unassigned DNA
ccctcctccacgcttacagccacacacacagtcacacagacgcgttctgagggtggctgcccgcttgggatggaggaatcacttccctcagaacccagccaagtcctctaggcctccttgggggtccttccagcctgaggggcttcggagctgaggagcagctgttctgatgcacgggaacaagcagcacctgcagaaggacttcttcctgtacaacgcctccaaggccaggagcaaaacctacatcaacatgcgggaggtgtcccagcgcttccgcctgcctcccagcgagtacgtcatcgtgccctccacctacgagccccaccaggagggggaattcatcctccgggtcttctctgaaaagaggaacctctctgaggaagttgaaaataccatctccgtggatcggccagtgaaaaagaaaaaaaccaagcccatcatcttcgtttcggacagagcaaacagcaacaaggagctgggtgtggaccaggagtcagaggagggcaaaggcaaaacaagccctgataagcaaaagcagtccccacagccacagcctggcagctctgatcaggaaagtgaggaacagcaacaattccggaacattttcaagcagatagcaggagatgacatggagatctgtgcagatgagctcaagaaggtccttaacacagtcgtgaacaaacacaaggacctgaagacacacgggttcacactggagtcctgccgtagcatgattgcgctcatggatacagatggctctggaaagctcaacctgcaggagttccaccacctctggaacaagattaaggcctggcagaaaattttcaaacactatgacacagaccagtccggcaccatcaacagctacgagatgcgaaatgcagtcaacgacgcaggattccacctcaacaaccagctctatgacatcattaccatgcggtacgcagacaaacacatgaacatcgactttgacagtttcatctgctgcttcgttaggctggagggcatgttcagagcttttcatgcatttgacaaggatggagatggtatcatcaagctcaacgttctggagtggctgcagctcaccatgtatgcctgaaccaggctggcctcatccaaagccatgcaggatcactcaggatttcagtttcaccctctatttccaaagccatttacctcaaaggacccagcagctacacccctacaggcttccaggcacctcatcagtcatgctcctcctccattttaccccctacccatccttgatcggtcatgcctagcctgaccctttagtaaagcaatgaggtaggaagaacaaacccttgtccctttgccatgtggaggaaagtgcctgcctctggtccgagccgcctcggttctgaagcgagtgctcctgcttaccttgctctaggctgtctgcagaagcacctgccggtggcactcagcacctccttgtgctagagccctccatcaccttcacgctgtcccaccatgggccaggaaccaaaccagcactgggttctactgctgtggggtaaactaactcagtggaatagggctggttactttgggctgtccaactcataagtttggctgcattttgaaaaaagctgatctaaataaaggcatgtgtatggctggtc

SEQ ID NO: 3114 - DNA, 908 bp, Homo sapiens
  source 1..908: mol_type = unassigned DNA; mol_type = unassigned DNA
cagtcacacagacgcgttctgagggtggctgcccgcttgggatggaggaatcacttccctcagaacccagccaagtcctctaggcctccttgggggtccttccagcctgaggggcttcggagctgaggagcagctgttctgatgcacgggaacaagcagcacctgcagaaggacttcttcctgtacaacgcctccaaggccaggagcaaaacctacatcaacatgcgggaggtgtcccagcgcttccgcctgcctcccagcgagtacgtcatcgtgccctccacctacgagccccaccaggagggggaattcatcctccgggtcttctctgaaaagaggaacctctctgaggaagttgaaaataccatctccgtggatcggccagtgccacagcctggcagctctgatcaggaaagtgaggaacagcaacaattccggaacattttcaagcagatagcaggagatgacatggagatctgtgcagatgagctcaagaaggtccttaacacagtcgtgaacaaacacaaggacctgaagacacacgggttcacactggagtcctgccgtagcatgattgcgctcatggatacagatggctctggaaagctcaacctgcaggagttccaccacctctggaacaagattaaggcctggcagaaaattttcaaacactatgacacagaccagtccggcaccatcaacagctacgagatgcgaaatgcagtcaacgacgcaggattccacctcaacaaccagctctatgacatcattaccatgcggtacgcagacaaacacatgaacatcgactttgacagtttcatctgctgcttcgttaggctggagggcatgttcagagcttttcatgcatttgacaaggatggagatggtatcatcaagctcaacgttct

SEQ ID NO: 3115 - DNA, 563 bp, Homo sapiens
  source 1..563: mol_type = unassigned DNA; mol_type = unassigned DNA
cgggaacaagcagcacctgcagaaggacttcttcctgtacaacgcctccaaggccaggagcaaaacctacatcaacatgcgggaggtgtcccagcgcttccgcctgcctcccagcgagtacgtcatcgtgccctccacctacgagccccaccaggagggggaattcatcctccgggtcttctctgaaaagaggaacctctctgaggaagttgaaaataccatctccgtggatcggccagtgaaaaagaaaaaaaccaagcccatcatcttcgtttcggacagagcaaacagcaacaaggagctgggtgtggaccaggagtcagaggagggcaaaggcaaaacaagccctgataagcaaaagcagtccccacagttttcctttgtgcctccacagccacagcctggcagctctgatcaggaaagtgaggaacagcaacaattccggaacattttcaagcagatagcaggagatgacatggagatctgtgcagatgagctcaagaaggtccttaacacagtcgtgaacaaacacaaggacctgaagacacacgggttcacactgg

SEQ ID NO: 3116 - DNA, 1271 bp, Homo sapiens
  source 1..1271: mol_type = unassigned DNA; mol_type = unassigned DNA
cataatcctgaccctgagccagtgccaggtctccaagtgccttctgaatgaccacaggcgattggttttagtggtaggtgtgtggggatctgttctggtcatctggatgctggtcatcggtgtgcagtattgatcaggacctgcaaacccaaaagcttatgggagctggcacgtcacccacagcctggcagctctgatcaggaaagtgaggaacagcaacaattccggaacattttcaagcagatagcaggagatgacatggagatctgtgcagatgagctcaagaaggtccttaacacagtcgtgaacaaacacaaggacctgaagacacacgggttcacactggagtcctgccgtagcatgattgcgctcatggatacagatggctctggaaagctcaacctgcaggagttccaccacctctggaacaagattaaggcctggcagaaaattttcaaacactatgacacagaccagtccggcaccatcaacagctacgagatgcgaaatgcagtcaacgacgcaggattccacctcaacaaccagctctatgacatcattaccatgcggtacgcagacaaacacatgaacatcgactttgacagtttcatctgctgcttcgttaggctggagggcatgttcagagcttttcatgcatttgacaaggatggagatggtatcatcaagctcaacgttctggagtggctgcagctcaccatgtatgcctgaaccaggctggcctcatccaaagccatgcaggatcactcaggatttcagtttcaccctctatttccaaagccatttacctcaaaggacccagcagctacacccctacaggcttccaggcacctcatcagtcatgctcctcctccattttaccccctacccatccttgatcggtcatgcctagcctgaccctttagtaaagcaatgaggtaggaagaacaaacccttgtccctttgccatgtggaggaaagtgcctgcctctggtccgagccgcctcggttctgaagcgagtgctcctgcttaccttgctctaggctgtctgcagaagcacctgccggtggcactcagcacctccttgtgctagagccctccatcaccttcacgctgtcccaccatgggccaggaaccaaaccagcactgggttctactgctgtggggtaaactaactcagtggaatagggctggttactttgggctgtccaactcataagtttggctgcattttgaaaaaagctgatctaaataaaggcatgtgtatggctgg

SEQ ID NO: 3117 - DNA, 1029 bp, Homo sapiens
  source 1..1029: mol_type = unassigned DNA; mol_type = unassigned DNA
ataatcctgaccctgagccagtgccaggtctccaagtgccttctgaatgaccacaggcgattggttttagtggtaggtgtgtggggatctgttctggtcatctggatgctggtcatcggtgtgcagtattgatcaggacctgcaaacccaaaagcttatgggagctggcacgtcacaaaaagaaaaaaaccaagcccatcatcttcgtttcggacagagcaaacagcaacaaggagctgggtgtggaccaggagtcagaggagggcaaaggcaaaacaagccctgataagcaaaagcagtccccacagccacagcctggcagctctgatcaggaaagtgaggaacagcaacaattccggaacattttcaagcagatagcaggagatgacatggagatctgtgcagatgagctcaagaaggtccttaacacagtcgtgaacaaacacaaggacctgaagacacacgggttcacactggagtcctgccgtagcatgattgcgctcatggatacagatggctctggaaagctcaacctgcaggagttccaccacctctggaacaagattaaggcctggcagaaaattttcaaacactatgacacagaccagtccggcaccatcaacagctacgagatgcgaaatgcagtcaacgacgcaggattccacctcaacaaccagctctatgacatcattaccatgcggtacgcagacaaacacatgaacatcgactttgacagtttcatctgctgcttcgttaggctggagggcatgttcagagcttttcatgcatttgacaaggatggagatggtatcatcaagctcaacgttctggagtggctgcagctcaccatgtatgcctgaaccaggctggcctcatccaaagccatgcaggatcactcaggatttcagtttcaccctctatttccaaagccatttacctcaaaggacccagcagctacacccctacaggcttccaggcacctcatcagtcatgctcctcctccattttaccccctacccatccttgatc

SEQ ID NO: 3118 - DNA, 915 bp, Homo sapiens
  source 1..915: mol_type = unassigned DNA; mol_type = unassigned DNA
cagtgccaggtctccaagtgccttctgaatgaccacaggcgattggttttagtggtaggtgtgtggggatctgttctggtcatctggatgctggtcatcggtgtgcagtattgatcaggacctgcaaacccaaaagcttatgggagctggcacgtcacccacagcctggcagctctgatcaggaaagtgaggaacagcaacaattccggaacattttcaagcagatagcaggagatgacatggagatctgtgcagatgagctcaagaaggtccttaacacagtcgtgaacaaacacaaggacctgaagacacacgggttcacactggagtcctgccgtagcatgattgcgctcatggatacagatggctctggaaagctcaacctgcaggagttccaccacctctggaacaagattaaggcctggcagaaaattttcaaacactatgacacagaccagtccggcaccatcaacagctacgagatgcgaaatgcagtcaacgacgcaggattccacctcaacaaccagctctatgacatcattaccatgcggtacgcagacaaacacatgaacatcgactttgacagtttcatctgctgcttcgttaggctggagggcatgttcagagcttttcatgcatttgacaaggatggagatggtatcatcaagctcaacgttctggaggctgtctgcagaagcacctgccggtggcactcagcacctccttgtgctagagccctccatcaccttcacgctgtcccaccatgggccaggaaccaaaccagcactgggttctactgctgtggggtaaactaactcagtggaatagggctggttactttgggctgtccaactcataagtttggctgcattttgaaaaaagctgatctaaataaaggcatgtgtatggctggtc

SEQ ID NO: 3119 - DNA, 555 bp, Homo sapiens
  source 1..555: mol_type = unassigned DNA; mol_type = unassigned DNA
tgaccacaggcgattggttttagtggtaggtgtgtggggatctgttctggtcatctggatgctggtcatcggtgtgcagtattgatcaggacctgcaaacccaaaagcttatgggagctggcacgtcaccccatcatcttcgtttcggacagagcaaacagcaacaaggagctgggtgtggaccaggagtcagaggagggcaaaggcaaaacaagccctgataagcaaaagcagtccccacaggtgtctgggcatgtggcatgggtggggtggccagcacgctacaggggcttcctatgcgcttgggatacacaggggctggaggcttcccaggagtttgtcttgaacatctggaggtttgaatttgtcccactgaccttttctttcagcaagttcccctgaaatttgggctgctgcttgggtgaatatcccaggatgggggttccattctaggagtggactggcaggctgagcctcccatggagctgatccagccaggatacagagaaggggaggcaaaggctgagacagaaccagcttgagagcggaggcgca

SEQ ID NO: 3120 - DNA, 1237 bp, Homo sapiens
  source 1..1237: mol_type = unassigned DNA; mol_type = unassigned DNA
cacaggcgattggttttagtggtaggtgtgtggggatctgttctggtcatctggatgctggtcatcggtgtgcagtattgatcaggacctgcaaacccaaaagcttatgggagctggcacgtcacaaaaagaaaaaaaccaagccacagcctggcagctctgatcaggaaagtgaggaacagcaacaattccggaacattttcaagcagatagcaggagatgacatggagatctgtgcagatgagctcaagaaggtccttaacacagtcgtgaacaaacacaaggacctgaagacacacgggttcacactggagtcctgccgtagcatgattgcgctcatggatacagatggctctggaaagctcaacctgcaggagttccaccacctctggaacaagattaaggcctggcagaaaattttcaaacactatgacacagaccagtccggcaccatcaacagctacgagatgcgaaatgcagtcaacgacgcaggattccacctcaacaaccagctctatgacatcattaccatgcggtacgcagacaaacacatgaacatcgactttgacagtttcatctgctgcttcgttaggctggagggcatgttcagagcttttcatgcatttgacaaggatggagatggtatcatcaagctcaacgttctggagtggctgcagctcaccatgtatgcctgaaccaggctggcctcatccaaagccatgcaggatcactcaggatttcagtttcaccctctatttccaaagccatttacctcaaaggacccagcagctacacccctacaggcttccaggcacctcatcagtcatgctcctcctccattttaccccctacccatccttgatcggtcatgcctagcctgaccctttagtaaagcaatgaggtaggaagaacaaacccttgtccctttgccatgtggaggaaagtgcctgcctctggtccgagccgcctcggttctgaagcgagtgctcctgcttaccttgctctaggctgtctgcagaagcacctgccggtggcactcagcacctccttgtgctagagccctccatcaccttcacgctgtcccaccatgggccaggaaccaaaccagcactgggttctactgctgtggggtaaactaactcagtggaatagggctggttactttgggctgtccaactcataagtttggctgcattttgaaaaaagctgatctaaataaaggcatgtgtatggctgg

SEQ ID NO: 3121 - DNA, 711 bp, Homo sapiens
  source 1..711: mol_type = unassigned DNA; mol_type = unassigned DNA
tctgttctggtcatctggatgctggtcatcggtgtgcagtattgatcaggacctgcaaacccaaaagcttatgggagctggcacgtcacaaaaagaaaaaaaccaagcccatcatcttcgtttcggacagagcaaacagcaacaaggagctgggtgtggaccaggagtcagaggagggcaaaggcaaaacaagccctgataagcaaaagcagtccccacaggtgtctgggcatgtggcatgggtggggtggccagcacgctacaggggcttcctatgcgcttgggatacacaggggctggaggcttcccaggagtttgtcttgaacatctggagccacagcctggcagctctgatcaggaaagtgaggaacagcaacaattccggaacattttcaagcagatagcaggagatgacatggagatctgtgcagatgagctcaagaaggtccttaacacagtcgtgaacaaacacaaggacctgaagacacacgggttcacactggagtcctgccgtagcatgattgcgctcatggatacagatggctctggaaagctcaacctgcaggagttccaccacctctggaacaagattaaggcctggcagaaaattttcaaacactatgacacagaccagtccggcaccatcaacagctacgagatgcgaaatgcagtcaacgacgcaggattccacctcaacaaccagctctatga

SEQ ID NO: 3122 - DNA, 734 bp, Homo sapiens
  source 1..734: mol_type = unassigned DNA; mol_type = unassigned DNA
aaaaaaaccaagcccatcatcttcgtttcggacagagcaaacagcaacaaggagctgggtgtggaccaggagtcagaggagggcaaaggcaaaacaagccctgataagcaaaagcagtccccacagccacagcctggcagctctgatcaggaaagtgaggaacagcaacaattccggaacattttcaagcagatagcaggagatgacatggagatctgtgcagatgagctcaagaaggtccttaacacagtcgtgaacaaacacaaggacctgaagacacacgggttcacactggagtcctgccgtagcatgattgcgctcatggatccctgacctccctcctccagacagatggctctggaaagctcaacctgcaggagttccaccacctctggaacaagattaaggcctggcagatgcgaaatgcagtcaacgacgcaggattccacctcaacaaccagctctatgacatcattaccatgcggtacgcagacaaacacatgaacatcgactttgacagtttcatctgctgcttcgttaggctggagggcatgttcagagcttttcatgcatttgacaaggatggagatggtatcatcaagctcaacgttctggagtggctgcagctcaccatgtatgcctgaaccaggctggcctcatccaaagccatgcaggatcactcaggatttcagtttcaccctctatttccaaagccatttacctcaaaggaccca

SEQ ID NO: 3123 - DNA, 593 bp, Homo sapiens
  source 1..593: mol_type = unassigned DNA; mol_type = unassigned DNA
agtccccacagccacagcctggcagctctgatcaggaaagtgaggaacagcaacaattccggaacattttcaagcagatagcaggagatgacatggagatctgtgcagatgagctcaagaaggtccttaacacagtcgtgaacaaacacaaggacctgaagacacacgggttcacactggagtcctgccgtagcatgattgcgctcatggatacagatggctctggaaagctcaacctgcaggagttccaccacctctggaacaagattaaggcctggcagatgcgaaatgcagtcaacgacgcaggattccacctcaacaaccagctctatgacatcattaccatgcggtacgcagacaaacacatgaacatcgactttgacagtttcatctgctgcttcgttaggctggagggcatgttcagagcttttcatgcatttgacaaggatggagatggtatcatcaagctcaacgttctggagtggctgcagctcaccatgtatgcctgaaccaggctggcctcatccaaagccatgcaggatcactcaggatttcagtttcaccctctatttccaaagccatttacctcaaag

SEQ ID NO: 3124 - DNA, 1934 bp, Homo sapiens
  source 1..1934: mol_type = unassigned DNA; mol_type = unassigned DNA
ttcagcaagttcccctgaaatttgggctgctgcttgggtgaatatcccaggatgggggttccattctaggagtggactggcaggctgagcctcccatggagctgatccagccaggatacagagaaggggaggcaaaggctgagacagaaccagcttgagagcggaggcgcaactcttgtctcctggtggccttgagcatttcacaatagggggataaaggataggagcagaaaagtggggctgacttcagaaatggggtcctctagagctcacgggagggtgttagattggagtgggagcttagtggaggtgagccttagaggcaaaagtctccagaccaatccagggcccctcttctatccgggggcccctcttctatccagggcccctcttctgtctgggagcccctcttctatctggggcctcatgcagtggggcctaggggaggttctctgaggacttggccttgatgacagggtggctggaggaatcagaacggtcagaccttctttgacctgcgggcacctttagttggaatggtcaggcctgggatggtggagggggctcttgcaggtggggactggggtggcggggaggaggctgtatggccgccatatctcctttggctgggggcgtcagggctggagaggtgtgaagagtccctgaggcctcgatgcatctcactccagctcaccaggtctgcatttgcccgtccccagctcctgctgccacctccggccgttttaggcacttggctcccttggcccagaggagcttgcctcacaggcctgtgcacctctgacccctgtgaaccagttttcctttgtgcctccacagccacagcctggcagctctgatcaggaaagtgaggaacagcaacaattccggaacattttcaagcagatagcaggagatgacatggagatctgtgcagatgagctcaagaaggtccttaacacagtcgtgaacaaacacaaggacctgaagacacacgggttcacactggagtcctgccgtagcatgattgcgctcatggatacagatggctctggaaagctcaacctgcaggagttccaccacctctggaacaagattaaggcctggcagaaaattttcaaacactatgacacagaccagtccggcaccatcaacagctacgagatgcgaaatgcagtcaacgacgcaggattccacctcaacaaccagctctatgacatcattaccatgcggtacgcagacaaacacatgaacatcgactttgacagtttcatctgctgcttcgttaggctggagggcatgttcagagcttttcatgcatttgacaaggatggagatggtatcatcaagctcaacgttctggagtggctgcagctcaccatgtatgcctgaaccaggctggcctcatccaaagccatgcaggatcactcaggatttcagtttcaccctctatttccaaagccatttacctcaaaggacccagcagctacacccctacaggcttccaggcacctcatcagtcatgctcctcctccattttaccccctacccatccttgatcggtcatgcctagcctgaccctttagtaaagcaatgaggtaggaagaacaaacccttgtccctttgccatgtggaggaaagtgcctgcctctggtccgagccgcctcggttctgaagcgagtgctcctgcttaccttgctctaggctgtctgcagaagcacctgccggtggcactcagcacctccttgtgctagagccctccatcaccttcacgctgtcccaccatgggccaggaaccaaaccagcactgggttctactgctgtggggtaaactaactcagtggaatagggctggttactttgggctgtccaactcataagtttggctgcattttgaaaaaagctgatctaaataaaggcatgtgtatggctggtcc

SEQ ID NO: 3125 - DNA, 385 bp, Homo sapiens
  source 1..385: mol_type = unassigned DNA; mol_type = unassigned DNA
gacatggagatctgtgcagatgagctcaagaaggtccttaacacagtcgtgaacaaacacaaggacctgaagacacacgggttcacactggagtcctgccgtagcatgattgcgctcatggatatggctctggaaagctcaacctgcaggagttccaccacctctggaacaagattaaggcctggcagaaaattttcaaacactatgacacagaccagtccggcaccatcaacagctacgagatgcgaaatgcagtcaacgacgcaggattccacctcaacaaccagctctatgacatcattaccatgcggtacgcagacaaacacatgaacatcgactttgacagtttcatctgctgcttcgttaggctggagggcatgttcag

SEQ ID NO: 3126 - DNA, 711 bp, Homo sapiens
  source 1..711: mol_type = unassigned DNA; mol_type = unassigned DNA
aaaattttcaaacactatgacacagaccagtccggcaccatcaacagctacgagatgcgaaatgcagtcaacgacgcaggattccacctcaacaaccagctctatgacatcattaccatgcggtacgcagacaaacacatgaacatcgactttgacagtttcatctgctgcttcgttaggctggagggcatgttcagagcttttcatgcatttgacaaggatggagatggtatcatcaagctcaacgttctggagtggctgcagctcaccatgtatgcctgaaccaggctggcctcatccaaagccatgcaggatcactcaggatttcagtttcaccctctatttccaaagccatttacctcaaaggacccagcagctacacccctacaggcttccaggcacctcatcagtcatgctcctcctccattttaccccctacccatccttgatcggtcatgcctagcctgaccctttagtaaagcaatgaggctgtctgcagaagcacctgccggtggcactcagcacctccttgtgctagagccctccatcaccttcacgctgtcccaccatgggccaggaaccaaaccagcactgggttctactgctgtggggtaaactaactcagtggaatagggctggttactttgggctgtccaactcataagtttggctgcattttgaaaaaagctgatctaaataaaggcatgtgta

SEQ ID NO: 3127 - DNA, 598 bp, Homo sapiens
  source 1..598: mol_type = unassigned DNA; mol_type = unassigned DNA
gattccacctcaacaaccagctctatgacatcattaccatgcggtacgcagacaaacacatgaacatcgactttgacagtttcatctgctgcttcgttaggctggagggcatgttcagagcttttcatgcatttgacaaggatggagatggtatcatcaagctcaacgttctggagtggctgcagctcaccatgtatgcctgaaccaggctggcctcatccaaagccatgcaggatcactcaggatttcagtttcaccctctatttccaaagccatttacctcaaaggacccagcagctacacccctacaggcttccaggcacctcatcagtcatgctcctcctccattttaccccctacccatccttgatcggtcatgcctagcctgaccctttagtaaagcaatgagcgagtgctcctgcttaccttgctctaggctgtctgcagaagcacctgccggtggcactcagcacctccttgtgctagagccctccatcaccttcacgctgtcccaccatgggccaggaaccaaaccagcactgggttctactgctgtggggtaaactaactcagtggaatagggctggttactttgggc

SEQ ID NO: 3128 - DNA, 1291 bp, Homo sapiens
  source 1..1291: mol_type = unassigned DNA; mol_type = unassigned DNA
cataatcctgaccctgagccagtgccaggtctccaagtgccttctgaatgaccacaggcgattggttttagtggtaggtgtgtggggatctgttctggtcatctggatgctggtcatcggtgtgcagtattgatcaggacctgcaaacccaaaagcttatgggagctggcacgtcacgtgagtagacctccacagccacagcctggcagctctgatcaggaaagtgaggaacagcaacaattccggaacattttcaagcagatagcaggagatgacatggagatctgtgcagatgagctcaagaaggtccttaacacagtcgtgaacaaacacaaggacctgaagacacacgggttcacactggagtcctgccgtagcatgattgcgctcatggatacagatggctctggaaagctcaacctgcaggagttccaccacctctggaacaagattaaggcctggcagaaaattttcaaacactatgacacagaccagtccggcaccatcaacagctacgagatgcgaaatgcagtcaacgacgcaggattccacctcaacaaccagctctatgacatcattaccatgcggtacgcagacaaacacatgaacatcgactttgacagtttcatctgctgcttcgttaggctggagggcatgttcagagcttttcatgcatttgacaaggatggagatggtatcatcaagctcaacgttctggagtggctgcagctcaccatgtatgcctgaaccaggctggcctcatccaaagccatgcaggatcactcaggatttcagtttcaccctctatttccaaagccatttacctcaaaggacccagcagctacacccctacaggcttccaggcacctcatcagtcatgctcctcctccattttaccccctacccatccttgatcggtcatgcctagcctgaccctttagtaaagcaatgaggtaggaagaacaaacccttgtccctttgccatgtggaggaaagtgcctgcctctggtccgagccgcctcggttctgaagcgagtgctcctgcttaccttgctctaggctgtctgcagaagcacctgccggtggcactcagcacctccttgtgctagagccctccatcaccttcacgctgtcccaccatgggccaggaaccaaaccagcactgggttctactgctgtggggtaaactaactcagtggaatagggctggttactttgggctgtccaactcataagtttggctgcattttgaaaaaagctgatctaaataaaggcatgtgtatggctggtc

SEQ ID NO: 3129 - DNA, 3172 bp, Homo sapiens
  source 1..3172: mol_type = unassigned DNA; mol_type = unassigned DNA
cactctctttctctctccctctggcatgcatgctgctggtaggagacccccaagtcaacattgcttcagaaatcctttagcactcatttctcaggagaacttatggcttcagaatcacagctcggtttttaagatggacataacctgtacgaccttctgatgggctttcaactttgaactggatgtggacacttttctctcagatgacagaattactccaacttcccctttgcagttgcttcctttccttgaaggtagctgtatcttattttctttaaaaagctttttcttccaaagccacttgccatgccgaccgtcattagcgcatctgtggctccaaggacagcggctgagccccggtccccagggccagttcctcacccggcccagagcaaggccactgaggctgggggtggaaacccaagtggcatctattcagccatcatcagccgcaattttcctattatcggagtgaaagagaagacattcgagcaacttcacaagaaatgtctagaaaagaaagttctttatgtggaccctgagttcccaccggatgagacctctctcttttatagccagaagttccccatccagttcgtctggaagagacctccggaaatttgcgagaatccccgatttatcattgatggagccaacagaactgacatctgtcaaggagagctaggggactgctggtttctcgcagccattgcctgcctgaccctgaaccagcaccttcttttccgagtcataccccatgatcaaagtttcatcgaaaactacgcagggatcttccacttccagttctggcgctatggagagtgggtggacgtggttatagatgactgcctgccaacgtacaacaatcaactggttttcaccaagtccaaccaccgcaatgagttctggagtgctctgctggagaaggcttatgctaagctccatggttcctacgaagctctgaaaggtgggaacaccacagaggccatggaggacttcacaggaggggtggcagagttttttgagatcagggatgctcctagtgacatgtacaagatcatgaagaaagccatcgagagaggctccctcatgggctgctccattgatacaatcattccggttcagtatgagacaagaatggcctgcgggctggtcagaggtcacgcctactctgtcacggggctggatgaggtcccgttcaaaggtgagaaagtgaagctggtgcggctgcggaatccgtggggccaggtggagtggaacggttcttggagtgatagatggaaggactggagctttgtggacaaagatgagaaggcccgtctgcagcaccaggtcactgaggatggagagttctggatgtcctatgaggatttcatctaccatttcacaaagttggagatctgcaacctcacggccgatgctctgcagtctgacaagcttcagacctggacagtgtctgtgaacgagggccgctgggtacggggttgctctgccggaggctgccgcaacttcccagatactttctggaccaaccctcagtaccgtctgaagctcctggaggaggacgatgaccctgatgactcggaggtgatttgcagcttcctggtggccctgatgcagaagaaccggcggaaggaccggaagctaggggccagtctcttcaccattggcttcgccatctacgaggttcccaaagagatgcacgggaacaagcagcacctgcagaaggacttcttcctgtacaacgcctccaaggccaggagcaaaacctacatcaacatgcgggaggtgtcccagcgcttccgcctgcctcccagcgagtacgtcatcgtgccctccacctacgagccccaccaggagggggaattcatcctccgggtcttctctgaaaagaggaacctctctgaggaagttgaaaataccatctccgtggatcggccagtgaaaaagaaaaaaaccaagcccatcatcttcgtttcggacagagcaaacagcaacaaggagctgggtgtggaccaggagtcagaggagggcaaaggcaaaacaagccctgataagcaaaagcagtccccacagccacagcctggcagctctgatcaggaaagtgaggaacagcaacaattccggaacattttcaagcagatagcaggagatgacatggagatctgtgcagatgagctcaagaaggtccttaacacagtcgtgaacaaacacaaggacctgaagacacacgggttcacactggagtcctgccgtagcatgattgcgctcatggatacagatggctctggaaagctcaacctgcaggagttccaccacctctggaacaagattaaggcctggcagaaaattttcaaacactatgacacagaccagtccggcaccatcaacagctacgagatgcgaaatgcagtcaacgacgcaggattccacctcaacaaccagctctatgacatcattaccatgcggtacgcagacaaacacatgaacatcgactttgacagtttcatctgctgcttcgttaggctggagggcatgttcagagcttttcatgcatttgacaaggatggagatggtatcatcaagctcaacgttctggagtggctgcagctcaccatgtatgcctgaaccaggctggcctcatccaaagccatgcaggatcactcaggatttcagtttcaccctctatttccaaagccatttacctcaaaggacccagcagctacacccctacaggcttccaggcacctcatcagtcatgctcctcctccattttaccccctacccatccttgatcggtcatgcctagcctgaccctttagtaaagcaatgaggtaggaagaacaaacccttgtccctttgccatgtggaggaaagtgcctgcctctggtccgagccgcctcggttctgaagcgagtgctcctgcttaccttgctctaggctgtctgcagaagcacctgccggtggcactcagcacctccttgtgctagagccctccatcaccttcacgctgtcccaccatgggccaggaaccaaaccagcactgggttctactgctgtggggtaaactaactcagtggaatagggctggttactttgggctgtccaactcataagtttggctgcattttgaaaaaagctgatctaaataaaggcatgtgtatggctggtc

SEQ ID NO: 3130 - DNA, 534 bp, Homo sapiens
  source 1..534: mol_type = unassigned DNA; mol_type = unassigned DNA
gaacccggggaatgcgagcgccagcccccgccgcaggccagtcccagctggatctccggccagagcccgaggctgctgcgccgggcggctgcagcctccgctccagcgcccgcgccgtgccctgcatcccgggagcccggctggacccgcggcggctcggccggtgttccccctcccctccctggggcagcagccaccatgttctcgtgtgtgaagccctatgaggaccagaactactcagccctgaggcgggactgccggcgcaggaaggtgctcttcgaggaccccctcttccccgccactgacgactcactctactataagggcacgccggggcccgccgtcaggtgcacctaaaggctgacccggacaacctccaggccctgcataccctccacctccgggaccgaaatagccggcagcccagcaacctgccaggcactgtggccgtgcacattctcagcagcacctccctcatggctgtctgacacctgcccacctacctggctctgaccgttcccaccaccatctgca

SEQ ID NO: 3131 - DNA, 4397 bp, Homo sapiens
  source 1..4397: mol_type = unassigned DNA; mol_type = unassigned DNA
gaatgcgagcgccagcccccgccgcaggccagtcccagctggatctccggccagagcccgaggctgctgcgccgggcggctgcagcctccgctccagcgcccgcgccgtgccctgcatcccgggagcccggctggacccgcggcggctcggccggtgttccccctcccctccctggggcagcagccaccatgttctcgtgtgtgaagccctatgaggaccagaactactcagccctgaggcgggactgccggcgcaggaaggtgctcttcgaggaccccctcttccccgccactgacgactcactctactataagggcacgccggggcccgccgtcaggtggaagcgacccaagggcatctgcgaggacccccgcctctttgtggatggcatcagctcccacgacctgcaccagggccaggtgggcaactgctggtttgtggcagcctgctcgtcacttgcctcccgggagtcgctgtggcaaaaggtcatcccagactggaaggagcaggaatgggaccccgaaaagcccaacgcctacgcgggcatcttccacttccacttctggcgcttcggggaatgggtggacgtggtcatcgatgaccggctgcccacagtcaacaaccagctcatctactgccactccaactcccgcaatgagttttggtgcgccctagtggagaaggcctatgccaaactggcaggctgttaccaggccctggatggaggcaacacagcagacgcactggtggacttcacgggtggtgtttctgagcccatcgacctgaccgagggtgactttgccaacgatgagactaagaggaaccagctctttgagcgcatgttaaaggtgcacagccggggcggcctcatcagtgcctccatcaaggcagtgacagcagctgacatggaggcccgcctggcgtgcggcctggtaaagggccacgcatacgccgtcactgatgtgcgcaaggtgcgcctgggccacggcctactggccttcttcaagtcagagaagttggacatgatccgcctgcgcaacccctggggcgagcgggagtggaacgggccctggagtgacacctcggaggagtggcagaaagtgagcaagagtgagcgggagaagatgggtgtgaccgtgcaggacgacggtgagttctggatgaccttcgaggacgtgtgccggtacttcacggacatcatcaagtgccgcgtgatcaacacatcccacctgagcatccacaagacgtgggaggaggcccggctgcatggcgcctggacgctgcatgaggacccgcgacagaaccgcggtggcggctgcatcaaccacaaggacaccttcttccagaacccacagtacatcttcgaagtcaagaagccagaagatgaagtcctgatctgcatccagcagcggccaaagcggtctacgcgccgggagggcaagggtgagaacctggccattggctttgacatctacaaggtggaggagaaccgccagtaccgcatgcacagcctgcagcacaaggccgccagctccatctacatcaactcacgcagcgtcttcctgcgcaccgaccagcccgagggccgctatgtcatcatccccacaaccttcgagccaggccacactggcgagttcctgctccgagtcttcactgatgtgccctccaactgccgggagctgcgcctggatgagcccccacacacctgctggagctccctctgtggctacccccagctggtgacccaggtacatgtcctgggagctgctggcctcaaggactccccaacaggggctaactcttatgtgatcatcaagtgtgagggagacaaagtccgctcggctgtgcagaagggcacctccacaccagagtacaatgtgaaaggcatcttctaccgcaagaagctgagccagcccatcactgtacaggtctggaaccaccgagtgctgaaggatgaatttctgggccaggtgcacctaaaggctgacccggacaacctccaggccctgcataccctccacctccgggaccgaaatagccggcagcccagcaacctgccaggcactgtggccgtgcacattctcagcagcacctccctcatggctgtctgacacctgcccacctacctggctctgaccgttcccaccaccatctgcatgtccccactgggcctgagtctagcctgggagccaggatactggggtccttttcccactcttccactgacttgctgtgtgaccttaggaagtctctgcccctctctcagcctcagtgtcccgagggccccgaagcattccattctcgtggaggagtttccttgctgagatttcaaatagtcctccccacctcaactgtcaccactgctaagggactctatccattgagcacattttcctaaggccctgctgtctgccgaggagcgccaagaagatgtcacttgtttacacacgaactgccacatccccaagctccgttcttgcccctcgtgtcctaggcccaacccagcctcccagacctcactttccccatcagcaatacctggtgttctcccaccttgaaaggactcttggctcctgccgggttcctgctcaggctggaattgggaaaatatgcaggtgacatttgttcattctctaatcccatcctctcacccatccatttcctcactcagtggagatttgccaaatgaataaacgacacctttgaggccccaggtgaagcggggccctactccggcctctgccttgggcctcgcctctgtcctcaggtcctctcagaggcagatacctaggggagctgctgctgcctgctcattctagcttccgattccattcccagcccctgcgttaaggtccctggagaggtggcgtcagtgggggtgaggaagggcatcttcctgactcctctgcccagtgctggaaggagcatgcctgggttagtgggccaggggccaggcagctgggggcctttggggaccagaaggggagatgtgctcccagagcctctctgctgtaagaccccagcttttcctggaagatgggactctggggtgtgtggtgctcaccagagtcaggccacccactgggctcggcaggagatagggagccccatcacctgaccacagccccccaccaacattcccccaaaatgcagcctaggaggccgcagtgctcttcttcctgcccagaccaaaatgttccttttagtcctcaatgttttatattctttttgttttgaaaatctcaattttaatcaggggttttaaaagaaaattgaaagcctgaacctccatttttcttcttggctccagttttgctggtcctctggagaactcttcgtgagcactggtgccgtgacccacttgggatctctgctgtgcccttctcgggcttccagaccaggtgtagcaaatgaaaaagtgcagttaattcaagaacaggaatccctgtgtccttgctgggatttccttttgggaacctgactttccgactccagatcctgctgtctggatcagtgttctggctggaggtgctggattctctgattttgcctcctcactctgtgtctggctttgctcctgggtcttggccctgggccatatgaggggccaggaaatgaacgacaaggaggataagagtgttctttcttgaaagccgggacttcccctcaagaacctgggcctggggccgggactctgcatgactgggagcaagtcacttaaacctcctgtgcctcgatttcccccttctacaaagtggggccaatgattcttgtgtgtcagcactgttactaccgagtgctgagtaagggcaaaataatacccctttctctatgtatctctgtatgcacacgcactatatatatatatatatatatatatacattcatgtaatcaccacttctcgatgtctatttcaaatcaaggctcctgagtagggggtgaagtgagccagcttgcacctcaggctaacacataggactttgctcagccatgtcccctgggatacaggggcacaccaggaccaagtggcagacctgtgggcttcagcctcggggccggggcatgcctgccaccccctgacaaaaacaggttccacagtgctacccttgcttcctgccccttgaggtgggccaggctggctcctggctatgcagggatctctggtccccaggagaccttgggggccaggcaggtaaggatcaggggtgataggggagagcaattactttgttcactgtatgcacccgcgggggcctgggagtccccatttgcaggtgggtagggcctccagcccacaccacccagacctaggcttccctcttctcaggatccaccacagggttaggggacaggaagcctgttctattctcaataaatcttacaaaattccaaaaa

SEQ ID NO: 3132 - DNA, 597 bp, Homo sapiens
  source 1..597: mol_type = unassigned DNA; mol_type = unassigned DNA
agtcccagctggatctccggccagagcccgaggctgctgcgccgggcggctgcagcctccgctccagcgcccgcgccgtgccctgcatcccgggagcccggctggacccgcggcggctcggccggttgtctctccggtggggagtgagcgagcacacagcccccaccccaccccgggtgagagagaatgtcctgcacagggacgcccagctgtatctacctgctgtcagcactttctctgcaggacctggtgctggactgggagccccgaggtgttccccctcccctccctggggcagcagccaccatgttctcgtgtgtgaagccctatgaggaccagaactactcagccctgaggcgggactgccggcgcaggaaggtgctcttcgaggaccccctcttccccgccactgacgactcactctactataagggcacgccggggcccgccgtcaggtggaagcgacccaagggcatctgcgaggacccccgcctctttgtggatggcatcagctcccacgacctgcaccagggccaggtgggcaactgctggtttgtggcagcctgctcgtcacttgcctcccgggagtcgctgtgg

SEQ ID NO: 3133 - DNA, 2333 bp, Homo sapiens
  source 1..2333: mol_type = unassigned DNA; mol_type = unassigned DNA
agctggatctccggccagagcccgaggctgctgcgccgggcggctgcagcctccgctccagcgcccgcgccgtgccctgcatcccgggagcccggctggacccgcggcggctcggccgatgagaattctgaagcacaaagaggttaactgctttgcacctcgctggcctcagtctccccatctgaggacgggtgttccccctcccctccctggggcagcagccaccatgttctcgtgtgtgaagccctatgaggaccagaactactcagccctgaggcgggactgccggcgcaggaaggtgctcttcgaggaccccctcttccccgccactgacgactcactctactataagggcacgccggggcccgccgtcaggtggaagcgacccaagggcatctgcgaggacccccgcctctttgtggatggcatcagctcccacgacctgcaccagggccaggtgggcaactgctggtttgtggcagcctgctcgtcacttgcctcccgggagtcgctgtggcaaaaggtcatcccagactggaaggagcaggaatgggaccccgaaaagcccaacgcctacgcgggcatcttccacttccacttctggcgcttcggggaatgggtggacgtggtcatcgatgaccggctgcccacagtcaacaaccagctcatctactgccactccaactcccgcaatgagttttggtgcgccctagtggagaaggcctatgccaaactggcaggctgttaccaggccctggatggaggcaacacagcagacgcactggtggacttcacgggtggtgtttctgagcccatcgacctgaccgagggtgactttgccaacgatgagactaagaggaaccagctctttgagcgcatgttaaaggtgcacagccggggcggcctcatcagtgcctccatcaaggcagtgacagcagctgacatggaggcccgcctggcgtgcggcctggtaaagggccacgcatacgccgtcactgatgtgcgcaaggtgcgcctgggccacggcctactggccttcttcaagtcagagaagttggacatgatccgcctgcgcaacccctggggcgagcgggagtggaacgggccctggagtgacacctcggaggagtggcagaaagtgagcaagagtgagcgggagaagatgggtgtgaccgtgcaggacgacggtgagttctggatgaccttcgaggacgtgtgccggtacttcacggacatcatcaagtgccgcgtgatcaacacatcccacctgagcatccacaagacgtgggaggaggcccggctgcatggcgcctggacgctgcatgaggacccgcgacagaaccgcggtggcggctgcatcaaccacaaggacaccttcttccagaacccacagtacatcttcgaagtcaagaagccagaagatgaagtcctgatctgcatccagcagcggccaaagcggtctacgcgccgggagggcaagggtgagaacctggccattggctttgacatctacaaggtggaggagaaccgccagtaccgcatgcacagcctgcagcacaaggccgccagctccatctacatcaactcacgcagcgtcttcctgcgcaccgaccagcccgagggccgctatgtcatcatccccacaaccttcgagccaggccacactggcgagttcctgctccgagtcttcactgatgtgccctccaactgccgggagctgcgcctggatgagcccccacacacctgctggagctccctctgtggctacccccagctggtgacccaggtacatgtcctgggagctgctggcctcaaggactccccaacaggggctaactcttatgtgatcatcaagtgtgagggagacaaagtccgctcggctgtgcagaagggcacctccacaccagagtacaatgtgaaaggcatcttctaccgcaagaagctgagccagcccatcactgtacaggtctggaaccaccgagtgctgaaggatgaatttctgggccaggtgcacctaaaggctgacccggacaacctccaggccctgcataccctccacctccgggaccgaaatagccggcagcccagcaacctgccaggcactgtggccgtgcacattctcagcagcacctccctcatggctgtctgacacctgcccacctacctggctctgaccgttcccaccaccatctgcatgtccccactgggcctgagtctagcctgggagccaggatactggggtccttttcccactcttccactgacttgctgtgtgaccttaggaagtctctgcccctctctcagcctcagtgtcccgagggccccgaagcatt

SEQ ID NO: 3134 - DNA, 2805 bp, Homo sapiens
  source 1..2805: mol_type = unassigned DNA; mol_type = unassigned DNA
agagcccgaggctgctgcgccgggcggctgcagcctccgctccagcgcccgcgccgtgccctgcatcccgggagcccggctggacccgcggcggctcggccggtgttccccctcccctccctggggcagcagccaccatgttctcgtgtgtgaagccctatgaggaccagaactactcagccctgaggcgggactgccggcgcaggaaggtgctcttcgaggaccccctcttccccgccactgacgactcactctactataagggcacgccggggcccgccgtcaggtggaagcgacccaagtacagtggccattcgctggcccctcacaggcctggctggggagatgcacggagaatggagaatgtccccaggcctgggagctcagggtgtccgtcctcctcgctcagggcccgggacctgggcatctgcgaggacccccgcctctttgtggatggcatcagctcccacgacctgcaccagggccaggtgggcaactgctggtttgtggcagcctgctcgtcacttgcctcccgggagtcgctgtggcaaaaggtcatcccagactggaaggagcaggaatgggaccccgaaaagcccaacgcctacgcgggcatcttccacttccacttctggcgcttcggggaatgggtggacgtggtcatcgatgaccggctgcccacagtcaacaaccagctcatctactgccactccaactcccgcaatgagttttggtgcgccctagtggagaaggcctatgccaaactggcaggctgttaccaggccctggatggaggcaacacagcagacgcactggtggacttcacgggtggtgtttctgagcccatcgacctgaccgagggtgactttgccaacgatgagactaagaggaaccagctctttgagcgcatgttaaaggtgcacagccggggcggcctcatcagtgcctccatcaaggcagtgacagcagctgacatggaggcccgcctggcgtgcggcctggtaaagggccacgcatacgccgtcactgatgtgcgcaaggtgcgcctgggccacggcctactggccttcttcaagtcagagaagttggacatgatccgcctgcgcaacccctggggcgagcgggagtggaacgggccctggagtgacacctcggaggagtggcagaaagtgagcaagagtgagcgggagaagatgggtgtgaccgtgcaggacgacggtgagttctggatgaccttcgaggacgtgtgccggtacttcacggacatcatcaagtgccgcgtgatcaacacatcccacctgagcatccacaagacgtgggaggaggcccggctgcatggcgcctggacgctgcatgaggacccgcgacagaaccgcggtggcggctgcatcaaccacaaggacaccttcttccagaacccacagtacatcttcgaagtcaagaagccagaagatgaagtcctgatctgcatccagcagcggccaaagcggtctacgcgccgggagggcaagggtgagaacctggccattggctttgacatctacaaggtggaggagaaccgccagtaccgcatgcacagcctgcagcacaaggccgccagctccatctacatcaactcacgcagcgtcttcctgcgcaccgaccagcccgagggccgctatgtcatcatccccacaaccttcgagccaggccacactggcgagttcctgctccgagtcttcactgatgtgccctccaactgccgggagctgcgcctggatgagcccccacacacctgctggagctccctctgtggctacccccagctggtgacccaggtacatgtcctgggagctgctggcctcaaggactccccaacaggggctaactcttatgtgatcatcaagtgtgagggagacaaagtccgctcggctgtgcagaagggcacctccacaccagagtacaatgtgaaaggcatcttctaccgcaagaagctgagccagcccatcactgtacaggtctggaaccaccgagtgctgaaggatgaatttctgggccaggtgcacctaaaggctgacccggacaacctccaggccctgcataccctccacctccgggaccgaaatagccggcagcccagcaacctgccaggcactgtggccgtgcacattctcagcagcacctccctcatggctgtctgacacctgcccacctacctggctctgaccgttcccaccaccatctgcatgtccccactgggcctgagtctagcctgggagccaggatactggggtccttttcccactcttccactgacttgctgtgtgaccttaggaagtctctgcccctctctcagcctcagtgtcccgagggccccgaagcattccattctcgtggaggagtttccttgctgagatttcaaatagtcctccccacctcaactgtcaccactgctaagggactctatccattgagcacattttcctaaggccctgctgtctgccgaggagcgccaagaagatgtcacttgtttacacacgaactgccacatccccaagctccgttcttgcccctcgtgtcctaggcccaacccagcctcccagacctcactttccccatcagcaatacctggtgttctcccaccttgaaaggactcttggctcctgccgggttcctgctcaggctggaattgggaaaatatgcaggtgacatttgttcattctctaatcccatcctctcacccatccatttcctcactcagtggagatttgccaaatgaataaacgacacctttgaggccccaggtgaagcggggccctactccgg

SEQ ID NO: 3135 - DNA, 542 bp, Homo sapiens
  source 1..542: mol_type = unassigned DNA; mol_type = unassigned DNA
ttcgaggaccccctcttccccgccactgacgactcactctactataagggcacgccggggcccgccgtcaggtggaagcgacccaagggcatctgcgaggacccccgcctctttgtggatggcatcagctcccacgacctgcaccagggccaggtgggcaactgctggtttgtggcagcctgctcgtcacttgcctcccgggagtcgctgtggcaaaaggtcatcccagactggaaggagcaggaatgggaccccgaaaagcccaacgcctacgcgggcatcttccacttccacttctggcgcttcggggaatgggtggacgtggtcatcgatgaccggctgcccacagtcaacaaccagctcatctactgccactccaactcccgcaatgagttttggtgcgccctagtggagaaggcctatgccaagtaggtgccagcagcaggcaggtgggtgggaggcccagacgggggtggcaccggatgggctcctcgtggtattccgttagccagggctttaggcacagagaagtgaggggctgg

SEQ ID NO: 3136 - DNA, 2564 bp, Homo sapiens
  source 1..2564: mol_type = unassigned DNA; mol_type = unassigned DNA
gtttggtggatgaggaaggggaagattactggtggttggggccgggccctgggaggctctgggcatctactgggcccccactgctcctccctcaggcctcagggccccttgcagccccttagccttcctgcattggaggccttgctgggcaccaggaggaggcatccttgagcatagccaggtggggtcacctatggccgcaccgcctggcctggaacctgaggccttccacgtgttgtgatgcccagtgtgtggtgacagtcagcatggcgggaccccatgtgcctgtcagaccttgagaacggaatgaagccaccgggccctgcagaggctgggtacatgctgagtccttggcatctgatgtgcctggccacgccgtggcactttgtttatactcttgtgctggtacattcattgcatgctagtgtcttgtgacatattgttgtgactttgccatgtgacgatcttcactagtgtgaccagaacacttttttcaggattgtcaggcaggtcctggcagctggtgatggcatttcgtggacaggtgctgtgacctctgcagatcctgatacttggttgtgctgttggagtcagaaaccccactgacattgttaccagggggattcctattgccctctattttttttgtttgtttgttttacagagggtcttgctctgtaacccagaccagagggcagtggtgctgtcatagctcattacagtctcaaactcctggactcaaacgatcctcccacctcagtctccctagtagttgggactataggtgaacaccaccatgcctggctaatttttaagttttttgtagagctggggtctcgctttgttgcccatgctgaccttgaacgtccagcttcaagtgttcctcccaccttggcctcccaaagcgctgggattacaggcatgagccactgcgcccagcctcctttaatagtttttattgagatataattcacagagcatgcaattcagccatgtaaagtatacaatctaatgacttttgtgtgatcagagtttatgcaaccatcaccacaatcaactgtagaacattttcatctccccaaaagaaacccactccctttaaccaccaccacccattcccattgacctcttcccttcagccctgggcaaacacgaatccgcttctgttattatagatttgcctgttccggacatttcatataaagggattccatcgtcccttccatggtggtgagggggaggcggggtgggccagggtgttgtagggtgtgtctccgcgtggcccagcccctcccgcctcctgcaggtggaggagaaccgccagtaccgcatgcacagcctgcagcacaaggccgccagctccatctacatcaactcacgcagcgtcttcctgcgcaccgaccagcccgagggccgctatgtcatcatccccacaaccttcgagccaggccacactggcgagttcctgctccgagtcttcactgatgtgccctccaactgccgggagctgcgcctggatgagcccccacacacctgctggagctccctctgtggctacccccagctggtgacccaggtacatgtcctgggagctgctggcctcaaggactccccaacaggggctaactcttatgtgatcatcaagtgtgagggagacaaagtccgctcggctgtgcagaagggcacctccacaccagagtacaatgtgaaaggcatcttctaccgcaagaagctgagccagcccatcactgtacaggtctggaaccaccgagtgctgaaggatgaatttctgggccaggtgcacctaaaggctgacccggacaacctccaggccctgcataccctccacctccgggaccgaaatagccggcagcccagcaacctgccaggcactgtggccgtgcacattctcagcagcacctccctcatggctgtctgacacctgcccacctacctggctctgaccgttcccaccaccatctgcatgtccccactgggcctgagtctagcctgggagccaggatactggggtccttttcccactcttccactgacttgctgtgtgaccttaggaagtctctgcccctctctcagcctcagtgtcccgagggccccgaagcattccattctcgtggaggagtttccttgctgagatttcaaatagtcctccccacctcaactgtcaccactgctaagggactctatccattgagcacattttcctaaggccctgctgtctgccgaggagcgccaagaagatgtcacttgtttacacacgaactgccacatccccaagctccgttcttgcccctcgtgtcctaggcccaacccagcctcccagacctcactttccccatcagcaatacctggtgttctcccaccttgaaaggactcttggctcctgccgggttcctgctcaggctggaattgggaaaatatgcaggtgacatttgttcattctctaatcccatcctctcacccatccatttcctcactcagtggagatttgccaaatgaataaacgacacctttgaggccccaggtgaagcggggccctactccgg

SEQ ID NO: 3137 - DNA, 2362 bp, Homo sapiens
  source 1..2362: mol_type = unassigned DNA; mol_type = unassigned DNA
actcagcccagtggccctctgagctgttccttcttgaccggcacacacagctcgcttcttcactttcttttccatccactgccggacccaagccagccttccagggagcagccatgccttacctctaccgggccccagggcctcaggcacacccggttcccaaggacgcccggatcacccactcctcaggccagagctttgagcaaatgaggcaggagtgcctgcagagaggcaccctgtttgaggatgcagacttcccagccagcaattcctccctgttctacagtgagaggccgcagatcccctttgtgtggaaacgaccaggggaaatcgtgaaaaacccagaattcattcttggaggggccaccaggactgatatctgccagggagagctgggagactgctggctattagccgccatcgcctcccttacgcttaatcaaaaagcactggccagagtcatcccccaggaccaaagctttggccctggttatgccgggatattccatttccagttctggcagcacagtgagtggctggacgtggtgatcgatgaccgcctgcccaccttcagggaccgcttggttttcctccactctgccgaccacaacgagttctggagcgccttgctggaaaaagcctacgccaagctaaatgggagctatgaagctctgaagggaggcagcgccatcgaggccatggaagacttcactgggggtgtggcagagaccttccaaactaaagaggcccccgagaacttctatgagattctagagaaggctttgaagagaggctccctgctgggctgcttcattgataccagaagtgctgcagaatctgaggcccggacgccgtttggtcttattaagggtcatgcctacagtgtaacgggaattgaccaggtaagcttccgaggccagagaatcgagctcatccgaatccggaacccttggggccaggttgagtggaacgggtcgtggagcgacagttctccggagtggcgttctgttggtccagctgagcagaagcgtctgtgtcacactgctctggatgatggggaattctggatggcatttaaggacttcaaggcccactttgataaagtggagatctgcaacctcactcccgatgccctggaggaagacgcgatccacaaatgggaggtgacggtccatcagggaagctgggttcgcggctccacggctgggggctgccgcaatttcctggataccttttggaccaatccacaaataaaattgtctctgactgagaaagatgaggggcaggaggagtgtagtttccttgtagccctgatgcagaaagatagaaggaaactcaagagatttggtgccaatgtgctgacaatcggctatgccatttatgagtgccctgacaaagacgaacacctgaacaaagacttcttcagataccacgcttctcgggccagaagcaagacgttcatcaacctgagagaagtctccgaccggttcaagctgccccctggggagtacatcctgattcccagcacttttgagccccaccaggaagctgatttctgtctgagaatcttttcagagaaaaaagccattacccgggatatggatggaaatgtagacattgaccttcctgagcctccaaagccaactccacctgaccaggagacagaggaggagcagcggtttcgggctctgtttgaacaagtcgctggtgaggacatggaggtgacagcagaggaacttgagtatgttttaaatgctgtgctgcaaaagaaaaaggacatcaaattcaagaagctaagcctgatctcctgtaaaaacatcatttccctgatggacaccagcggcaatgggaagctggagtttgatgaattcaaagtgttctgggacaagctgaagcagtggattaaccttttccttcggtttgatgctgacaagtccggcaccatgtctacctatgaactacggactgcactgaaagctgcaggctttcagctgagcagccacctcctgcagctgattgtgctcaggtatgcggatgaggagctccagctggacttcgatgacttcctcaactgcctggtccggctggagaatgcgagccgggtgttccaggctctcagtacaaagaacaaggagttcattcatctcaatataaatgagttcatccatttgacaatgaacatctgaggctgccttgtagagatgcagcctgcccagctgaatcttggcttctggaccttgaccttcagaacttctcttggtgtggaaccattacgcccagggttcactcccctctcatcgtccggccttctcccttcatcttgatctgggaagaatgaaatgaactcagctacactctctga

SEQ ID NO: 3138 - DNA, 2484 bp, Homo sapiens
  source 1..2484: mol_type = unassigned DNA; mol_type = unassigned DNA
tcttgaccggcacacacagctcgcttcttcactttcttttccatccactgccggacccaagccagccttccagggagcagccatgccttacctctaccgggccccagggcctcaggcacacccggttcccaaggacgcccggatcacccactcctcaggccagagctttgagcaaatgaggcaggagtgcctgcagagaggcaccctgtttgaggatgcagacttcccagccagcaattcctccctgttctacagtgagaggccgcagatcccctttgtgtggaaacgaccaggggaaatcgtgaaaaacccagaattcattcttggaggggccaccaggactgatatctgccagggagagctgggagactgctggctattagccgccatcgcctcccttacgcttaatcaaaaagcactggccagagtcatcccccaggaccaaagctttggccctggttatgccgggatattccatttccagttctggcagcacagtgagtggctggacgtggtgatcgatgaccgcctgcccaccttcagggaccgcttggttttcctccactctgccgaccacaacgagttctggagcgccttgctggaaaaagcctacgccaagctaaatgggagctatgaagctctgaagggaggcagcgccatcgaggccatggaagacttcactgggggtgtggcagagaccttccaaactaaagaggcccccgagaacttctatgagattctagagaaggctttgaagagaggctccctgctgggctgcttcattgataccagaagtgctgcagaatctgaggcccggacgccgtttggtcttattaagggtcatgcctacagtgtaacgggaattgaccaggtaagcttccgaggccagagaatcgagctcatccgaatccggaacccttggggccaggttgagtggaacgggtcgtggagcgacaggatggcatttaaggacttcaaggcccactttgataaagtggagatctgcaacctcactcccgatgccctggaggaagacgcgatccacaaatgggaggtgacggtccatcagggaagctgggttcgcggctccacggctgggggctgccgcaatttcctggataccttttggaccaatccacaaataaaattgtctctgactgagaaagatgaggggcaggaggagtgtagtttccttgtagccctgatgcagaaagatagaaggaaactcaagagatttggtgccaatgtgctgacaatcggctatgccatttatgagtgccctgacaaagacgaacacctgaacaaagacttcttcagataccacgcttctcgggccagaagcaagacgttcatcaacctgagagaagtctccgaccggttcaagctgccccctggggagtacatcctgattcccagcacttttgagccccaccaggaagctgatttctgtctgagaatcttttcagagaaaaaagccattacccgggatatggatggaaatgtagacattgaccttcctgagcctccaaagccaactccacctgaccaggagacagaggaggagcagcggtttcgggctctgtttgaacaagtcgctggtgaggacatggaggtgacagcagaggaacttgagtatgttttaaatgctgtgctgcaaaagaaaaaggacatcaaattcaagaagctaagcctgatctcctgtaaaaacatcatttccctgatggacaccagcggcaatgggaagctggagtttgatgaattcaaagtgttctgggacaagctgaagcagtggattaaccttttccttcggtttgatgctgacaagtccggcaccatgtctacctatgaactacggactgcactgaaagctgcaggctttcagctgagcagccacctcctgcagctgattgtgctcaggtatgcggatgaggagctccagctggacttcgatgacttcctcaactgcctggtccggctggagaatgcgagccgggtgttccaggctctcagtacaaagaacaaggagttcattcatctcaatataaatgagttcatccatttgacaatgaacatctgaggctgccttgtagagatgcagcctgcccagctgaatcttggcttctggaccttgaccttcagaacttctcttggtgtggaaccattacgcccagggttcactcccctctcatcgtccggccttctcccttcatcttgatctgggaagaatgaaatgaactcagctacactctctgattttgtgctactcctttgtaaagtcactgccttaagggggctgatggcgccacctgtgccttacatccaggttcaggcatcactagctttcccacactctactttccttatttccttccattaagaattactcagagttctaacgcacagaatcctgacttccatgtagctccagtcattgtgatcagacatcctttataaaacatgtttttataaatgtgtatgtggaat

SEQ ID NO: 3139 - DNA, 510 bp, Homo sapiens
  source 1..510: mol_type = unassigned DNA; mol_type = unassigned DNA
attcaagaagctaagcctgatctcctgtaaaaacatcatttccctgatggacaccagcggcaatgggaagctggagtttgatgaattcaaagtgttctgggacaagctgaagcagtggattaaccttttccttcggtttgatgctgacaagtccggcaccatgtctacctatgaactacggactgcactgaaagctgcaggctttcagctgagcagccacctcctgcagctgattgtgctcaggtatgcggatgaggagctccagctggacttcgatgacttcctcaactgcctggtccggctggagaatgcgagccttcatccatttgacaatgaacatctgaggctgccttgtagagatgcagcctgcccagctgaatcttggcttctggaccttgaccttcagaacttctcttggtgtggaaccattacgcccagggttcactcccctctcatcgtccggccttctcccttcatcttgatctgggaagaatgaaatgaactcagcta

SEQ ID NO: 3140 - DNA, 2173 bp, Homo sapiens
  source 1..2173: mol_type = unassigned DNA; mol_type = unassigned DNA
actcagcccagtggccctctgagctgttccttcttgaccggcacacacagctcgcttcttcactttcttttccatccactgccggacccaagccagccttccagggagcagccatgccttacctctaccgggccccagggcctcaggcacacccggttcccaaggacgcccggatcacccactcctcaggccagagctttgagcaaatgaggcaggagtgcctgcagagaggcaccctgtttgaggatgcagacttcccagccagcaattcctccctgttctacagtgagaggccgcagatcccctttgtgtggaaacgaccagggttctggcagcacagtgagtggctggacgtggtgatcgatgaccgcctgcccaccttcagggaccgcttggttttcctccactctgccgaccacaacgagttctggagcgccttgctggaaaaagcctacgccaagctaaatgggagctatgaagctctgaagggaggcagcgccatcgaggccatggaagacttcactgggggtgtggcagagaccttccaaactaaagaggcccccgagaacttctatgagattctagagaaggctttgaagagaggctccctgctgggctgcttcattgataccagaagtgctgcagaatctgaggcccggacgccgtttggtcttattaagggtcatgcctacagtgtaacgggaattgaccaggtaagcttccgaggccagagaatcgagctcatccgaatccggaacccttggggccaggttgagtggaacgggtcgtggagcgacagttctccggagtggcgttctgttggtccagctgagcagaagcgtctgtgtcacactgctctggatgatggggaattctggatggcatttaaggacttcaaggcccactttgataaagtggagatctgcaacctcactcccgatgccctggaggaagacgcgatccacaaatgggaggtgacggtccatcagggaagctgggttcgcggctccacggctgggggctgccgcaatttcctggataccttttggaccaatccacaaataaaattgtctctgactgagaaagatgaggggcaggaggagtgtagtttccttgtagccctgatgcagaaagatagaaggaaactcaagagatttggtgccaatgtgctgacaatcggctatgccatttatgagtgccctgacaaagacgaacacctgaacaaagacttcttcagataccacgcttctcgggccagaagcaagacgttcatcaacctgagagaagtctccgaccggttcaagctgccccctggggagtacatcctgattcccagcacttttgagccccaccaggaagctgatttctgtctgagaatcttttcagagaaaaaagccattacccgggatatggatggaaatgtagacattgaccttcctgagcctccaaagccaactccacctgaccaggagacagaggaggagcagcggtttcgggctctgtttgaacaagtcgctggtgaggacatggaggtgacagcagaggaacttgagtatgttttaaatgctgtgctgcaaaagaaaaaggacatcaaattcaagaagctaagcctgatctcctgtaaaaacatcatttccctgatggacaccagcggcaatgggaagctggagtttgatgaattcaaagtgttctgggacaagctgaagcagtggattaaccttttccttcggtttgatgctgacaagtccggcaccatgtctacctatgaactacggactgcactgaaagctgcaggctttcagctgagcagccacctcctgcagctgattgtgctcaggtatgcggatgaggagctccagctggacttcgatgacttcctcaactgcctggtccggctggagaatgcgagccgggtgttccaggctctcagtacaaagaacaaggagttcattcatctcaatataaatgagttcatccatttgacaatgaacatctgaggctgccttgtagagatgcagcctgcccagctgaatcttggcttctggaccttgaccttcagaacttctcttggtgtggaaccattacgcccagggttcactcccctctcatcgtccggccttctcccttcatcttgatctgggaagaatgaaatgaactcagctacactctctga

SEQ ID NO: 3141 - DNA, 2068 bp, Homo sapiens
  source 1..2068: mol_type = unassigned DNA; mol_type = unassigned DNA
gtggaagcgccgggccctgctgcgggggggagagccactgacgccgggaccgggaccgccgccgccgccgccaccatgctccatgcctgaccgtgactcgcatctcgccaggccagtgcatttcctcttctggctgtcatcggaattttcaagtgtcaagaccccactttgttcctgttgtcctggttccggctttgggaagcatgacctttcaggcctgctcagagacaccgcagtgcactttgtgcgttatcagccttacagagactctacggtcaggagtttttgtggcaatggaactgctggggtttcatctgcaaatgaaaaccatctggccagctgcttgggtcagatggaaaccagatgggagaagtcaggagcgggcagcgagcagcctggggcagcgtccctagtcacgtcatgtttccacttcctcttgccccctcgcctcccctgcctgcaaaacgattgttattaacccatcacctcctccaatgcccaggcagttccaggatacagggttctctcgcccaggccttggccagcccagaagatgtgacccagaacctagaaagagtgatcagcagctggactgtgccttggacctaatgaggcgcctgcctccccagcaaatcgagaaaaacctcagcgacctgatcgacctggtccccagtctatgtgaggatctcctgtcttctgttgaccagccactgaaaattgccagagacaaggtggtgggaaaggattaccttttgtgtgactacaacagagatggggactcctataggtcaccatggagtaacaagtatgaccctcccttggaggatggggccatgccgtcagctcggctgagaaagctggaggtggaagccaacaatgcctttgaccagtatcgagacctgtattttgaaggtggcgtctcatctgtctacctctgggatctggatcatggctttgctggagtgatcctcataaagaaggctggagatggatcaaagaagatcaaaggctgctgggattccatccacgtggtagaagtgcaggagaaatccagcggtcgcaccgcccattacaagttgacctccacggtgatgctgtggctgcagaccaacaaatctggctctggcaccatgaacctcggaggcagccttaccagacagatggagaaggatgaaactgtgagtgactgctccccacacatagccaacatcgggcgcctggtagaggtctgtgcagacttttgcagacaaatcaaaacaagaagctctgaagaatgacctggtggaggctttgaagagaaagcagcaatgctaaacctctgtttcatgctaaccagacacgccgtgcactcgttagattcctttcttagaaaactcgttttctgctcccttccctcgtcccttccctccccgacaggtcacataacagctgcatcattgaccgcacagcgccatctctccctgagaataaagccgatagccaccctcctccggctccgagcctgcttctgccacacctcgctctcagttctctccacatttccatagagaccgtgtggtttttgttcacccgggccccccgtcttcctccctgtccccccatttataggcataaaatccactgtctgccagcctcccttccctcccacctttttggtacattggtgtaaaaaatgtaaaacaaaaaaattttatgaactaactgtggtgtgtgaaagagagaagaaaaactggaaatcttattccgtgtgtgtttgggagttgcttggggttgggggtcgtggggacaggggacagctctgggagcagaggtggccctcggtgccgtcctgcgcagactctcccgtcccacggaggccgcggggtgggggctggggggggtgccgccgaccgttccgctcttccggccaggtgcttttctgtcaatttctatggaatgcaaaaggaggtttttgttttattttgtttttttgtaaagcttaagaaaaaaatctacatcttatacttgagcctccatacttaaaaaaagaaaagaaaagaaatcaataaaaagaaactggggcgcagtt

SEQ ID NO: 3142 - DNA, 1568 bp, Homo sapiens
  source 1..1568: mol_type = unassigned DNA; mol_type = unassigned DNA
gagtgatcagcagctggactgtgccttggacctaatgaggcgcctgcctccccagcaaatcgagaaaaacctcagcgacctgatcgacctggtccccagtctatgtgaggatctcctgtcttctgttgaccagccactgaaaattgccagagacaaggtggtgggaaaggattaccttttgtgtgactacaacagagatggggactcctataggtcaccatggagtaacaagtatgaccctcccttggaggatggggccatgccgtcagctcggctgagaaagctggaggtggaagccaacaatgcctttgaccagtatcgagacctgtattttgaaggtggcgtctcatctgtctacctctgggatctggatcatggctttgctggagtgatcctcataaagaaggctggagatggatcaaagaagatcaaaggctgctgggattccatccacgtggtagaagtgcaggagaaatccagcggtcgcaccgcccattacaagttgacctccacggtgatgctgtggctgcagaccaacaaatctggctctggcaccatgaacctcggaggcagccttaccagacagatggagaaggatgaaactgtgagtgactgctccccacacatagccaacatcgggcgcctggtagaggacatggaaaataaaatcagaagtacgctgaacgagatctactttggaaaaacaaaggatatcgtcaatgggctgaggtctgtgcagacttttgcagacaaatcaaaacaagaagctctgaagaatgacctggtggaggctttgaagagaaagcagcaatgctaaacctctgtttcatgctaaccagacacgccgtgcactcgttagattcctttcttagaaaactcgttttctgctcccttccctcgtcccttccctccccgacaggtcacataacagctgcatcattgaccgcacagcgccatctctccctgagaataaagccgatagccaccctcctccggctccgagcctgcttctgccacacctcgctctcagttctctccacatttccatagagaccgtgtggtttttgttcacccgggccccccgtcttcctccctgtccccccatttataggcataaaatccactgtctgccagcctcccttccctcccacctttttggtacattggtgtaaaaaatgtaaaacaaaaaaattttatgaactaactgtggtgtgtgaaagagagaagaaaaactggaaatcttattccgtgtgtgtttgggagttgcttggggttgggggtcgtggggacaggggacagctctgggagcagaggtggccctcggtgccgtcctgcgcagactctcccgtcccacggaggccgcggggtgggggctggggggggtgccgccgaccgttccgctcttccggccaggtgcttttctgtcaatttctatggaatgcaaaaggaggtttttgttttattttgtttttttgtaaagcttaagaaaaaaatctacatcttatacttgagcctccatacttaaaaaaagaaaagaaaagaaatcaataaaaagaaactggggcgca

SEQ ID NO: 3143 - DNA, 1686 bp, Homo sapiens
  source 1..1686: mol_type = unassigned DNA; mol_type = unassigned DNA
ggagagccactgacgccgggaccgggaccgccgccgccgccgccaccatgagtgatcagcagctggactgtgccttggacctaatgaggcgcctgcctccccagcaaatcgagaaaaacctcagcgacctgatcgacctggtccccagtctatgtgaggatctcctgtcttctgttgaccagccactgaaaattgccagagacaaggtggtgggaaaggattaccttttgtgtgactacaacagagatggggactcctataggtcaccatggagtaacaagtatgaccctcccttggaggatggggccatgccgtcagctcggctgagaaagctggaggtggaagccaacaatgcctttgaccagtatcgagacctgtattttgaaggtggcgtctcatctgtctacctctgggatctggatcatggctttgctggagtgatcctcataaagaaggctggagatggatcaaagaagatcaaaggctgctgggattccatccacgtggtagaagtgcaggagaaatccagcggtcgcaccgcccattacaagttgacctccacggtgatgctgtggctgcagaccaacaaatctggctctggcaccatgaacctcggaggcagccttaccagacagatggagaaggatgaaactgtgagtgactgctccccacacatagccaacatcgggcgcctggtagaggacatggaaaataaaatcagaagtacgctgaacgagatctactttggaaaaacaaaggatatcgtcaatgggctgagatctattgatgctatccctgacaaccaaaagtttaagcagttgcagagggagctctctcaagtgctgacccagcgccagatctacatccagcctgataattaagccgatccaggtctgtgcagacttttgcagacaaatcaaaacaagaagctctgaagaatgacctggtggaggctttgaagagaaagcagcaatgctaaacctctgtttcatgctaaccagacacgccgtgcactcgttagattcctttcttagaaaactcgttttctgctcccttccctcgtcccttccctccccgacaggtcacataacagctgcatcattgaccgcacagcgccatctctccctgagaataaagccgatagccaccctcctccggctccgagcctgcttctgccacacctcgctctcagttctctccacatttccatagagaccgtgtggtttttgttcacccgggccccccgtcttcctccctgtccccccatttataggcataaaatccactgtctgccagcctcccttccctcccacctttttggtacattggtgtaaaaaatgtaaaacaaaaaaattttatgaactaactgtggtgtgtgaaagagagaagaaaaactggaaatcttattccgtgtgtgtttgggagttgcttggggttgggggtcgtggggacaggggacagctctgggagcagaggtggccctcggtgccgtcctgcgcagactctcccgtcccacggaggccgcggggtgggggctggggggggtgccgccgaccgttccgctcttccggccaggtgcttttctgtcaatttctatggaatgcaaaaggaggtttttgttttattttgtttttttgtaaagcttaagaaaaaaatctacatcttatacttgagcctccatactta

SEQ ID NO: 3144 - DNA, 1462 bp, Homo sapiens
  source 1..1462: mol_type = unassigned DNA; mol_type = unassigned DNA
tccctgtacctggggcgcgccttctttgcagcctttggggagcgaggggagctctccatcagggatggggtggtcccggtgctgtgccttctcagttgccgcttctagggaggccgcctaggagccagcgagggaagggcgggcatcggtgtgcccagaaggcagcgcgctgctctgcgggcccttctcgaggctgccgccgtgggtgctgtgcgtgcgaagcattctgcagggcaggccggggtccacggcgcccgggcctgagtgggagccgaggggcgaggatgggtggcccacaggacaaggatgaacgcacaatcgcccttgtgaggccgtggccttggggggccaccaggccctggatccagcatatggcctggacacgatgcacccaagcaggcgcagcctccccttccctctgaactgtcagcttgcaagggttggaactgctgattatggaagtccctcggatcagagtgatcagcagctggactgtgccttggacctaatgaggcgcctgcctccccagcaaatcgagaaaaacctcagcgacctgatcgacctggtccccagtctatgtgaggatctcctgtcttctgttgaccagccactgaaaattgccagagacaaggtggtgggaaaggattaccttttgtgtgactacaacagagatggggactcctataggtcaccatggagtaacaagtatgaccctcccttggaggatggggccatgccgtcagctcggctgagaaagctggaggtggaagccaacaatgcctttgaccagtatcgagacctgtattttgaaggtggcgtctcatctgtctacctctgggatctggatcatggctttgctggagtgatcctcataaagaaggctggagatggatcaaagaagatcaaaggctgctgggattccatccacgtggtagaagtgcaggagaaatccagcggtcgcaccgcccattacaagttgacctccacggtgatgctgtggctgcagaccaacaaatctggctctggcaccatgaacctcggaggcagccttaccagacagatggagaaggatgaaactgtgagtgactgctccccacacatagccaacatcgggcgcctggtagaggacatggaaaataaaatcagaagtacgctgaacgagatctactttggaaaaacaaaggatatcgtcaatgggctgaggtctgtgcagacttttgcagacaaatcaaaacaagaagctctgaagaatgacctggtggaggctttgaagagaaagcagcaatgctaaacctctgtttcatgctaaccagacacgccgtgcactcgttagattcctttcttagaaaactcgttttctgctcccttccctcgtcccttccctccccgacaggtcacataacagctgcatcattgaccgcacagcgccatctctccctgagaataaagccgatagccaccc

SEQ ID NO: 3145 - DNA, 858 bp, Homo sapiens
  source 1..858: mol_type = unassigned DNA; mol_type = unassigned DNA
actgacgccgggaccgggaccgccgccgccgccgccaccatgagtgatcagcagctggactgtgccttggacctaatgaggcgcctgcctccccagcaaatcgagaaaaacctcagcgacctgatcgacctggtccccagtctatgtgaggatctcctgtcttctgttgaccagccactgaaaattgccagagacaaggtggtgggaaaggattaccttttgtgtgactacaacagagatggggactcctataggtcaccatggagtaacaagtatgaccctcccttggaggatggggccatgccgtcagctcggctgagaaagctggaggtggaagccaacaatgcctttgaccagtatcgagacctgtattttgaaggtggcgtctcatctgtctacctctgggatctggatcatggctttgctggagtgatcctcataaagaaggctggagatggatcaaagaagatcaaaggctgctgggattccatccacgtggtagaagtgcaggagaaatccagcggtcgcaccgcccattacaagttgacctccacggtgatgctgtggctgcagaccaacaaatctggctctggcaccatgaacctcggaggcagccttaccagacagatggagaaggatgaaactgtgagtgactgctccccacacatagccaacatcgggcgcctggtagaggacatggaaaataaaatcagaagtacgctgaacgagatctactttggaaaaacaaaggatatcgtcaatgggctgaggtctgtgcagacttttgcagacaaatcaaaacaagaagctctgaagaatgacctggtggaggctttgaagagaaagcagcaatgctaa

SEQ ID NO: 3146 - DNA, 579 bp, Homo sapiens
  source 1..579: mol_type = unassigned DNA; mol_type = unassigned DNA
atgttcactcctgggcacccggggaagtggaagcgccgggccctgctgcgggggggagagccactgacgccgggaccgggaccgccgccgccgccgccaccatggtccccagtctatgtgaggatctcctgtcttctgttgaccagccactgaaaattgccagagacaaggtggtgggaaaggattaccttttgtgtgactacaacagagatggggactcctataggtcaccatggagtaacaagtatgaccctcccttggaggatggggccatgccgtcagctcggctgagaaagctggaggtggaagccaacaatgcctttgaccagtatcgagacctgtattttgaaggtggcgtctcatctgtctacctctgggatctggatcatggctttgctggagtgatcctcataaagaaggctggagatggatcaaagaagatcaaaggctgctgggattccatccacgtggtagaagtgcaggagaaatccagcggtcgcaccgcccattacaagttgacctccacggtgatgctgtggctgcagaccaacaaatctggctctggcaccatgaacctcg

SEQ ID NO: 3147 - DNA, 432 bp, Homo sapiens
  source 1..432: mol_type = unassigned DNA; mol_type = unassigned DNA
gttggtgtcagacacatgtggaaaagaaaagaacaggcccataattttgtctcagtgcccagggccagatgttaaaggtccccagtctatgtgaggatctcctgtcttctgttgaccagccactgaaaattgccagagacaaggtggtgggaaaggattaccttttgtgtgactacaacagagatggggactcctataggtcaccatggagtaacaagtatgaccctcccttggaggatggggccatgccgtcagctcggctgagaaagctggaggtggaagccaacaatgcctttgaccagtatcgagacctgtattttgaaggtggcgtctcatctgtctacctctgggatctggatcatggctttgctggagtgatcctcataaagaaggctggagatggatcaaagaagatcaaaggctgctgggatt

SEQ ID NO: 3148 - DNA, 488 bp, Homo sapiens
  source 1..488: mol_type = unassigned DNA; mol_type = unassigned DNA
cacccaggttacaacaaagggcaaaagtaatccgctactggagtgtgttcaccatggaaccaactggggggcacgacatctgcagccaccagggcctgttgagcaggagcaggggagccgagtgatcagcagctggactgtgccttggacctaatgaggcgcctgcctccccagcaaatcgagaaaaacctcagcgacctgatcgacctggtccccagtctatgtgaggatctcctgtcttctgttgaccagccactgaaaattgccagagacaaggtggtgggaaaggattaccttttgtgtgactacaacagagatggggactcctataggtcaccatggagtaacaagtatgaccctcccttggaggatggggccatgccgtcagctcggctgagaaagctggaggtggaagccaacaatgcctttgaccagtatcgagacctgtattttgaaggtggcgtctcatctgtctacctctgggatct

SEQ ID NO: 3149 - DNA, 660 bp, Homo sapiens
  source 1..660: mol_type = unassigned DNA; mol_type = unassigned DNA
gggggagagccactgacgccgggaccgggaccgccgccgccgccgccaccatgagtgatcagcagctggactgtgccttggacctaatgaggcgcctgcctccccagcaaatcgagaaaaacctcagcgacctgatcgacctggtccccagtctatgtgaggatctcctgtcttctgttgaccagccactgaaaattgccagagacaaggtggtgggaaaggattaccttttgtgtgactacaacagagatggggactcctataggtcaccatggagtaacaagtatgaccctcccttggaggatggggccatgccgtcagctcggctgagaaagctggaggtggaagccaacaatgcctttgaccagtatcgagacctgtgcttctgaattgttggatcctgatgaatcgcaatcaggactatgtttggcttgagctccagcctcatgaccaccaaccccatcgaatgactgagagctgccaggctcctgccacgttggagctcagaatcctcccgtggggacactgtgctgcagccagcctccagggagccgcttgttttatggcctaaaaagtctctttatgctgagaaggtcacactggactttgctcacacagagatttgacccaagaaaaggaataaagaggccttggataccc

SEQ ID NO: 3150 - DNA, 6413 bp, Homo sapiens
  source 1..6413: mol_type = unassigned DNA; mol_type = unassigned DNA
ggaccagtgacagaccaagggcatgccactgaaggaatccctagacgcacccttctggatgtgagacaggcggatctcacccacgcctgccagcagctcctcggagaactgtgttcctgggtcagccctggcccagaggagcgccggggacccgcagagtgctgctgaagtcaaggctacaactcacctaggatctggggcgccagccctccggtgggcagggcgttctcctcccccaccccctccccgcacgatgacatcaagtgtttggcgttgagttgctccataaaagctgcccggggaagccaggagagcgaagggcggacgtactcgccacggcacccaggctgcgcgcacgcggtcccggtgtgcagctggagagcgagcggccaccgggagcccccggcacagcccgcgcccgccccgcaggagcccgcgaagatgccccggcgcagcctgcacgcggcggccgtgctcctgctggtgatcttaaaggaacagccttccagcccggccccagtgaacggttccaagtggacttattttggtcctgatggggagaatagctggtccaagaagtacccgtcgtgtgggggcctgctgcagtcccccatagacctgcacagtgacatcctccagtatgacgccagcctcacgcccctcgagttccaaggctacaatctgtctgccaacaagcagtttctcctgaccaacaatggccattcagtgaagctgaacctgccctcggacatgcacatccagggcctccagtctcgctacagtgccacgcagctgcacctgcactgggggaacccgaatgacccgcacggctctgagcacaccgtcagcggacagcacttcgccgccgagctgcacattgtccattataactcagacctttatcctgacgccagcactgccagcaacaagtcagaaggcctcgctgtcctggctgttctcattgagatgggctccttcaatccgtcctatgacaagatcttcagtcaccttcaacatgtaaagtacaaaggccaggaagcattcgtcccgggattcaacattgaagagctgcttccggagaggaccgctgaatattaccgctaccgggggtccctgaccacacccccttgcaaccccactgtgctctggacagttttccgaaaccccgtgcaaatttcccaggagcagctgctggctttggagacagccctgtactgcacacacatggacgacccttcccccagagaaatgatcaacaacttccggcaggtccagaagttcgatgagaggctggtatacacctccttctcccaagtgcaagtctgtactgcggcaggactgagtctgggcatcatcctctcactggccctggctggcattcttggcatctgtattgtggtggtggtgtccatttggcttttcagaaggaagagtatcaaaaaaggtgataacaagggagtcatttacaagccagccaccaagatggagactgaggcccacgcttgaggtccccggagctcccgggcacatccaggaaggaccttgctttggaccctacacacttcggctctctggacacttgcgacacctcaaggtgttctctgtagctcaatctgcaaacatgccaggcctcagggatcctctgctgggtgcctccttgccttgggaccatggccaccccagagccatccgatcgatggatgggatgcactctcagaccaagcagcaggaattcaaagctgcttgctgtaactgtgtgagattgtgaagtggtctgaattctggaatcacaaaccaagccatgctggtgggccattaatggttggaaaacactttcatccggggctttgccagagcgtgctttcaagtgtcctggaaattctgctgcttctccaagctttcagacaagaatgtgcactctctgcttaggttttgcttgggaaactcaacttctttcctctggagacggggcatctccctctgatttccttctgctatgacaaaacctttaatctgcaccttacaactcggggacaaatggggacaggaaggatcaagttgtagagagaaaaagaaaacaagagatatacattgtgatatattagggacactttcacagtcctgtcctctggatcacagacactgcacagaccttagggaatggcaggttcaagttccacttcttggtggggatgagaagggagagagagctagagggacaaagagaatgagaagacatggatgatctgggagagtctcactttggaatcagaattggaatcacattctgtttatcaagccataatgtaaggacagaataatacaatattaagtccaaatccaacctcctgtcagtggagcagttatgttttatactctacagattttacaaataatgaggctgttccttgaaaatgtgttgttgctgtgtcctggaggagacatgagttccgagatgacccaatctgcctttgaatctggaggaaataggcagaaacaaaatgactgtagaacttattctctgtaggccaaatttcatttcagccacttctgcaggatccctactgccaacctggaatggagacttttatctacttctctctctctgaagatgtcaaatcgtggtttagatcaaatatatttcaagctataaaagcaggaggttatctgtgcagggggctggcatcatgtatttaggggcaagtaataatggaatgctactaagatactccatattcttccccgaatcacacagacagtttctgacaggcgcaactcctccattttcctcccgcaggtgagaaccctgtggagatgagtcagtgccatgactgagaaggaaccgacccctagttgagagcaccttgcagttccccgagaactttctgattcacagtctcattttgacagcatgaaatgtcctcttgaagcatagctttttaaatatctttttccttctactcctccctctgactctaagaattctctcttctggaatcgcttgaacccaggaggcggaggttgcagtaagccaaggtcatgccactgcactctagcctgggtgacagagcgagactccatctcaaaaaaaaaaaaaaaaaaattattctgtaccatcacaacttttcacaacgatggcaagccttatgtcttgggagcctgttttgctaggcaaagttacaagtgacctaatgggagctcaaatgtgtgtgtgtctctctgtgtgtttgtgtgtgtgtgtgcactcaagacctctaacagcctcgaagcctggggtggcatcccggccttgccattagcatgcctcatgcatcatcagatgacaaggacaaccctcatgacgaagcaacatgaattagggggcctcttggccttggtccaaaattgtcaatcagaaatgaacataaaggactccagagcagtgggactgtctgtcaaaagactctgtatatcttttgtggatgagttttgtgagagaacagagagaccattgtacctggcacaagggctgttcatgaaaagggagacttactgggaggtgcaagacagtggcatttctcctctcctcttgctgctcagcacagccctggattgcagccccgaggctgagaccagacaaagcccgggaggcagaaagatgctccaagaaccaacactatcaatgtctttgcaaatcctcacaggattcctgtgggtccagctttggaactgggaaacctttcttcggatccgcactcattccactgatgccagctgcccctgaaggatgccagtactgtggtgtgtgagtctcagcagccgcccacacgctcctaactctgctgcatggcagatgcctaggtggaaatagcaaaaacaaggcccaggctggggccagggccagaggggaaggccctggattctcactcatgtgagatcttgaatctctttctttgttctgtttgtttagttagtatcatctggtaaaatagttaaaaaacaacaaaaaactctgtatctgtttctagcatgtgctgcattgactctattaatcacatttcaaattcaccctacattcctctcctcttcactagcctctctgaaggtgtcctggccagccctggagaagcactggtgtctgcagcacccctcagttcctgtgcctcagcccacaggccactgtgataatggtctgtttagcacttctgtatttattgtaagaatgattataatgaagatacacactgtaactacaagaaattataaatgtttttcacatcaggctgttctttttttttttttggaggcgaggttaaagcattactatttgcaaagcactctgtagctccctgttatggggataggtaactaatcagaataataatgtcactcgcatccacttcttagaacctggctccaaaggaaaataagctgatagactcaatcactttcctgaggatggaggcctatggcatgtgtggctgcaggtcgcgaagctgcttaatggtgctgggaagcctagaggaattaaataaagaccctggaggaggtgggatcggagctgcaccttgaacaaatagctcagatttgaacagatggatggaaaagagggaggtgttcccaaccaaggggacatgatacagggaacaggtcctatgtctctttactcctgagagtattaaacctagtaggtgggcagcccctcttggttgcctgttaccttattttgaattctttttgcaaaacatactatcacccgtccaaataatcttttgtctaaatccagacttcacattctgactggggcaaaaagaggcagtccagtaaaggttataaaataggtaccatcattgtttgccttatttagaaaagcatccaattttcactataatcaccctaagcctgagagaggtgaactgttcaagggtactttggctccagtgggtgacagtacctggcccagctttggaattgaaacatttctgatggtctgtactctgctagaacacaggatgcttctgctctccctgctctggcatcctgccaggtgtcatggccacgcacaggcatgaagacagccgggaagccagagttcccacgaagcactcactccttggacttgctcccaccccactggggagagcactcctggagcaggaaatgagcatctctcatctccctgaattccacatccactggctgaatgatcagggaggcatagcagtgagagccataggtcggcagagggaactcaggccctcctttaggatggccatcacctcatctcaatccagccaaatcaaccatctagagcacacaggccgagagaaatgtaataaaatataacatgagacacgtatgaaatttaaactttccggtagccacactagaaaaaggtaaaaaaaaaaaaaccagtgacattaatttaaatttaattttagataatccaacagatctaaaatactatcatttccacatgtaaccagtattttcatgtgtttttttctgcagtaaatctttgaaatctggtgtgtgttttacactgacagcacactcgattcagatgctagattttccttgtagatatttggtcgttatttagatttcataaaatttacagtttaaaagattccaatatccgagttgctccaaacacacttagaagttgttttccaaataatggaatcaatgatcggcttttagatgtaaacttattaaaataaagtagcgtttctcagttaagtcacattccaagcgctcaagatccatgccctgcgcagacccggacgacgaacccgactttcagagactgagggttctgcctagagagctcccacagaaatcagcccgagaagaaagccttgtgggtgaagccagggagggagacaggagggcaggaggaaaatcaagcctaaatgagcacatcgtggacgccgctcttcctctccccacatctcctcgcctcgccgcagtgggcccggctgtgccccaggtccccgcggtcgggagtgaatggcgctcgggtggcaggcacgtgggcacctggtgaactgcaggaccctggcaccgccaccccctcgcccctacacacacaggagtgcccctcccgttgtcacgtggccttcctgctgggtatctggagcagttgcagcctcgcttccggaaggaaacggggcctctggggcacagggaccacctgccagtgcgttccagccgggctgccatccacactggagaccgccccgcacgtggtcctcgggctcggattcagctgtcgcaggatgtgaggggaaaggtatgtggcccgacaatgccaccgagggtgtccccgggctccaccccgtgcctcttcattatagaatgactgggcagagataagggccagattactttgctgtattgaataattcaccataaaaatgattgcaaccagg

SEQ ID NO: 3151 - DNA, 2744 bp, Homo sapiens
  source 1..2744: mol_type = unassigned DNA; mol_type = unassigned DNA
gtactcgccacggcacccaggctgcgcgcacgcggtcccggtgtgcagctggagagcgagcggccaccgggagcccccggcacagcccgcgcccgccccgcaggagcccgcgaagatgccccggcgcagcctgcacgcggcggccgtgctcctgctggtgatcttaaaggaacagccttccagcccggccccagtgaacggttccaagtggacttattttggtcctgatggggagaatagctggtccaagaagtacccgtcgtgtgggggcctgctgcagtcccccatagacctgcacagtgacatcctccagtatgacgccagcctcacgcccctcgagttccaaggctacaatctgtctgccaacaagcagtttctcctgaccaacaatggccattcagtgaagctgaacctgccctcggacatgcacatccagggcctccagtctcgctacagtgccacgcagctgcacctgcactgggggaacccgaatgacccgcacggctctgagcacaccgtcagcggacagcacttcgccgccgagctgcacattgtccattataactcagacctttatcctgacgccagcactgccagcaacaagtcagaaggcctcgctgtcctggctgttctcattgagatgggctccttcaatccgtcctatgacaagatcttcagtcaccttcaacatgtaaagtacaaaggccaggaagcattcgtcccgggattcaacattgaagagctgcttccggagaggaccgctgaatattaccgctaccgggggtccctgaccacacccccttgcaaccccactgtgctctggacagttttccgaaaccccgtgcaaatttcccaggagcagctgctggctttggagacagccctgtactgcacacacatggacgacccttcccccagagaaatgatcaacaacttccggcaggtccagaagttcgatgagaggctggtatacacctccttctcccaaggcatcatcctctcactggccctggctggcattcttggcatctgtattgtggtggtggtgtccatttggcttttcagaaggaagagtatcaaaaaaggtgataacaagggagtcatttacaagccagccaccaagatggagactgaggcccacgcttgaggtccccggagctcccgggcacatccaggaaggaccttgctttggaccctacacacttcggctctctggacacttgcgacacctcaaggtgttctctgtagctcaatctgcaaacatgccaggcctcagggatcctctgctgggtgcctccttgccttgggaccatggccaccccagagccatccgatcgatggatgggatgcactctcagaccaagcagcaggaattcaaagctgcttgctgtaactgtgtgagattgtgaagtggtctgaattctggaatcacaaaccaagccatgctggtgggccattaatggttggaaaacactttcatccggggctttgccagagcgtgctttcaagtgtcctggaaattctgctgcttctccaagctttcagacaagaatgtgcactctctgcttaggttttgcttgggaaactcaacttctttcctctggagacggggcatctccctctgatttccttctgctatgacaaaacctttaatctgcaccttacaactcggggacaaatggggacaggaaggatcaagttgtagagagaaaaagaaaacaagagatatacattgtgatatattagggacactttcacagtcctgtcctctggatcacagacactgcacagaccttagggaatggcaggttcaagttccacttcttggtggggatgagaagggagagagagctagagggacaaagagaatgagaagacatggatgatctgggagagtctcactttggaatcagaattggaatcacattctgtttatcaagccataatgtaaggacagaataatacaatattaagtccaaatccaacctcctgtcagtggagcagttatgttttatactctacagattttacaaataatgaggctgttccttgaaaatgtgttgttgctgtgtcctggaggagacatgagttccgagatgacccaatctgcctttgaatctggaggaaataggcagaaacaaaatgactgtagaacttattctctgtaggccaaatttcatttcagccacttctgcaggatccctactgccaacctggaatggagacttttatctacttctctctctctgaagatgtcaaatcgtggtttagatcaaatatatttcaagctataaaagcaggaggttatctgtgcagggggctggcatcatgtatttaggggcaagtaataatggaatgctactaagatactccatattcttccccgaatcacacagacagtttctgacaggcgcaactcctccattttcctcccgcaggtgagaaccctgtggagatgagtcagtgccatgactgagaaggaaccgacccctagttgagagcaccttgcagttccccgagaactttctgattcacagtctcattttgacagcatgaaatgtcctcttgaagcatagctttttaaatatctttttccttctactcctccctctgactctaagaattctctcttctggaatcgcttgaacccaggaggcggaggttgcagtaagccaaggtcatgccactgcactctagcctgggtgacagagcgagactccatctcaaaaaaaaaaaaaaaaaaa

SEQ ID NO: 3152 - DNA, 2556 bp, Homo sapiens
  source 1..2556: mol_type = unassigned DNA; mol_type = unassigned DNA
gaagggcggacgtactcgccacggcacccaggctgcgcgcacgcggtcccggtgtgcagctggagagcgagcggccaccgggagcccccggcacagcccgcgcccgccccgcaggagcccgcgaagatgccccggcgcagcctgcacgcggcggccgtgctcctgctggtgatcttaaaggaacagccttccagcccggccccagtgaacggttccaagtggacttattttgtgaagctgaacctgccctcggacatgcacatccagggcctccagtctcgctacagtgccacgcagctgcacctgcactgggggaacccgaatgacccgcacggctctgagcacaccgtcagcggacagcacttcgccgccgagctgcacattgtccattataactcagacctttatcctgacgccagcactgccagcaacaagtcagaaggcctcgctgtcctggctgttctcattgagatgggctccttcaatccgtcctatgacaagatcttcagtcaccttcaacatgtaaagtacaaaggccaggaagcattcgtcccgggattcaacattgaagagctgcttccggagaggaccgctgaatattaccgctaccgggggtccctgaccacacccccttgcaaccccactgtgctctggacagttttccgaaaccccgtgcaaatttcccaggagcagctgctggctttggagacagccctgtactgcacacacatggacgacccttcccccagagaaatgatcaacaacttccggcaggtccagaagttcgatgagaggctggtatacacctccttctcccaaggcatcatcctctcactggccctggctggcattcttggcatctgtattgtggtggtggtgtccatttggcttttcagaaggaagagtatcaaaaaaggtgataacaagggagtcatttacaagccagccaccaagatggagactgaggcccacgcttgaggtccccggagctcccgggcacatccaggaaggaccttgctttggaccctacacacttcggctctctggacacttgcgacacctcaaggtgttctctgtagctcaatctgcaaacatgccaggcctcagggatcctctgctgggtgcctccttgccttgggaccatggccaccccagagccatccgatcgatggatgggatgcactctcagaccaagcagcaggaattcaaagctgcttgctgtaactgtgtgagattgtgaagtggtctgaattctggaatcacaaaccaagccatgctggtgggccattaatggttggaaaacactttcatccggggctttgccagagcgtgctttcaagtgtcctggaaattctgctgcttctccaagctttcagacaagaatgtgcactctctgcttaggttttgcttgggaaactcaacttctttcctctggagacggggcatctccctctgatttccttctgctatgacaaaacctttaatctgcaccttacaactcggggacaaatggggacaggaaggatcaagttgtagagagaaaaagaaaacaagagatatacattgtgatatattagggacactttcacagtcctgtcctctggatcacagacactgcacagaccttagggaatggcaggttcaagttccacttcttggtggggatgagaagggagagagagctagagggacaaagagaatgagaagacatggatgatctgggagagtctcactttggaatcagaattggaatcacattctgtttatcaagccataatgtaaggacagaataatacaatattaagtccaaatccaacctcctgtcagtggagcagttatgttttatactctacagattttacaaataatgaggctgttccttgaaaatgtgttgttgctgtgtcctggaggagacatgagttccgagatgacccaatctgcctttgaatctggaggaaataggcagaaacaaaatgactgtagaacttattctctgtaggccaaatttcatttcagccacttctgcaggatccctactgccaacctggaatggagacttttatctacttctctctctctgaagatgtcaaatcgtggtttagatcaaatatatttcaagctataaaagcaggaggttatctgtgcagggggctggcatcatgtatttaggggcaagtaataatggaatgctactaagatactccatattcttccccgaatcacacagacagtttctgacaggcgcaactcctccattttcctcccgcaggtgagaaccctgtggagatgagtcagtgccatgactgagaaggaaccgacccctagttgagagcaccttgcagttccccgagaactttctgattcacagtctcattttgacagcatgaaatgtcctcttgaagcatagctttttaaatatctttttccttctactcctccctctgactctaagaattctctcttctggaatcgcttgaacccaggaggcggaggttgcagtaagccaaggtcatgccactgcactctagcctgggtgacagagcgagactccatctc

SEQ ID NO: 3153 - DNA, 580 bp, Homo sapiens
  source 1..580: mol_type = unassigned DNA; mol_type = unassigned DNA
agtccagcaagatgccggtggaagacgcagctcctgggcctgccagaacaggtagcaaggcccttgtggcaagcagctcaccgaccttctccgggtgtctgtaccttcctgggcaaggcatcatcctctcactggccctggctggcattcttggcatctgtattgtggtggtggtgtccatttggcttttcagaaggaagagtatcaaaaaaggtgataacaagggagtcatttacaagccagccaccaagatggagactgaggcccacgcttgaggtccccggagctcccgggcacatccaggaaggaccttgctttggaccctacacacttcggctctctggacacttgcgacacctcaaggtgttctctgtagctcaatctgcaaacatgccaggcctcagggatcctctgctgggtgcctccttgccttgggaccatggccaccccagagccatccgatcgatggatgggatgcactctcagaccaagcagcaggaattcaaagctgcttgctgtaactgtgtgagattgtgaagtggtctgaattctggaatcacaaaccaagccatgctggtgg

SEQ ID NO: 3154 - DNA, 561 bp, Homo sapiens
  source 1..561: mol_type = unassigned DNA; mol_type = unassigned DNA
agacctttatcctgacgccagcactgccagcaacaagtcagaaggcctcgctgtcctggctgttctcattgagatgggctccttcaatccgtcctatgacaagatcttcagtcaccttcaacatgtaaagtacaaaggccaggaagcattcgtcccgggattcaacattgaagagctgcttccggagaggaccgctgaatattaccgctaccgggggtccctgaccacacccccttgcaaccccactgtgctctggacagttttccgaaaccccgtgcaaatttcccaggagcaggtaactgtcgtgccagactcagccagagtccacgcggcacctcagtccccatcatcctccatatcacaatcaatgacttgatttcctcatttagtttcattggcagctcttcaaaacctctccaaatatcacaggtgtctgaaagcaccgcagaaattccaggctgagcttcaaaagaagtcaagctaggcaaatgaatagatgtctcctagttcttttttaaaaaaaagagctctaaatctgcatttgctaatatatcctcagtg

SEQ ID NO: 3155 - DNA, 538 bp, Homo sapiens
  source 1..538: mol_type = unassigned DNA; mol_type = unassigned DNA
gacttttagccctgagctttccagagtgtgatgctgaggcctcatctgaggatgagaactccaacaacagggaaaaccttgattagcgagccctgggagggtagcagaagatgtagggtataaggctatgatttgaatgtgagcaggtacaatgcaaactgctggcaaggcagcagtgctcaggcagcagatgtgtttctagtggcctccaggatcactggagtggcctgtgcctcctcaggggaaaagtaagggtgaactcctctgttatttgtggaattttacatcctgggcctccaactgttctgcctgctaagaggttccaagtggacttattttggtaagtagagattttaaatacttttttgttgaaaagaaaatagaaatggttgtatttaatgagaaaaacagaaacttcatgctctgtggaggtgattttgaagggtcggaagcacagttcttgtattgtagaaagagagtacaaaggcatctcctaagaacacttcaacttgggttgcatactgcactttctccaagc

SEQ ID NO: 3156 - DNA, 2403 bp, Homo sapiens
  source 1..2403: mol_type = unassigned DNA; mol_type = unassigned DNA
ttatccagcaaacaacgctccctccccgcactccccccaccccaggccacacaggcacgtggacccaggcctcaccgtgggaagggggtggtggcaggcacagaagagattgctccagatgagttctccttgcctcacttctcttccttagaacttaggacacaactcaggttttagttattgacttcctccacccctcccctgcaccctgagtccctaattccttcttgttatatatctcctaattctggactcttcccattccagggcagctcagattatgcagggaattgggaacaggtacccccaccatctgccgcataccacccagggagctgctcctcagaggagaaatcaggcggggggatgaaaatacagtgtccttttgagggggctgagttgaaccccaaagccccttccttgaccctgcctgctccagggaacacccatctaaacagcatctgtgtgactagcagaggaaggaagagctcaccccagctgggctcctgagccagggccagggctccagtgaaacttgccgcgctccagctccgagtggggccatcctgcatgcctaattggctatttaaggagctgttcaccagcagcccaggcagcacccccgtccccacatacaccagttcagagccaccttaaaagcaggaggcagttgtaaagtcgctggccagctagtggagtggagactgcagagggagataaagagagagggcaaagaggcagcaagagatttgtcctggggatccagaaacccatgataccctactgaacaccgaatcccctggaagcccacagagacagagacagcaagagaagcagagataaatacactcacgccaggagctcgctcgctctctctctctctctctcactcctccctccctctctctctgcctgtcctagtcctctagtcctcaaattcccagtcccctgcaccccttcctgggacactatgttgttctccgccctcctgctggaggtgatttggatcctggctgcagatgggggtcaacactggacgtatgagggcccacatggtcaggaccattggccagcctcttaccctgagtgtggaaacaatgcccagtcgcccatcgatattcagacagacagtgtgacatttgaccctgatttgcctgctctgcagccccacggatatgaccagcctggcaccgagcctttggacctgcacaacaatggccacacagtgcaactctctctgccctctaccctgtatctgggtggacttccccgaaaatatgtagctgcccagctccacctgcactggggtcagaaaggatccccaggggggtcagaacaccagatcaacagtgaagccacatttgcagagctccacattgtacattatgactctgattcctatgacagcttgagtgaggctgctgagaggcctcagggcctggctgtcctgggcatcctaattgaggtgggtgagactaagaatatagcttatgaacacattctgagtcacttgcatgaagtcaggcataaagatcagaagacctcagtgcctcccttcaacctaagagagctgctccccaaacagctggggcagtacttccgctacaatggctcgctcacaactcccccttgctaccagagtgtgctctggacagttttttatagaaggtcccagatttcaatggaacagctggaaaagcttcaggggacattgttctccacagaagaggagccctctaagcttctggtacagaactaccgagcccttcagcctctcaatcagcgcatggtctttgcttctttcatccaagcaggatcctcgtataccacaggtgaaatgctgagtctaggtgtaggaatcttggttggctgtctctgccttctcctggctgtttatttcattgctagaaagattcggaagaagaggctggaaaaccgaaagagtgtggtcttcacctcagcacaagccacgactgaggcataaattccttctcagataccatggatgtggatgacttcccttcatgcctatcaggaagcctctaaaatggggtgtaggatctggccagaaacactgtaggagtagtaagcagatgtcctccttcccctggacatctcctagagaggaatggacccaggctgtcattccaggaagaactgcagagccttcagcctctccaaacatgtaggaggaaatgaggaaatcgctgtgttgttaatgcagagaacaaactctgtttagttgcaggggaagtttgggatataccccaaagtcctctaccccctcacttttatggccctttccctagatatactgcgggatctctccttaggataaagagttgctgttgaagttgtatatttttgatcaatatatttggaaattaaagtttctgactttaa

SEQ ID NO: 3157 - DNA, 1514 bp, Homo sapiens
  source 1..1514: mol_type = unassigned DNA; mol_type = unassigned DNA
gtggagtggagactgcagagggagataaagagagagggcaaagaggcagcaagagatttgtcctggggatccagaaacccatgataccctactgaacaccgaatcccctggaagcccacagagacagagacagcaagagaagcagagataaatacactcacgccaggagctcgctcgctctctctctctctctctcactcctccctccctctctctctgcctgtcctagtcctctagtcctcaaattcccagtcccctgcaccccttcctgggacactatgttgttctccgccctcctgctggaggtgatttggatcctggctgcagatgggggtcaacactggacgtatgagggtgagcagatctcaaggcctcccgacaaccctttcacactgggacctcctcacctggcaggaagacacactgtgcgggtgggaggagacttcctttaccttctcaccctagctcctcccttctggatctcctcctgccttgagtttcacatatatggctcctagatcctgctctaatcatcaaatcctacacctcctgatttggcagaaaagctagttaagtcctcagtaaatcgtgtaggagtgagggagctggggtggaaaggaagctgggtgggaactctgagcttagctgccaggtctccttctggctccgtctatcctaatccatcctacccctaacctgcatctgaaattgggacagagctggaggtcaggggtgaggaagaggctggcaggatagtttctgaccctgggggaggtggaactcagttcctatgaactactgattaatgacttaaccaaactcaagttcatgataaacggtcagtgtgagagcaagaagtgaatgatgagaagtcaggatatctgaatcccaaggccacttgataggggcctccaggagaccgtatctctctaggttatttttttttttttttttttttttgacacagagtcttgctctgtcacccaggctggagtgcagtggcgcaatctgggctcactgcaaactccacctcctgggtttaagtgattctcctgcctcagcttctcgagtagctgggattacaggtgcccaccaccacgtctggctaatttttgcatttttagtagagatggggtttcaccatgttggccaggctggtctcgaactcctgacctcaagcgatccacctgcctcggcctcccaaagtgctgggattacaggcatgagccactgtgcctggcctatctaggatcattttatttctcccatttttctactcctactctctaatcccatctctcagggtattcaggttttctatgcatcccctctgccctcattcagctttcttgtcctcaaaatacaggtaagtaaaagagctaccactccccattcatcaggatagttggggaatcatcactgcctctgggtagggaaggggaactgcagcatgagactcaacaggactcctacctcacccatccctatacaactggggtcttaacctgggtgga

SEQ ID NO: 3158 - DNA, 1382 bp, Homo sapiens
  source 1..1382: mol_type = unassigned DNA; mol_type = unassigned DNA
ataaagagagagggcaaagaggcagcaagagatttgtcctggggatccagaaacccatgataccctactgaacaccgaatcccctggaagcccacagagacagagacagcaagagaagcagagataaatacactcacgccaggagctcgctcgctctctctctctctctctcactcctccctccctctctctctgcctgtcctagtcctctagtcctcaaattcccagtcccctgcaccccttcctgggacactatgttgttctccgccctcctgctggaggtgatttggatcctggctgcagatgggggtcaacactggacgtatgagggtgagcagatctcaaggcctcccgacaaccctttcacactgggacctcctcacctggcaggaagacacactgtgcggccccacggatatgaccagcctggcaccgagcctttggacctgcacaacaatggccacacagtgcaactctctctgccctctaccctgtatctgggtggacttccccgaaaatatgtagctgcccagctccacctgcactggggtcagaaaggatccccaggggggtcagaacaccagatcaacagtgaagccacatttgcagagctccacattgtacattatgactctgattcctatgacagcttgagtgaggctgctgagaggcctcagggcctggctgtcctgggcatcctaattgaggtgggtgagactaagaatatagcttatgaacacattctgagtcacttgcatgaagtcaggcataaaggtgagccttaaaaatctatagcaggaagtaagattagactttcaaaaactatccttaaaagccttgggatgaagcaattacatagagccaaggaattttgcttctgggagccctatctaggtaagctagggcacactgaaaggaagatgagtcccagtctgttctccccagatcagaagacctcagtgcctcccttcaacctaagagagctgctccccaaacagctggggcagtacttccgctacaatggctcgctcacaactcccccttgctaccagagtgtgctctggacagttttttatagaaggtcccagatttcaatggaacaggtaagtggtggagaaacgaggtgaggtgagacacagttgtaacttcagaccccttcccactccccaaagtaacacctctcccacgcttctgctcctcagctggaaaagcttcaggggacattgttctccacagaagaggagccctctaagcttctggtacagaactaccgagcccttcagcctctcaatcagcgcatggtctttgcttctttcatccaagcaggatcctcgtataccacaggtgaaatgctgagtctaggtgtaggaatcttggttggc

SEQ ID NO: 3159 - DNA, 938 bp, Homo sapiens
  source 1..938: mol_type = unassigned DNA; mol_type = unassigned DNA
aattcccagtcccctgcaccccttcctgggacactatgttgttctccgccctcctgctggaggtgatttggatcctggctgcagatgggggtcaacactggacgtatgaggctcctcccttctggatctcctcctgccttgagtttcacatatatggctcctagatcctgctctaatcatcaaatcctacacctcctgatttggcagaaaagctaggcccacatggtcaggaccattggccagcctcttaccctgagtgtggaaacaatgcccagtcgcccatcgatattcagacagacagtgtgacatttgaccctgatttgcctgctctgcagccccacggatatgaccagcctggcaccgagcctttggacctgcacaacaatggccacacagtgcaactctctctgccctctaccctgtatctgggtggacttccccgaaaatatgtagctgcccagctccacctgcactggggtcagaaaggatccccaggggggtcagaacaccagatcaacagtgaagccacatttgcagagctccacattgtacattatgactctgattcctatgacagcttgagtgaggctgctgagaggcctcagggcctggctgtcctgggcatcctaattgaggtgggtgagactaagaatatagcttatgaacacattctgagtcacttgcatgaagtcaggcataaagatcagaagacctcagtgcctcccttcaacctaagagagctgctccccaaacagctggggcagtacttccgctacaatggctcgctcacaactcccccttgctaccagagtgtgctctggacagttttttatagaaggtcccagatttcaatggaacagctggaaaagcttcaggggacattgttctccacagaagaggagccctctaagcttctggtacagaactaccgagccctt

SEQ ID NO: 3160 - DNA, 594 bp, Homo sapiens
  source 1..594: mol_type = unassigned DNA; mol_type = unassigned DNA
cagaagacctcagtgcctcccttcaacctaagagagctgctccccaaacagctggggcagtacttccgctacaatggctcgctcacaactcccccttgctaccagagtgtgctctggacagttttttatagaaggtcccagatttcaatggaacagctggaaaagcttcaggggacattgttctccacagaagaggagccctctaagcttctggtacagaactaccgagcccttcagcctctcaatcagcgcatggtctttgcttctttcatccaaggatcctcgtataccacaggaagaagaggctggaaaaccgaaagagtgtggtcttcacctcagcacaagccacgactgaggcataaattccttctcagataccatggatgtggatgacttcccttcatgcctatcaggaagcctctaaaatggggtgtaggatctggccagaaacactgtaggagtagtaagcagatgtcctccttcccctggacatctcctagagaggaatggacccaggctgtcattccaggaagaactgcagagccttcagcctctccaaacatgtaggaggaaatgaggaaatcgctgtgttgt

SEQ ID NO: 3161 - DNA, 1717 bp, Homo sapiens
  source 1..1717: mol_type = unassigned DNA; mol_type = unassigned DNA
cccggcccgccccgccccgagcgcggggagttcacctccgcccgtcaccacctccccttgtcgcctaggtccacccgagccccctcccccgggccgcccccgagcacgaagttggcgggagcctataaaagctggtgccggcgcgacccgcggacacacagtgcaggcgcccaagccgccgccgccagatcggtgccgattcctgccctgccccgaccgccagcgcgaccatgtcccatcactgggggtacggcaaacacaacggacctgagcactggcataaggacttccccattgccaagggagagcgccagtcccctgttgacatcgacactcatacagccaagtatgacccttccctgaagcccctgtctgtttcctatgatcaagcaacttccctgaggatcctcaacaatggtcatgctttcaacgtggagtttgatgactctcaggacaaagcagtgctcaagggaggacccctggatggcacttacagattgattcagtttcactttcactggggttcacttgatggacaaggttcagagcatactgtggataaaaagaaatatgctgcagaacttcacttggttcactggaacaccaaatatggggattttgggaaagctgtgcagcaacctgatggactggccgttctaggtatttttttgaaggttggcagcgctaaaccgggccttcagaaagttgttgatgtgctggattccattaaaacaaagggcaagagtgctgacttcactaacttcgatcctcgtggcctccttcctgaatccttggattactggacctacccaggctcactgaccacccctcctcttctggaatgtgtgacctggattgtgctcaaggaacccatcagcgtcagcagcgagcaggtgttgaaattccgtaaacttaacttcaatggggagggtgaacccgaagaactgatggtggacaactggcgcccagctcagccactgaagaacaggcaaatcaaagcttccttcaaataagatggtcccatagtctgtatccaaataatgaatcttcgggtgtttccctttagctaagcacagatctaccttggtgatttggaccctggttgctttgtgtctagttttctagacccttcatctcttacttgatagacttactaataaaatgtgaagactagaccaattgtcatgcttgacacaactgctgtggctggttggtgctttgtttatggtagtagtttttctgtaacacagaatataggataagaaataagaataaagtaccttgactttgttcacagcatgtagggtgatgagcactcacaattgttgactaaaatgctgcttttaaaacataggaaagtagaatggttgagtgcaaatccatagcacaagataaattgagctagttaaggcaaatcaggtaaaatagtcatgattctatgtaatgtaaaccagaaaaaataaatgttcatgatttcaagatgttatattaaagaaaaactttaaaaattattatatatttatagcaaagttatcttaaatatgaattctgttgtaatttaatgacttttgaattacagagatataaatgaagtattatctgtaaaaattgttataattagagttgtgatacagagtatatttccattcagacaatatatcataacttaataaatattgtattttagatatattctctaataaaattcagaattcta

SEQ ID NO: 3162 - DNA, 875 bp, Homo sapiens
  source 1..875: mol_type = unassigned DNA; mol_type = unassigned DNA
gggagcctataaaagctggtgccggcgcgacccgcggacacacagtgcaggcgcccaagccgccgccgccagatcggtgccgattcctgccctgccccgaccgccagcgcgaccatgtcccatcactgggggtacggcaaacacaacggacctgagcactggcataaggacttccccattgccaagggagagcgccagtcccctgttgacatcgacactcatacagccaagtatgacccttccctgaagcccctgtctgtttcctatgatcaagcaacttccctgaggatcctcaacaatggtcatgctttcaacgtggagtttgatgactctcaggacaaagcagcttcacttggttcactggaacaccaaatatggggattttgggaaagctgtgcagcaacctgatggactggccgttctaggtatttttttgaaggttggcagcgctaaaccgggccttcagaaagttgttgatgtgctggattccattaaaacaaagggcaagagtgctgacttcactaacttcgatcctcgtggcctccttcctgaatccttggattactggacctacccaggctcactgaccacccctcctcttctggaatgtgtgacctggattgtgctcaaggaacccatcagcgtcagcagcgagcaggtgttgaaattccgtaaacttaacttcaatggggagggtgaacccgaagaactgatggtggacaactggcgcccagctcagccactgaagaacaggcaaatcaaagcttccttcaaataagatggtcccatagtctgtatccaaataatgaatcttcgggtgtttccctttagctaagcacagatctaccttggtgatttggaccctggttgctttg

SEQ ID NO: 3163 - DNA, 684 bp, Homo sapiens
  source 1..684: mol_type = unassigned DNA; mol_type = unassigned DNA
ggacacacagtgcaggcgcccaagccgccgccgccagatcggtgccgattcctgccctgccccgaccgccagcgcgaccatgtcccatcactgggggtacggcaaacacaacggacctgagcactggcataaggacttccccattgccaagggagagcgccagtcccctgttgacatcgacactcatacagccaagtatgacccttccctgaagcccctgtctgtttcctatgatcaagcaacttccctgaggatcctcaacaatggtcatgctttcaacgtggagtttgatgactctcaggacaaagcagtgctcaagggaggacccctggatggcacttacagattgattcagtttcactttcactggggttcacttgatggacaaggttcagagcatactgtggataaaaagaaatatgctgcagaacttcacttggttcactggaacaccaaatatggggattttgggaaagctgtgcagcaacctgatggactggccgttctaggtatttttttgaaggttagttgatgacccaattcttttttttccctatttttaataaagaatgaccagacagagtatttgtaacatacaggacattctacaaaagagcttaggaaatgcctttgtccctgaaatgttttcaagtttatctcctcctttcatatctgctagttgca

SEQ ID NO: 3164 - DNA, 587 bp, Homo sapiens
  source 1..587: mol_type = unassigned DNA; mol_type = unassigned DNA
agtgcaggcgcccaagccgccgccgccagatcggtgccgattcctgccctgccccgaccgccagcgcgaccatgtcccatcactgggggtacggcaaacacaacggacctgagcactggcataaggacttccccattgccaagggagagcgccagtcccctgttgacatcgacactcatacagccaagtatgacccttccctgaagcccctgtctgtttcctatgatcaagcaacttccctgaggatcctcaacaatggtcatgctttcaacgtggagtttgatgactctcaggacaaagcagtgctcaagggaggacccctggatggcacttacagattgattcagtttcactttcactggggttcacttgatggacaaggttcagagcatactgtggataaaaagaaatatgctgcagaagtaagatatacttttttttttctttccagggaaaaatgtttataagttgatatttagcattaatttcaaaagcttaatttgtaaattcaactcacgcccagtgaaccacttcttttacaaaggaccttcacatttgctttttataacctttaattgtgacatcat

SEQ ID NO: 3165 - DNA, 691 bp, Homo sapiens
  source 1..691: mol_type = unassigned DNA; mol_type = unassigned DNA
gcaggcgcccaagccgccgccgccagatcggtgccgattcctgccctgccccgaccgccagcgcgaccatgtcccatcactgggggtacggcaaacacaacggacctgagcactggcataaggacttccccattgccaagggagagcgccagtcccctgttgacatcgacactcatacagccaagtatgacccttccctgaagcccctgtctgtttcctatgatcaagcaacttccctgaggatcctcaacaatggtcatgctttcaacgtggagtttgatgactctcaggacaaagcagaaaaaggaatcagtatgctcagaaagaaagatgtgaaaaacatccattctccagacaacgcatgtgaggaataaaaacagtgctcaagggaggacccctggatggcacttacagattgattcagtttcactttcactggggttcacttgatggacaaggttcagagcatactgtggataaaaagaaatatgctgcagaacttcacttggttcactggaacaccaaatatggggattttgggaaagctgtgcagcaacctgatggactggccgttctaggtatttttttgaaggttggcagcgctaaaccgggccttcagaaagttgttgatgtgctggattccattaaaacaaagggcaagagtgctgacttcactaacttcgatcctcgt

SEQ ID NO: 3166 - DNA, 1154 bp, Homo sapiens
  source 1..1154: mol_type = unassigned DNA; mol_type = unassigned DNA
ggctccgctataaaacccaggccggcaggatcgctgcacccgcggcggcctcctcggtgcgcgacccccggctcagaggactctttgctgtcccgcaagatgcggatgctgctggcgctcctggccctctccgcggcgcggccatcggccagtgcagagtcacactggtgctacgaggttcaagccgagtcctccaactacccctgcttggtgccagtcaagtggggtggaaactgccagaaggaccgccagtcccccatcaacatcgtcaccaccaaggcaaaggtggacaaaaaactgggacgcttcttcttctctggctacgataagaagcaaacgtggactgtccaaaataacgggcactcagtgatgatgttgctggagaacaaggccagcatttctggaggaggactgcctgccccataccaggccaaacagttgcacctgcactggtccgacttgccatataagggctcggagcacagcctcgatggggagcactttgccatggagatgcacatagtacatgagaaagagaaggggacatcgaggaatgtgaaagaggcccaggaccctgaagacgaaattgcggtgctggcctttctggtggaggctggaacccaggtgaacgagggcttccagccactggtggaggcactgtctaatatccccaaacctgagatgagcactacgatggcagagagcagcctgttggacctgctccccaaggaggagaaactgaggcactacttccgctacctgggctcactcaccacaccgacctgcgatgagaaggtcgtctggactgtgttccgggagcccattcagcttcacagagaacagatcctggcattctctcagaagctgtactacgacaaggaacagacagtgagcatgaaggacaatgtcaggcccctgcagcagctggggcagcgcacggtgataaagtccggggccccgggtcggccgctgccctgggccctgcctgccctgctgggccccatgctggcctgcctgctggccggcttcctgcgatgatggctcacttctgcacgcagcctctctgttgcctcagctctccaagttccaggcttccggtccttagccttcccaggtgggactttaggcatgattaaaatatggacatatttttg

SEQ ID NO: 3167 - DNA, 598 bp, Homo sapiens
  source 1..598: mol_type = unassigned DNA; mol_type = unassigned DNA
gctataaaacccaggccggcaggatcgctgcacccgcggcggcctcctcggtgcgcgacccccggctcagaggactctttgctgtcccgcaagatgcggatgctgctggcgctcctggccctctccgcggcgcggccatcggccagtgcagagtcacactggtgctacgaggttcaagccgagtcctccaactacccctgcttggtgccagtcaagtggggtggaaactgccagaaggaccgccagtcccccatcaacatcgtcaccaccaaggcaaaggtggacaaaaaactgggacgcttcttcttctctggctacgataagaagcaaacgtggactgtccaaaataacgggcactcaggtgggctggatggaggccccaggcaggcctgggcacccgagttccccaaggactgagaggatggggctcctcccaggagggtgtgccagacccaggcccatctgtgctgtgaggtggctgaaaatcccatgggggaggacagcttccaggaggagagagcactctagtatgttttcgttacttttgtcagaccagtctgggatgtgggggcaggaaacgttccaggaagaaggacat

SEQ ID NO: 3168 - DNA, 565 bp, Homo sapiens
  source 1..565: mol_type = unassigned DNA; mol_type = unassigned DNA
gctataaaacccaggccggcaggatcgctgcacccgcggcggcctcctcggtgcgcgacccccggctcagaggactctttgctgtcccgcaagatgcggatgctgctggcgctcctggccctctccgcggcgcggccatcggccagtgcagggttggacattggaaacctactaagcagctagaaagtagaaagagaaatgctttgcagttctggtgctttgtagctgtgtggtcttggagtcacactggtgctacgaggttcaagccgagtcctccaactacccctgcttggtgccagtcaagtggggtggaaactgccagaaggaccgccagtcccccatcaacatcgtcaccaccaaggcaaaggtggacaaaaaactgggacgcttcttcttctctggctacgataagaagcaaacgtggactgtccaaaataacgggcactcagtgatgatgttgctggagaacaaggccagcatttctggaggaggactgcctgccccataccaggccaaacagttgcacctgcactggtccgacttgccatataagggctcggagcac

SEQ ID NO: 3169 - DNA, 941 bp, Homo sapiens
  source 1..941: mol_type = unassigned DNA; mol_type = unassigned DNA
gctataaaacccaggccggcaggatcgctgcacccgcggcggcctcctcggtgcgcgacccccggctcagaggactctttgctgtcccgcaagatgcggatgctgctggcgctcctggccctctccgcggcgcggccatcggccagtgcagagtcacactggtgctacgaggttcaagccgagtcctccaactacccctgcttggtgccagtcaagtggggtggaaactgccagaaggaccgccagtcccccatcaacatcgtcaccaccaaggcaaaggtggacaaaaaactgggacgcttcttcttctctggctacgataagaagcaaacgtggactgtccaaaataacgggcactcaggctggaacccaggtgaacgagggcttccagccactggtggaggcactgtctaatatccccaaacctgagatgagcactacgatggcagagagcagcctgttggacctgctccccaaggaggagaaactgaggcactacttccgctacctgggctcactcaccacaccgacctgcgatgagaaggtcgtctggactgtgttccgggagcccattcagcttcacagagaacagctgctaaggtccctgggccatcagaagcgaatagaacaaacctaagacatcactctccatcaagaggcctgcatgactctttatttacatcatcttccaggaagaggaggaggagctgctttggggacacccacttcctctccttacgtaacaacacactgcatttgcacaagtgtccttggttgtaaagggttccacactcactttcttattcagggcttattacaagcctctcaggtagctatggtcatggtaccctgatcccttgtcaaagatgagcccactgaggctcagggtgactaccgttgtgccaggagttgctaagtggtggatcacagactccagttca

SEQ ID NO: 3170 - DNA, 677 bp, Homo sapiens
  source 1..677: mol_type = unassigned DNA; mol_type = unassigned DNA
gtgaaagaggcccaggaccctgaagacgaaattgcggtgctggcctttctggtggagatcgggagaatgaactggccaccaccactggctccctgcagactttctcaagacccttccctccctttccaggctggaacccaggtgaacgagggcttccagccactggtggaggcactgtctaatatccccaaacctgagatgagcactacgatggcagagagcagcctgttggacctgctccccaaggaggagaaactgaggcactacttccgctacctgggctcactcaccacaccgacctgcgatgagaaggtcgtctggactgtgttccgggagcccattcagcttcacagagaacagatcctggcattctctcagaagctgtactacgacaaggaacagacagtgagcatgaaggacaatgtcaggcccctgcagcagctggggcagcgcacggtgataaagtccggggccccgggtcggccgctgccctgggccctgcctgccctgctgggccccatgctggcctgcctgctggccggcttcctgcgatgatggctcacttctgcacgcagcctctctgttgcctcagctctccaagttccaggcttccggtccttagccttcccaggtgggactttaggcatgattaaaatatggacatatttttggagaaa

SEQ ID NO: 3171 - DNA, 702 bp, Homo sapiens
  source 1..702: mol_type = unassigned DNA
gtctaatatccccaaacctgagatgagcactacgatggcagagagcagcctgttggacctgctccccaaggaggagaaactgaggcactacttccgctacctgggctcactcaccacaccgacctgcgatgagaaggtcgtctggactgtgttccgggagcccattcagcttcacagagaacaggtgcacagggcctggggcagggcatgggctcccactgcctggctccccagaaattatccctctgtctgccctcagaggtccctcaggatacaggtggggagcccaggtaactgaagtccgttgttaatcatcgacattcactgaagacaggcaagaaaagcctgagctgttccatcaccagattgggggctagacaggaggcaggggaaggtggagtcattcagaaaatggtgctggggtttctatcatgaacgaggctctggggagacagcagtgagcccaaaggacccaaatccctacccttgcactgctttcattccaaaacagtggttctcaaagtgcggcccctggaccagtggagtcaacatcatcactgggggaatttgttagaaatgctaatcctcagagctactgaatcaggaactctgggggtggagcccaggcatctggggcccaacaagcccgccccccagctgatgctaacgcatgctcaagtttgagagccacagtcctgtagt

SEQ ID NO: 3172 - DNA, 3812 bp, Homo sapiens
  source 1..3812: mol_type = unassigned DNA
cgctcgctccccaggccacagccgctccctcgctctgctggggcctccggacgcgcttcccacgcgggtctctggaacactcggtccgaacgcacgcctgcttgcactcacactgcggttcacacccggaggcgctctcgcactcacactgccgctcacgcgtgctcacactcccccacgcgcgctccgctccggctccagccccgcgcccagcgaaggcgcaggcactgctgccgagagcgccgaggggccccgcggccttcccatggcggacctgagcttcatcgaagataccgtcgccttccccgagaaggaagaggatgaggaggaagaagaggagggtgtggagtggggctacgaggaaggtgttgagtggggtctggtgtttcctgatgctaatggggaataccagtctcctattaacctaaactcaagagaggctaggtatgacccctcgctgttggatgtccgcctctccccaaattatgtggtgtgccgagactgtgaagtcaccaatgatggacataccattcaggttatcctgaagtcaaaatcagttctttcgggaggaccattgcctcaagggcatgaatttgaactgtacgaagtgagatttcactggggaagagaaaaccagcgtggttctgagcacacggttaatttcaaagcttttcccatggagctccatctgatccactggaactccactctgtttggcagcattgatgaggctgtggggaagccgcacggaatcgccatcattgctctgtttgttcagataggaaaggaacatgttggcttgaaggctgtgactgaaatcctccaagatattcagtataaggggaagtccaaaacaataccttgctttaatcctaacactttattaccagaccctctgctgcgggattactgggtgtatgaaggctctctcaccatcccaccttgcagtgaaggtgtcacctggatattattccgataccctttaactatatcccagctacagatagaagaatttcgaaggctgaggacacatgttaagggggcagaacttgtggaaggctgtgatgggattttgggagacaactttcggcccactcagcctcttagtgacagagtcattagagctgcatttcagtagccaaagaggacaggaacaagtctgtcttcatgagggaggaagacaatggtcctataatgcccttggataagaaaaggaaacttttgagctgcaccttcagtttatcctcaaagcctgcgttgtttgtcttcatctaatccagctttgatggacatctgtgatggttgcctgtacacttgctgaaatgaaatattagaaatggctgtatattccaaagaaaccctatattatatatccacattactgctgctaggattcatagttgcacatactgtttattgcttatgtgtagaaggaatgaaactagtttccagagttgttattaatatgaatatatatcatgtgttaatattgagaaaggaaaaatacattcccggtgttagtagttcttcatttcctgtctccaacagaaaattcactcattttagaactagtgtaattcttgataataaaataagagttttgattaagaacagcatagagcttcaaaatgcaaagtgaatgattagtaaaattatgtctcattttattttttcagcacccataccacaattaatattaggctggattgccatgggaaacattttttggcattaatgcagcaacataatactcactttaggtattactacatagttgaaggatttaactgaatgtatggatcaaatttatttatttgacatattcgaagctgtggtttaataggaatttgagaaaggtgtaagaaataggataaaaagaaggtcagcaccatgtaccaggaatagctttactttccatacatagaaatataaatttagtggtatcctatattactttagtgtcgtacgctttgtaagacttaaatattttattctattgattccactactttggtatgttaagacatttctttaaagatgaccaacaatatccttattttaggtgccactagcagatgtaagcgtatacttagttgccgttagatgtgacagaatgagataatttatgtaaagcagtagagtacctggcacaaagcaaacaataaatattattgttattgttgttataattgtaaaatgaatgacttcaaaaacatagtcccagtttggagggattttgtgatgcagaatatctaagtcatagaaatagaagacaggtggaataagtatatgttcagagtttttagatgtgttgagtagagacggtaataatggaagcattaaatacaaatgaaaatcacaccagatatccctgaaattcaagcaaagaaagttcatcatgtattcttgggcagcaagagaaaggactagggttatggcaatgtgtggaaaagttgaggcttgctaagggttgagatctgttggtagccctggatcacatggggtcagcaccaggcagtgcctctgaaagcggagagaggtcctggacttcccttgtgtataacagttcctagtgtccaacaatgaggaaacggtgaagcatggttacaaaactgtgacaaaaatatttacatctagcactgttaccactcacatgccaaacattggctgcacacgtgcagccttatttgtaattaacatcaaaagactagatctgaagccttccataaatgagaggccattcatatggcattcctggaacaaaacactgcacaggtaccagcctctccactcctgaccgggttggtgctgaacagtcagggattgttcttgaactagacttctgatgcttcttgcaatcttctttcatctttccctgaaatacacaaaataaacaaatacaataacaaatagtaattaaatgactttcaggataacatctagttgttcagacttcacccttcacaggtgtgtgtgtatgtgtgtttatgtctgtatattgaagcaatttgaatttatttactgtatattttctgagtaaaagactgaaatgaactacttggttcagatcatggtgtccattggtgacattgtttggaggcataatattctttatatggaaaatcctttaattccacagttagttacctcagattcagaatatgaatactgtttataatacgcttttgtaggaatgaatttgaaaggtagtttgtcagtaaacgaaagcacaacaactaatctcaaatctgttttgatggtgtgataggaaagaaagtaaaacctatgtgatggaccctgtaattggggcaggaatctcccaaagaaaaaggggagaattaatgacaaatgtcatagatcttgaaatttaatttagggtgcattttgtttatgaaacaatttaataaggcaacaaagtgaaatgatttttcatgtagcttatacacatgtaagtgcctctgattcatggtaactaacgtacctgatggtgtgtaaagtaatactgttgtcagaaggtttgccaattaagataatttgagtttactctttttttgttggttagtttagctgaaggcttgtcaattttattgatttttttcaaggagccaaagtggattttggggttttctctattgtgtttgtattctctatgtcatcaaactctgctcaaatcttacaaaatagtaagattagtaagaaagcagactaacttctgcttgctttgtatttagtttgtgtcttttccagtattttaaggtggaaggttaggttattgatttgaattcttttttgaataaaggcattaacagtta

SEQ ID NO: 3173 - DNA, 1825 bp, Homo sapiens
  source 1..1825: mol_type = unassigned DNA
cctcgctctgctggggcctccggacgcgcttcccacgcgggtctctggaacactcggtccgaacgcacgcctgcttgcactcacactgcggttcacacccggaggcgctctcgcactcacactgccgctcacgcgtgctcacactcccccacgcgcgctccgctccggctccagccccgcgcccagcgaaggcgcaggcactgctgccgagagcgccgaggggccccgcggccttcccatggcggacctgagcttcatcgaagataccgtcgccttccccgagaaggaagaggatgaggaggaagaagaggagggtgtggagtggggctacgaggaaggtgttgagtggggtctggtgtttcctgatgctaatggggaataccagtctcctattaacctaaactcaagagaggctaggtatgacccctcgctgttggatgtccgcctctccccaaattatgtggtgtgccgagactgtgaagtcaccaatgatggacataccattcaggttatcctgaagtcaaaatcagttctttcgggaggaccattgcctcaagggcatgaatttgaactgtacgaagtgagatttcactggggaagagaaaaccagcgtggttctgagcacacggttaatttcaaagcttttcccatggagctccatctgatccactggaactccactctgtttggcagcattgatgaggctgtggggaagccgcacggaatcgccatcattgctctgtttgttcagataggaaaggaacatgttggcttgaaggctgtgactgaaatcctccaagatattcagtataaggggaagtccaaaacaataccttgctttaatcctaacactttattaccagaccctctgctgcgggattactgggtgtatgaaggctctctcaccatcccaccttgcagtgaaggtgtcacctggatattattccgataccctttaactatatcccagctacagatagaagaatttcgaaggctgaggacacatgttaagggggcagaacttgtggaaggctgtgatgggattttgggagacaactttcggcccactcagcctcttagtgacagagtcattagagctgcatttcagtagccaaagaggacaggaacaagtctgtcttcatgagggtatgtccagattaagtaaggaaaatgaggtgcacagctacttaaacctagcgtaccaaaggtacacttattgtgatcctggtaatttagtaataaaagcgtatgtacttcatcttgataaaatttatgacacattcttgagctctgttaattacaggtcaagtaggtattttaattttatgcagtattgaagaaaaactatgattatattttcctatcagagtagcctttaattccaagttttggtggctttcataagaacagacaccctcaggcccagaaaaagtgacatgcatgcatacctctttagtaacttaccatgttgtccccgtgaagcagcaccagtcatgtcccagtgaccaaggagcacataggaggggacttggggagcgtgtgagcctcagtgtggacccttctcgtctcctgcagaattgatcctcttgtttctcaggggagggagcatatctggcatgcattgaaatacttcttctatggaagtgccttttatatgataaattgagaagcacttattaattatctgaatatgatacactattgattgaaacataatctatgtattttaatatatagaattcaatgtatgtattccttactcttaaggaactaacaaaataaaatatcacaaacacggaagagataaaatataaaacaaactata

SEQ ID NO: 3174 - DNA, 510 bp, Homo sapiens
  source 1..510: mol_type = unassigned DNA
gaaagataactgaatcaatgtgaagtctgtgagtccctccagttgtcttcctcctcatcaggactaaaactggacttaagaggcagtgatccactaagcactgcttctgttcagaaataagaaggaaggaattcatacagagaactcgtattaagccagtagtttgtgtctacttgtgatcctcttgtgctccatctgatccactggaactccactctgtttggcagcattgatgaggctgtggggaagccgcacggaatcgccatcattgctctgtttgttcagataggaaaggaacatgttggcttgaaggctgtgactgaaatcctccaagatattcagtataaggggaagtccaaaacaataccttgctttaatcctaacactttattaccagaccctctgctgcgggattactgggtgtatgaaggctctctcaccatcccaccttgcagtgaaggtgtcacctggatattattccgataccctttaactatatcccagctacag

SEQ ID NO: 3175 - DNA, 1697 bp, Homo sapiens
  source 1..1697: mol_type = unassigned DNA
aacgcacgcctgcttgcactcacactgcggttcacacccggaggcgctctcgcactcacactgccgctcacgcgtgctcacactcccccacgcgcgctccgctccggctccagccccgcgcccagcgaaggcgcaggcactgctgccgagagcgccgaggggccccgcggccttcccatggcggacctgagcttcatcgaagataccgtcgccttccccgagaaggaagaggatgaggaggaagaagaggagggtgtggagtggggctacgaggaaggtgttgagtggggtctggtgtttcctgatgctaatggggaataccagtctcctattaacctaaactcaagagaggctaggtatgacccctcgctgttggatgtccgcctctccccaaattatgtggtgtgccgagactgtgaagtcaccaatgatggacataccattcaggttatcctgaagtcaaaatcagttctttcgggaggaccattgcctcaagggcatgaatttgaactgtacgaagtgagatttcactggggaagagaaaaccagcgtggttctgagcacacggttaatttcaaagcttttcccatggaggtaagaataacaaatcatcttgtaaaaatcttgttttctgaataaagtattcagcgatttactgaaaatgatttagtttaaaagtagatgcatagctcttgaattttatcagtttatactaaaatttaaaaaatgcttaatgcaatggaagcctagggcagcacatgaaacctcctgtctactctcgtggcttggcgtgtgcgcatgagcacatggccagaaaggcaatctacagtattaaatttcaccctagtgttactattcttgtaaaaattctgcctctgcaaattcagtaggtcatttttgtggatgctttggataggtgacgagctgaagacaagcaaccgttggagaaacctcaacagtaatgaaaagtgtaggtttgctagtttaaaattggtgggttggttttattcaccccaagccacttggggagggagggagaaagagagattttttgagagtgattcttttgtccaaagaattccctccccgacttacgttcttagttaacttctgctgtttctttgatacgcagttgaaatcttatgtcttctgtgggacttttctctagttttttccctaggcagaattcatctctctctctctgctccctgtatgcttgatagggcactgccatggcgctggccccatgggttgtaccatttagtctccacagcgtctttcttgctgcctgtgagctcctgaggaccgaagctccctctcaccccctttttactcccatcatttgcccactgccaggcacagtggagatagacagttcacactggtgaaagtgaggggatgttggattcagtccacgtcttgatgttatttctagaaggaacctcagtttaccccagaaaatagccctttggtgtcatgtaagagtatgttctgggggctgctggtcttccagtctttttttttgacattcacaactgtgcatgtgcttaatattaaatataaaattgctcatgaccagatgcaatatccagtaccacttcagtggctggaaatcatggctgtataattctatgtcagtgatacatgtattttagagtattctgttgaagtgtttgacagcattactgtaattataa

SEQ ID NO: 3176 - DNA, 1290 bp, Homo sapiens
  source 1..1290: mol_type = unassigned DNA
ttttgcggtttgggagggaggctgcgaggaggggcgcggtgcccgccgccgccaccgcagcaccgcacagcgtctctcctgggggtgcgacctacgccggggacccagcgctcgggcaccggaggccggcctcgcaccggtgcggaggccggctctcgcgagaaagcataaaggatgttattggcagaaagataaaaatttcagtgaagaagaaagtaaagttggaagttaagggagacaaagttgaaaacaaagtgctggtccttacatcatgccgagccttccttgtaacagcgcgaatccccaccaagctcgagttaaccttcagctacttggagattcatggcgtcgtttgcagcaagtcagctcagatgattgtggaaactgagaagtgcagcatttccatgaagatggcgtcacccgaggacgtgagtgaggtgctggctcacataggcacctgcctgaggaagatatttcctggcctctctccagtgagaatcatgaaaaaagtctccatggagccatctgagcgcctggctagtctccaggcgctgtgggacagccagaccgtggctgagcagggcccctgtggtggattttctcagatgtatgcctgtgtttgtgactggcttggattttcatacagggaagaagtacaatgggatgtggatacaatttatcttacccaagacaccagggaattgaatttacaagattttagtcatcttgaccacaggaaatccagaattgcagtgtggtccctgaagagctctagccaactgaatcggccagggaaaaagtatactagctggatatacctcctctttgcacagcctgggactacggaagatggtgaagcaggctcagctgtgtctgtagttgtggctgatgggcctaaagcctccagttctcaggcaattttttttttttcctgcttagagcagttctccttcttcctataagtgaggcaactttatactttcaaatttagacaagatgtttcctgtgtagctcataaaaaagtgaactgagaaagaaaaagggaaaatattttactttgtaagtattttccaataaaacaagaaaattgcacgtggaataagatagaagtttacagtcctccagtgtttggtctcagcgtttttggtccctttacaatcttaaaaatgatcgatctttggtttttgtgggtcaaaacattggtatttacaatattataaattaaaactaaaatttgaaatatttattaattaaaaagtgacactaataaagcaaaccattacgtactaa

SEQ ID NO: 3177 - DNA, 5431 bp, Homo sapiens
  source 1..5431: mol_type = unassigned DNA
tgggcgggagctacgccggcccaagccccgccggggaccagcgagccgggaggaggagcaggcgccacagccgccccgcgccccgcgcccgcttgtaatccggtccgctccttattcagccgccgggaactgcgaggaggcgtcatgtagcagcagcagcaaatccgcctcgcatttgcaactcttttttttttttttggtggggcggggggcgcgcggcaaaattctgtctccgcccccccttttcttgcccacttccatttgcaagctgcatctgcctctctaaaaaaattgaggagttcggggaagggcagggggccataaatcagagttggacctgcaataacccccacacctacagggcaaccatgaccgaggagagctctgacgttcccagggagttgatagaaagcataaaggatgttattggcagaaagataaaaatttcagtgaagaagaaagtaaagttggaagttaagggagacaaagttgaaaacaaagtgctggtccttacatcatgccgagccttccttgtaacagcgcgaatccccaccaagctcgagttaaccttcagctacttggagattcatggcgtcgtttgcagcaagtcagctcagatgattgtggaaactgagaagtgcagcatttccatgaagatggcgtcacccgaggacgtgagtgaggtgctggctcacataggcacctgcctgaggaagatatttcctggcctctctccagtgagaatcatgaaaaaagtctccatggagccatctgagcgcctggctagtctccaggcgctgtgggacagccagaccgtggctgagcagggcccctgtggtggattttctcagatgtatgcctgtgtttgtgactggcttggattttcatacagggaagaagtacaatgggatgtggatacaatttatcttacccaagacaccagggaattgaatttacaagattttagtcatcttgaccacagggacctaatacctatcattgctgctctggaatataatcagtggttcacaaaactgtcctctaaggatctaaaactgtccactgatgtctgtgaacagatcttgagggtggtgagtaggtccaatcgactggaagaattggtgttggaaaatgctggacttagaacagattttgcacaaaaactggccagtgctctagcacataatcccaactcaggactccacacaattaaccttgctggcaacccactggaggatagaggtgtgtcctctttaagtattcaatttgccaaactcccaaagggattaaagcacttaaatttatctaaaacctcattatcacctaaaggggtgaacagcctttctcagtcactcagtgccaatccattgaccgcctctacccttgtccacctcgacctctcagggaacgtccttcgtggagatgacctctcacacatgtataattttttggcccagccaaatgccattgttcatctggatttatccaatacagaatgttccctggacatggtctgtggagctcttctccgtggatgccttcaatatttagctgtgctcaacctctccagaactgtcttctctcaccggaaaggaaaagaagtacctccatctttcaagcaattttttagtagttctctggctttgatgcacatcaacctttcaggcacaaaactgtctcctgagcccttaaaagcactgttattgggcctggcttgtaatcataacttgaaaggggtttctctggatctcagcaactgtgagctgagatcaggaggtgctcaagtattagaaggttgcattgctgaaatacacaacatcaccagcttagacatctctgacaatggtttagaatctgacctatctaccttaatagtgtggctcagtaaaaacagatcaatacaacacctggcgttaggcaaaaattttaataatatgaaatccaaaaatctgacacctgtattggacaacttagtacagatgattcaagatgaagaatcacctctgcagtccttgtccctggctgactcgaaactcaagactgaggtcaccatcatcatcaatgccctgggaagcaacacctccctgaccaaagtggacattagcggcaacggaatgggggacatgggagcgaagatgctggccaaagcactgcagatcaacactaagctcaggactgtaatatgggacaagaacaacatcactgcacaaggctttcaggatatagctgttgctatggaaaagaactacacattaagatttatgccaattcctatgtatgatgcttctcaagccctaaaaacaaaccctgaaaaaacagaagacgctctgcaaaagatagaaaactacctgctacgaaatcacgagactagaaaataccttcaagagcaggcctaccgcctgcagcagggtattgtcaccagcaccacccagcagatgattgacagaatatgtgtgaaagtacaagatcatctcaactccttacgaaattgtgggggagacgctatccaggaagatttaaaatcagcagagcggctcatgcgtgatgctaagaactctaaaacgttgttaccaaatttataccatgttggtggtgcatcttgggcgggagccagtggcttactatccagtccaattcaggagaccctggaatcaatggctggagaagttacaagagtagtagatgaacaactaaaggcgttgcttgagtccatggttgatgctgctgagaatctttgtcccaatgtgatgaaaaaagcccacattcgacaagacttgattcatgccagcaccgaaaagatttctattccacgtacctttgttaaaaatgtcctgttggagcagtctggaattgatatccttaacaaaattagtgaagtaaaattgacagtggcctcgttcctgtctgatagaattgtggatgaaatcctggatgcactctcacattgccatcataaactggctgaccatttcagcagacgtggcaagacccttcctcaacaagaatccttagagatcgagctggctgaggagaagccagttaaacgttccatcatcacagtggaggagctaacagagatagagcgtttggaagatctggatacctgtatgatgacccctaaatccaaaaggaagagtatccatagccgaatgctgcggcctgtttctagggcttttgaaatggagtttgatctagataaagcgctggaagaggtaccaattcacatcgaagacccgcccttcccatccctcagacaggagaagcggagctcgggatttatctctgagttgccctctgaagaggggaagaagctggaacactttaccaagttaaggccaaaaaggaataagaagcagcaacccacccaagcagcggtctgtgctgccaacatagtctcacaagatggtgaacagaatggtctcatggggagagtggatgaaggtgtagatgaattttttaccaagaaggtgaccaaaatggattccaagaaatggtcaacaagaggctcagagtcccatgagcttaatgaaggaggagatgaaaagaaaaagcgagattctcggaaaagtagtggctttctcaatttaatcaaatcccggtccaaatccgagcgaccaccaacgatcttgatgacagaagaaccctcctcaccaaaaggggcagtcagaagtccacctgtggactgtcccaggaaggacacaaaggccgccgagcacaatggcaattctgaacggatagaggagataaaaacacctgactcctttgaagagagtcaaggggaagaaatagggaaggtggaacggagtgacagcaagagcagcccacaggcagggcggaggtatggggtccaggtgatgggcagtggtctgctggcagagatgaaagccaagcaagagaagagagctgcgtgtgcgcagaagaagcttgggaatgatgccgtatcccaggattcttccagcccagctttgagcggcgtagaacggtcggatggaggtggggcagtgcctaaactgcacccaggtcttccagagaaccgctttggtttgggaacaccagaaaagaataccaaagcagaacccaaagcggaagcaggctccaggtctcggagctcatccagcacacctacgagcccgaagcccctcctgcagtcccccaaacccagtctggcagcacggcccgtcatcccgcagaaaccaagaaccgcctcacggcctgatgacattccagactctccatctagcccgaaagttgcccttcttccacctgtcctgaaaaaagttccttcagacaaagagagagatggccagagtagcccccagcccagccccaggacattttcacaggaagtttcaaggagaagctggggccagcaggcccaggagtatcaagaacaaaagcaacggtcctccagtaaagatggccatcaaggcagcaaatctaatgactccggggaagaagcagaaaaagagtttatttttgtgtaaaggtcacccacgcagaagtcttcctgtgcagggtgctttggtagccatcagagaggaaccaagggcaacatcttttcttcccaggcgttcttctctgggtgctttattctcttctttttctttatttcgcccccacccccatcccctgccttttttttttttttttttttttttttttgtatagaaacagatccatttcttggtaatcaaagcacatttgtttggtcttcctccaaccctttgcatttgatttctaaacattccttcatatgcctttaatgaaagccagcaattatcccatgggccctacttgaatttatctgaggcagctacagattgccctgcaagatgagtttttggagataaatgaaataactggacacacactcacacaagtaacaccacagcagacctcggagtactgctaagtgtacctgtgtcaaatccgcacaggactcaatatagcaatttattcttgatgtatgcaattgcacattgtaattatattaacagagcacactaataatttgtatagattatatatattagatcttgggtatggtttttaccttctcccatggggaacttcttccttcctgatgtggaattgtacatttaaagcttggtcggtgacctttgcataccatcaacgagcacagctaagaacagagtgagagaggcccatggctgattttaccatgtgcccagattaatgtatatagttgattggaatgaggttttatgaatattcatgtttttgaaggcctttaatttctgtctgcatattagcttttaatgtgtgattttaagagagaatactttgacacctgtaaaaatcaaaatactactctttataagacatttcacaaatattcacttacattacaggctggaagtattttattcatatgtatatttataccaataaaatgattttacaagtggaa

SEQ ID NO: 3178 - DNA, 707 bp, Homo sapiens
  source 1..707: mol_type = unassigned DNA
tttatgaaggagagatctaaagaaataagacttgttattggtatggacttagaggtaggatttctctcagagcaaggaggtttttcaagcaaattctgataccaacctctttcctttggaagtaggaaacagagtccctagagacaatttacttcaacttttgggaactttgaagatcagtctttgagaacttagttgttgtctagtggccaactagatgttgtgtttctgaataatagaaattaacaggtgaacttggatgtcatggattaaaaattaagtgtcagtgtagctactgtaggagcactttcatgtactttgttgtttctgcttccagggacctaatacctatcattgctgctctggaatataatcagtggttcacaaaactgtcctctaaggatctaaaactgtccactgatgtctgtgaacagatcttgagggtggtgagtaggtccaatcgactggaagaattggtgttggaaaatgctggacttagaacagattttgcacaaaaactggccagtgctctagcacataatcccaactcaggactccacacaattaaccttgctggcaacccactggaggatagaggtactgcagagttctcattatcattgatgccagaattgtaagaggattagagaattttaatttagccatgcctgaagagctgtatcaagctaagttgtaattataagtgc

SEQ ID NO: 3179 - DNA, 3201 bp, Homo sapiens
  source 1..3201: mol_type = unassigned DNA
gaagtacctccatctttcaagcaattttttagtagttctctggctttgatgcacatcaacctttcaggcacaaaactgtctcctgagcccttaaaagcactgttattgggcctggcttgtaatcataacttgaaaggggtttctctggatctcagcaactgtgagcttggccattgtctgagatcaggaggtgctcaagtattagaaggttgcattgctgaaatacacaacatcaccagcttagacatctctgacaatggtttagaatctgacctatctaccttaatagtgtggctcagtaaaaacagatcaatacaacacctggcgttaggcaaaaattttaataatatgaaatccaaaaatctgacacctgtattggacaacttagtacagatgattcaagatgaagaatcacctctgcagtccttgtccctggctgactcgaaactcaagactgaggtcaccatcatcatcaatgccctgggaagcaacacctccctgaccaaagtggacattagcggcaacggaatgggggacatgggagcgaagatgctggccaaagcactgcagatcaacactaagctcaggactgtaatatgggacaagaacaacatcactgcacaaggctttcaggatatagctgttgctatggaaaagaactacacattaagatttatgccaattcctatgtatgatgcttctcaagccctaaaaacaaaccctgaaaaaacagaagacgctctgcaaaagatagaaaactacctgctacgaaatcacgagactagaaaataccttcaagagcaggcctaccgcctgcagcagggtattgtcaccagcaccacccagcagatgattgacagaatatgtgtgaaagtacaagatcatctcaactccttacgaaattgtgggggagacgctatccaggaagatttaaaatcagcagagcggctcatgcgtgatgctaagaactctaaaacgttgttaccaaatttataccatgttggtggtgcatcttgggcgggagccagtggcttactatccagtccaattcaggagaccctggaatcaatggctggagaagttacaagagtagtagatgaacaactaaaggcgttgcttgagtccatggttgatgctgctgagaatctttgtcccaatgtgatgaaaaaagcccacattcgacaagacttgattcatgccagcaccgaaaagatttctattccacgtacctttgttaaaaatgtcctgttggagcagtctggaattgatatccttaacaaaattagtgaagtaaaattgacagtggcctcgttcctgtctgatagaattgtggatgaaatcctggatgcactctcacattgccatcataaactggctgaccatttcagcagacgtggcaagacccttcctcaacaagaatccttagagatcgagctggctgaggagaagccagttaaacgttccatcatcacagtggaggagctaacagagatagagcgtttggaagatctggatacctgtatgactctctgctgtacaagtatgacccctaaatccaaaaggaagagtatccatagccgaatgctgcggcctgtttctagggcttttgaaatggagtttgatctagataaagcgctggaagaggtaccaattcacatcgaagacccgcccttcccatccctcagacaggagaagcggagctcgggatttatctctgagttgccctctgaagaggggaagaagctggaacactttaccaagttaaggccaaaaaggaataagaagcagcaacccacccaagcagcggtctgtgctgccaacatagtctcacaagatggtgaacagaatggtctcatggggagagtggatgaaggtgtagatgaattttttaccaagaaggtgaccaaaatggattccaagaaatggtcaacaagaggctcagagtcccatgagcttaatgaaggaggagatgaaaagaaaaagcgagattctcggaaaagtagtggctttctcaatttaatcaaatcccggtccaaatccgagcgaccaccaacgatcttgatgacagaagaaccctcctcaccaaaaggggcagtcagaagtccacctgtggactgtcccaggaaggacacaaaggccgccgagcacaatggcaattctgaacggatagaggagataaaaacacctgactcctttgaagagagtcaaggggaagaaatagggaaggtggaacggagtgacagcaagagcagcccacaggcagggcggaggtatggggtccaggtgatgggcagtggtctgctggcagagatgaaagccaagcaagagaagagagctgcgtgtgcgcagaagaagcttgggaatgatgccgtatcccaggattcttccagcccagctttgagcggcgtagaacggtcggatggaggtggggcagtgcctaaactgcacccaggtcttccagagaaccgctttggtttgggaacaccagaaaagaataccaaagcagaacccaaagcggaagcaggctccaggtctcggagctcatccagcacacctacgagcccgaagcccctcctgcagtcccccaaacccagtctggcagcacggcccgtcatcccgcagaaaccaagaaccgcctcacggcctgatgacattccagactctccatctagcccgaaagttgcccttcttccacctgtcctgaaaaaagttccttcagacaaagagagagatggccagagtagcccccagcccagccccaggacattttcacaggaagcatgcccaactaatttctgaaacagtagtgcaaagaggagattattacaaaagacattcagatcatgacagtggcaagccttccagtagagggaaaagatcttcaaaactgtactccaccattgcagaagaggaagtgaatgcaattgggcacaggaagtcacagccaacaaatgtttcaaggagaagctggggccagcaggcccaggagtatcaagaacaaaagcaacggtcctccagtaaagatggccatcaaggcagcaaatctaatgactccggggaagaagcagaaaaagagtttatttttgtgtaaaggtcacccacgcagaagtcttcctgtgcagggtgctttggtagccatcagagaggaaccaagggcaacatcttttcttcccaggcgttcttctctgggtgctttattct

SEQ ID NO: 3180 - DNA, 1291 bp, Homo sapiens
  source 1..1291: mol_type = unassigned DNA
acaaagagagagatggccagagtagcccccagcccagccccaggacattttcacaggaagtgcaaagaggagattattacaaaagacattcagatcatgacagtggcaagccttccagtagagggaaaagatcttcaaaactgtactccaccattgcagaagaggaagtgaatgcaattgggcacaggaagtcacagccaacaaatgtttcaaggagaagctggggccagcaggcccaggagtatcaagaacaaaagcaacggtcctccagtaaagatggccatcaaggcagcaaatctaatgactccggggaagaagcagaaaaagagtttatttttgtgtaaaggtcacccacgcagaagtcttcctgtgcagggtgctttggtagccatcagagaggaaccaagggcaacatcttttcttcccaggcgttcttctctgggtgctttattctcttctttttctttatttcgcccccacccccatcccctgccttttttttttttttttttttttttttttgtatagaaacagatccatttcttggtaatcaaagcacatttgtttggtcttcctccaaccctttgcatttgatttctaaacattccttcatatgcctttaatgaaagccagcaattatcccatgggccctacttgaatttatctgaggcagctacagattgccctgcaagatgagtttttggagataaatgaaataactggacacacactcacacaagtaacaccacagcagacctcggagtactgctaagtgtacctgtgtcaaatccgcacaggactcaatatagcaatttattcttgatgtatgcaattgcacattgtaattatattaacagagcacactaataatttgtatagattatatatattagatcttgggtatggtttttaccttctcccatggggaacttcttccttcctgatgtggaattgtacatttaaagcttggtcggtgacctttgcataccatcaacgagcacagctaagaacagagtgagagaggcccatggctgattttaccatgtgcccagattaatgtatatagttgattggaatgaggttttatgaatattcatgtttttgaaggcctttaatttctgtctgcatattagcttttaatgtgtgattttaagagagaatactttgacacctgtaaaaatcaaaatactactctttataagacatttcacaaatattcacttacattacaggctggaagtattttattcatatgtatatttataccaataaaatgattttacaagtggaa

SEQ ID NO: 3181 - DNA, 368 bp, Homo sapiens
  source 1..368: mol_type = unassigned DNA
caattctcctgcctcaggctcccaaagtgctgggattataggcagccaccgcaccaggagaggctggatcttatagacatcctggcccctgtgtgcaagtccactgggtccagaagtgaggagggggctgcacagatgtgtggagaccctggcccaggagggcctctctgggagaacgtgcaatagggcaaagcgctggcagctgggacagaaagctgcagggctgggacctccggcctccatccaaagccctacgtctgtgaccctcgacgacagtccctgtccatctgtacctggccctctgtcgggacttcctctgtgtctctgaagacccccgtctctccctgcctgctccgtgccctcctcct

SEQ ID NO: 3182 - DNA, 546 bp, Homo sapiens
  source 1..546: mol_type = unassigned DNA
atggcagccctacgtctgtgaccctcgacgacagtccctgtccatctgtacctggccctctgtcgggacttcctctgtgtctctgaagacccccgtctctccctgcctgctccgtgccctcctcctgctgggtccgtgtcccgccacacgcccccagtctctcagccactccacccacgagatgctctccctggatccatcgggtcccgagtgggattgcccactgggctccaaggacctggaggaagagggcccctggggagggggctctggcctgccgcccacaggctgcttccctggctcctggcgccaggacgtgggcctggactgcaagggatcccccgagggggccgaggcccgggcttggactgtctactactacagcctcctgcagagctgtctgcagcaagctggccttccggagactcaggaccgcggccaggtgccccgcacaggctgtcctggggcggaggtgaccttgtgcgttctgggctcccccagcacctttctgcctgtgctgctggagggtggggtccagagcccggg

SEQ ID NO: 3183 - DNA, 2968 bp, Homo sapiens
  source 1..2968: mol_type = unassigned DNA
gctgtgccactgccaccgccgccgccgctgcatcccgcccggtccgagtccgcccgccacgcccgccgagccgctgccgccgccagtctctcagccactccacccacgagatgctctccctggatccatcgggtcccgagtgggattgcccactgggctccaaggacctggaggaagagggcccctggggagggggctctggcctgccgcccacaggctgcttccctggctcctggcgccaggacgtgggcctggactgcaagggatcccccgagggggccgaggcccgggcttggactgtctactactacagcctcctgcagagctgtctgcagcaagctggccttccggagactcaggaccgcggccaggtgccccgcacaggctgtcctggggcggaggtgaccttgtgcgttctgggctcccccagcacctttctgcctgtgctgctggagggtggggtccagagcccgggaaacatgctcctttgcctgtcccctgcttggctgatgaaggtgccagcacccgggcagccgggtgaggcagccctgctagtctccaaggctgtgagcttccaccctgggggcctgacattcctggatgactttgtccccccgcgccgtgccacctactttttggcaggcctgggcctggggcctggccggggccgagaggcagcagaactcgcccgtgacctgacctgccccacaggagcttcggctgagctggcccggctgctggaggaccggctgctgacaaggcagttgctggcccagcagggtggtgtggctgtgccagcaaccctggctttcacctacaagccgccggggctgctgcggggaggggatgccagcctagggctacggctggtggagctgagtggcaaagagggccaggagacgctggtgaaagaggaagtggaggcttttctgcgctccgaggccctgggtgatatcctgcaggtagctgtgaagctcagtggctggcgctggcgggggcggcaggcatggcgtctgcacccgcgggcagagctgggtgcagtggtggacacagtgctggcgctgctggagaagctggaggaggaggagagtgtcctggtggaggctgtgtacccacctgcccagctgccctgctcagatggtccttcacccggccccggcctggccgtgcgaatctgtgctgtggtgtgtcggacacagggtgataggccactgctgagcaaggtggtgtgcggcgtgggccgcggggaccgccctctacggcaccacaactccctgccgaggacgctggaggccgcgctggccgccgtgctggctctggaggccggcctgagtgccgagcagcgcggcgggcgccgggcgcacacggacttcctgggcgtggatttcgcgctgacagcggccggcggcgtgctgaccccagtggccctggagctgaacggcggcctgtgtctggaggcgtgcggcgcgctggaggggctgtgggccgcgccgcggctggggccggcggccgacgaggcggtggcggcgccgctggtggagaccatgcttcggcggtcggcgcgctgcctcatggagggaaaacagctgctggtggtcggcgctggcggcgtcagcaagaagttcgtgtgggaggcggcgcgcgactacgggctccagctgcacctcgtggagtcagaccccaaccactttgcatcccagttggtacagaccttcatccactttgacatgacagagcaccggagggatgaggagaacgcacggctgctggcagagttggtgcgggctcgcggcctcaagctagatggctgcttctcctactgggatgactgcctggtgctcacagccctgctctgccaggagctaggtctgccctgcagctccccagctgccatgcgcctggctaagcagaagagcctcacccagctgcacctgttgcaccaccatggcccaccctggcctgcgccctccctccatgctgtgccctgctgcccactggagagtgaggctgatgtggagagggccgtgcaccaggtacccctgccaggtgtcatgaagctggagttcggggcaggtgcagtgggtgtccggctggtagaggatgcgccacagtgccatgagcacttttcccggattacccgagacttgcagggcgaggccgaccacccaggcattgggctgggctggggcaatgccatgctgctgatggagtttgtggagggcaccgagcacgacgtggacctggtgttgtttggtgggcggttgctggctgcctttgtctccgacaatggccctacgaggctgcctggcttcactgagacggcggcctgcatgcccaccgggctggcaccagagcaggaggcacagatggttcaggcagccttccgctgttgcctgggctgcgggttgctcgatggagtcttcaacgtggagctcaagctgaccggggctgggcctcggcttatcgagatcaacccccgcatgggtggcttctacctgcgtgattggatcctggagctctatggtgttgacctgctgctggctgctgttatggtggcctgtggcttgcgtcctgccctgcccacccgcccacgtgctcgtggccatctggtgggcgtcatgtgccttgtgtcccagcacctgcaggccctgagttccaccgccagccgtgagaccctgcaggccctgcacgaccgtggactgctacgcctcaatctgctggaggaggccctggtgcctggcgagtatgaggagccctactgcagtgtggcctgtgccggacccagccccaccgaggcccgtctccgcctgctgggcctctgccagggcctgggcatcgatgggcccagctaccctgttgcccacttcctgtctcacttcaaatagcactggggtcagggggcagggaagcagtgctgggtggaggcactgtggtgccctctgctccctggagctcttcctgcttctct

SEQ ID NO: 3184 - DNA, 2369 bp, Homo sapiens
  source 1..2369: mol_type = unassigned DNA
gctgtgccactgccaccgccgccgccgctgcatcccgcccggtccgagtccgcccgccacgcccgccgagccgctgccgccgccagtctctcagccactccacccacgagatggtgagtcttctgtggtccctcccccacaaggcccaagtccctgggcagagagtgggcccagaggacagcaggcagcacctaggacctaagcctgggagttgccccctgcagacagcttagacccacgaccagctcccccacccccaccctgcggctgcatcctgggaggtgggcactcttagtgccctgtgacattcattcattccatggcccctcagggagctcaccttctaggagacggcacagaggctctggccctggcaaactgggattcgagcccaggcatgaggcccagtcctctgccgtctgggccacagcacaccatctcccaacaaccaagagattctcttcgtcccagcctcatcagcccccaggggatgggagagggcaggcaccaggcaacaaggtccaaagagacctcacgacttgctcaaggtggccgagcctgtcccctggaggacagactcagctgccaggcctgtccaggcctggggactgcaaagaacaagaattccattcacacgaagcctcccagcagccccatattgggggggcgccagcctcagagaggggagggacgttaggtttcatccaaagaaagcatttccgtgactcaaaatatctgcaggggggatactgtctagcctcctaatgtttagcccagggctgggcacacagtagggcttcaagacctacgtggggatgacagtggaatcacatttaggtgtcagcacactccatgccgggtcatgagacagaaataagccacctcagagtgatggctgggttcgttcattcatctactcttcagtcaacaaacacttactgagaagtggctgtgtgccaggcacgctttaggtgctggggttgcctccatgaacaaaacaagcagaaaactctgctgctgtgaagcaagctaaggcggagcccagcatggcaggggcgggaggggctggctggcaagacattgcttcctgccctccccccaggggcaccacacagaacagtttacaaagcactcccacggttgcgttcccattaacaagccttcgcccccaacacaagcctttcctctcctagtccccgggacggtgtcagccctgaacatagcccaggctgggagagtggggggcttacacccttgggtgacttaatgtgcccactggcccaccctgcccaagacctaccacttctgccctctcagctctccctggatccatcgggtcccgagtgggattgcccactgggctccaaggacctggaggaagagggcccctggggagggggctctggcctgccgcccacaggctgcttccctggctcctggcgccaggacgtgggcctggactgcaagggatcccccgagggggccgaggcccgggcttggactgtctactactacagcctcctgcagagctgtctgcagcaagctggccttccggagactcaggaccgcggccaggtgccccgcacaggctgtcctggggcggaggtgaccttgtgcgttctgggctcccccagcacctttctgcctgtgctgctggagggtggggtccagagcccgggaaacatgctcctttgcctgtcccctgcttggctgatgaaggtgccagcacccgggcagccgggtgaggcagccctgctagtctccaaggctgtgagcttccaccctgggggcctgacattcctggatgactttgtccccccgcgccgtgccacctactttttggcaggcctgggcctggggcctggccggggccgagaggcagcagaactcgcccgtgacctgacctgccccacaggagcttcggctgagctggcccggctgctggaggaccggctgctgacaaggcagttgctggcccagcagggtggtgtggctgtgccagcaaccctggctttcacctacaagccgccggggctgctgcggggaggggatgccagcctagggctacggctggtggagctgagtggcaaagagggccaggagacgctggtgaaagaggaaaggacctggctgggccccaagccttggacaaatcctgggaaaacctgagactagaacccttgtcttcctcttacccaaattctaggatagctctgaagcctgctggaaacttggtggcatccaacctgcctcattcggcctgaccggtagaggcaggtggcctgtggacagaagtaatcctctttctgctcaccccaggcagacacaactgcctatgttcccccgatgagaggaaacaggctgagaga

SEQ ID NO: 3185 - DNA, 3942 bp, Homo sapiens
  source 1..3942: mol_type = unassigned DNA
gctgtgccactgccaccgccgccgccgctgcatcccgcccggtccgagtccgcccgccacgcccgccgagccgctgccgccgccagctctccctggatccatcgggtcccgagtgggattgcccactgggctccaaggacctggaggaagagggcccctggggagggggctctggcctgccgcccacaggctgcttccctggctcctggcgccaggacgtgggcctggactgcaagggatcccccgagggggccgaggcccgggcttggactgtctactactacagcctcctgcagagctgtctgcagcaagctggccttccggagactcaggaccgcggccaggtgccccgcacaggctgtcctggggcggaggtgaccttgtgcgttctgggctcccccagcacctttctgcctgtgctgctggagggtggggtccagagcccgggaaacatgctcctttgcctgtcccctgcttggctgatgaaggtgccagcacccgggcagccgggtgaggcagccctgctagtctccaaggctgtgagcttccaccctgggggcctgacattcctggatgactttgtccccccgcgccgtgccacctactttttggcaggcctgggcctggggcctggccggggccgagaggcagcagaactcgcccgtgacctgacctgccccacaggagcttcggctgagctggcccggctgctggaggaccggctgctgacaaggcagttgctggcccagcagggtggtgtggctgtgccagcaaccctggctttcacctacaagccgccggggctgctgcggggaggggatgccagcctagggctacggctggtggagctgagtggcaaagagggccaggagacgctggtgaaagaggaagtggaggcttttctgcgctccgaggccctgggtgatatcctgcaggtagctgtgaagctcagtggctggcgctggcgggggcggcaggcatggcgtctgcacccgcgggcagagctgggtgcagtggtggacacagtgctggcgctgctggagaagctggaggaggaggagagtgtcctggtggaggctgtgtacccacctgcccagctgccctgctcagatggtccttcacccggccccggcctggccgtgcgaatctgtgctgtggtgtgtcggacacagggtgataggccactgctgagcaaggtggtgtgcggcgtgggccgcggggaccgccctctacggcaccacaactccctgccgaggacgctggaggtggcgctggcccagtgcggcctgggcgaggaggcgcaggtggcggctgtgcggcagcgcgtcaaggcggcggccgaggccgcgctggccgccgtgctggctctggaggccggcctgagtgccgagcagcgcggcgggcgccgggcgcacacggacttcctgggcgtggatttcgcgctgacagcggccggcggcgtgctgaccccagtggccctggagctgaacggcggcctgtgtctggaggcgtgcggcgcgctggaggggctgtgggccgcgccgcggctggggccggcggccgacgaggcggtggcggcgccgctggtggagaccatgcttcggcggtcggcgcgctgcctcatggagggaaaacagctgctggtggtcggcgctggcggcgtcagcaagaagttcgtgtgggaggcggcgcgcgactacgggctccagctgcacctcgtggagtcagaccccaaccactttgcatcccagttggtacagaccttcatccactttgacatgacagagcaccggagggatgaggagaacgcacggctgctggcagagttggtgcgggctcgcggcctcaagctagatggctgcttctcctactgggatgactgcctggtgctcacagccctgctctgccaggagctaggtctgccctgcagctccccagctgccatgcgcctggctaagcagaagagcctcacccagctgcacctgttgcaccaccatggcccaccctggcctgcgccctccctccatgctgtgccctgctgcccactggagagtgaggctgatgtggagagggccgtgcaccaggtacccctgccaggtgtcatgaagctggagttcggggcaggtgcagtgggtgtccggctggtagaggatgcgccacagtgccatgagcacttttcccggattacccgagacttgcagggcgaggccgaccacccaggcattgggctgggctggggcaatgccatgctgctgatggagtttgtggagggcaccgagcacgacgtggacctggtgttgtttggtgggcggttgctggctgcctttgtctccgacaatggccctacgaggctgcctggcttcactgagacggcggcctgcatgcccaccgggctggcaccagagcaggaggcacagatggttcaggcagccttccgctgttgcctgggctgcgggttgctcgatggagtcttcaacgtggagctcaagctgaccggggctgggcctcggcttatcgagatcaacccccgcatgggtggcttctacctgcgtgattggatcctggagctctatggtgttgacctgctgctggctgctgttatggtggcctgtggcttgcgtcctgccctgcccacccgcccacgtgctcgtggccatctggtgggcgtcatgtgccttgtgtcccagcacctgcaggccctgagttccaccgccagccgtgagaccctgcaggccctgcacgaccgtggactgctacgcctcaatctgctggaggaggccctggtgcctggcgagtatgaggagccctactgcagtgtggcctgtgccggacccagccccaccgaggcccgtctccgcctgctgggcctctgccagggcctgggcatcgatgggcccagctaccctgttgcccacttcctgtctcacttcaaatagcactggggtcagggggcagggaagcagtgctgggtggaggcactgtggtgccctctgctccctggagctcttcctgcttctctccccatcaccatgccccagccccagcctggcccgctgcaatgcctaggtctgttccagagcagcagggcaatttagacaccaaggcatcctggactcaagggcctcttgccctcccgaaggccccagtccagcctacagcttccccagcattctagccttggagaaatgacaatggccacacacacacacacacacacacacacacacctctgacgccagctccccaggtgggagtgggcccaaacccagcccctcctgtccacctctccaggtctcactctcttcctgccatctacaagaggagaggacctggctgggccccaagccttggacaaatcctgggaaaacctgagactagaacccttgtcttcctcttacccaaattctaggatagctctgaagcctgctggaaacttggtggcatccaacctgcctcattcggcctgaccggtagaggcaggtggcctgtggacagaagtaatcctctttctgctcaccccaggcagacacaactgcctatgttcccccgatgagaggaaacaggctgagagaagaaaaatgactgctccaggattataccacagtggagagcgggtcacaggacatgatgcagggtccaggtttctgttttgatcaagtcttacatgcccattcagcttctaggcccccctcacctccctgccctcattcacaagtggccctgagacacgtgaacacctccctcctatgcatcacaaaccttctccaccgagctttggtgctttggcctctggcacacctaactagcattggcagaggagagtctacactctcttcctcattcagggaagatgctttaagaaatcctgcctctgtgcagcagaggagctggaggcagctccccaggcatccctccccaaataaaggcttatgtactggtgaa

SEQ ID NO: 3186 - DNA, 5065 bp, Homo sapiens
  source 1..5065: mol_type = unassigned DNA
cgagatggtgagtcttctgtggtccctcccccacaaggcccaagtccctgggcagagagtgggcccagaggacagcaggcagcacctaggacctaagcctgggagttgccccctgcagacagcttagacccacgaccagctcccccacccccaccctgcggctgcatcctgggaggtgggcactcttagtgccctgtgacattcattcattccatggcccctcagggagctcaccttctaggagacggcacagaggctctggccctggcaaactgggattcgagcccaggcatgaggcccagtcctctgccgtctgggccacagcacaccatctcccaacaaccaagagattctcttcgtcccagcctcatcagcccccaggggatgggagagggcaggcaccaggcaacaaggtccaaagagacctcacgacttgctcaaggtggccgagcctgtcccctggaggacagactcagctgccaggcctgtccaggcctggggactgcaaagaacaagaattccattcacacgaagcctcccagcagccccatattgggggggcgccagcctcagagaggggagggacgttaggtttcatccaaagaaagcatttccgtgactcaaaatatctgcaggggggatactgtctagcctcctaatgtttagcccagggctgggcacacagtagggcttcaagacctacgtggggatgacagtggaatcacatttaggtgtcagcacactccatgccgggtcatgagacagaaataagccacctcagagtgatggctgggttcgttcattcatctactcttcagtcaacaaacacttactgagaagtggctgtgtgccaggcacgctttaggtgctggggttgcctccatgaacaaaacaagcagaaaactctgctgctgtgaagcaagctaaggcggagcccagcatggcaggggcgggaggggctggctggcaagacattgcttcctgccctccccccaggggcaccacacagaacagtttacaaagcactcccacggttgcgttcccattaacaagccttcgcccccaacacaagcctttcctctcctagtccccgggacggtgtcagccctgaacatagcccaggctgggagagtggggggcttacacccttgggtgacttaatgtgcccactggcccaccctgcccaagacctaccacttctgccctctcagctctccctggatccatcgggtcccgagtgggattgcccactgggctccaaggacctggaggaagagggcccctggggagggggctctggcctgccgcccacaggctgcttccctggctcctggcgccaggacgtgggcctggactgcaagggatcccccgagggggccgaggcccgggcttggactgtctactactacagcctcctgcagagctgtctgcagcaagctggccttccggagactcaggaccgcggccaggtgccccgcacaggctgtcctggggcggaggtgaccttgtgcgttctgggctcccccagcacctttctgcctgtgctgctggagggtggggtccagagcccgggaaacatgctcctttgcctgtcccctgcttggctgatgaaggtgccagcacccgggcagccgggtgaggcagccctgctagtctccaaggctgtgagcttccaccctgggggcctgacattcctggatgactttgtccccccgcgccgtgccacctactttttggcaggcctgggcctggggcctggccggggccgagaggcagcagaactcgcccgtgacctgacctgccccacaggagcttcggctgagctggcccggctgctggaggaccggctgctgacaaggcagttgctggcccagcagggtggtgtggctgtgccagcaaccctggctttcacctacaagccgccggggctgctgcggggaggggatgccagcctagggctacggctggtggagctgagtggcaaagagggccaggagacgctggtgaaagaggaagtggaggcttttctgcgctccgaggccctgggtgatatcctgcaggtagctgtgaagctcagtggctggcgctggcgggggcggcaggcatggcgtctgcacccgcgggcagagctgggtgcagtggtggacacagtgctggcgctgctggagaagctggaggaggaggagagtgtcctggtggaggctgtgtacccacctgcccagctgccctgctcagatggtccttcacccggccccggcctggccgtgcgaatctgtgctgtggtgtgtcggacacagggtgataggccactgctgagcaaggtggtgtgcggcgtgggccgcggggaccgccctctacggcaccacaactccctgccgaggacgctggaggtggcgctggcccagtgcggcctgggcgaggaggcgcaggtggcggctgtgcggcagcgcgtcaaggcggcggccgaggccgcgctggccgccgtgctggctctggaggccggcctgagtgccgagcagcgcggcgggcgccgggcgcacacggacttcctgggcgtggatttcgcgctgacagcggccggcggcgtgctgaccccagtggccctggagctgaacggcggcctgtgtctggaggcgtgcggcgcgctggaggggctgtgggccgcgccgcggctggggccggcggccgacgaggcggtggcggcgccgctggtggagaccatgcttcggcggtcggcgcgctgcctcatggagggaaaacagctgctggtggtcggcgctggcggcgtcagcaagaagttcgtgtgggaggcggcgcgcgactacgggctccagctgcacctcgtggagtcagaccccaaccactttgcatcccagttggtacagaccttcatccactttgacatgacagagcaccggagggatgaggagaacgcacggctgctggcagagttggtgcgggctcgcggcctcaagctagatggctgcttctcctactgggatgactgcctggtgctcacagccctgctctgccaggagctaggtctgccctgcagctccccagctgccatgcgcctggctaagcagaagagcctcacccagctgcacctgttgcaccaccatggcccaccctggcctgcgccctccctccatgctgtgccctgctgcccactggagagtgaggctgatgtggagagggccgtgcaccaggtacccctgccaggtgtcatgaagctggagttcggggcaggtgcagtgggtgtccggctggtagaggatgcgccacagtgccatgagcacttttcccggattacccgagacttgcagggcgaggccgaccacccaggcattgggctgggctggggcaatgccatgctgctgatggagtttgtggagggcaccgagcacgacgtggacctggtgttgtttggtgggcggttgctggctgcctttgtctccgacaatggccctacgaggctgcctggcttcactgagacggcggcctgcatgcccaccgggctggcaccagagcaggaggcacagatggttcaggcagccttccgctgttgcctgggctgcgggttgctcgatggagtcttcaacgtggagctcaagctgaccggggctgggcctcggcttatcgagatcaacccccgcatgggtggcttctacctgcgtgattggatcctggagctctatggtgttgacctgctgctggctgctgttatggtggcctgtggcttgcgtcctgccctgcccacccgcccacgtgctcgtggccatctggtgggcgtcatgtgccttgtgtcccagcacctgcaggccctgagttccaccgccagccgtgagaccctgcaggccctgcacgaccgtggactgctacgcctcaatctgctggaggaggccctggtgcctggcgagtatgaggagccctactgcagtgtggcctgtgccggacccagccccaccgaggcccgtctccgcctgctgggcctctgccagggcctgggcatcgatgggcccagctaccctgttgcccacttcctgtctcacttcaaatagcactggggtcagggggcagggaagcagtgctgggtggaggcactgtggtgccctctgctccctggagctcttcctgcttctctccccatcaccatgccccagccccagcctggcccgctgcaatgcctaggtctgttccagagcagcagggcaatttagacaccaaggcatcctggactcaagggcctcttgccctcccgaaggccccagtccagcctacagcttccccagcattctagccttggagaaatgacaatggccacacacacacacacacacacacacacacacctctgacgccagctccccaggtgggagtgggcccaaacccagcccctcctgtccacctctccaggtctcactctcttcctgccatctacaagaggagaggacctggctgggccccaagccttggacaaatcctgggaaaacctgagactagaacccttgtcttcctcttacccaaattctaggatagctctgaagcctgctggaaacttggtggcatccaacctgcctcattcggcctgaccggtagaggcaggtggcctgtggacagaagtaatcctctttctgctcaccccaggcagacacaactgcctatgttcccccgatgagaggaaacaggctgagagaagaaaaatgactgctccaggattataccacagtggagagcgggtcacaggacatgatgcagggtccaggtttctgttttgatcaagtcttacatgcccattcagcttctaggcccccctcacctccctgccctcattcacaagtggccctgagacacgtgaacacctccctcctatgcatcacaaaccttctccaccgagctttggtgctttggcctctggcacacctaactagcattggcagaggagagtctacactctcttcctcattcagggaagatgctttaagaaatcctgcctctgtgcagcagaggagctggaggcagctccccaggcatccctccccaaataaaggcttatgtactggtg

SEQ ID NO: 3187 - DNA, 3971 bp, Homo sapiens
  source 1..3971: mol_type = unassigned DNA
ccactcccaaagtctaggggctggaaggccaggcagggacttggctgccctgactccttcgtctctctgtccctctgtctctgccatcagtctctcagccactccacccacgagatgctctccctggatccatcgggtcccgagtgggattgcccactgggctccaaggacctggaggaagagggcccctggggagggggctctggcctgccgcccacaggctgcttccctggctcctggcgccaggacgtgggcctggactgcaagggatcccccgagggggccgaggcccgggcttggactgtctactactacagcctcctgcagagctgtctgcagcaagctggccttccggagactcaggaccgcggccaggtgccccgcacaggctgtcctggggcggaggtgaccttgtgcgttctgggctcccccagcacctttctgcctgtgctgctggagggtggggtccagagcccgggaaacatgctcctttgcctgtcccctgcttggctgatgaaggtgccagcacccgggcagccgggtgaggcagccctgctagtctccaaggctgtgagcttccaccctgggggcctgacattcctggatgactttgtccccccgcgccgtgccacctactttttggcaggcctgggcctggggcctggccggggccgagaggcagcagaactcgcccgtgacctgacctgccccacaggagcttcggctgagctggcccggctgctggaggaccggctgctgacaaggcagttgctggcccagcagggtggtgtggctgtgccagcaaccctggctttcacctacaagccgccggggctgctgcggggaggggatgccagcctagggctacggctggtggagctgagtggcaaagagggccaggagacgctggtgaaagaggaagtggaggcttttctgcgctccgaggccctgggtgatatcctgcaggtagctgtgaagctcagtggctggcgctggcgggggcggcaggcatggcgtctgcacccgcgggcagagctgggtgcagtggtggacacagtgctggcgctgctggagaagctggaggaggaggagagtgtcctggtggaggctgtgtacccacctgcccagctgccctgctcagatggtccttcacccggccccggcctggccgtgcgaatctgtgctgtggtgtgtcggacacagggtgataggccactgctgagcaaggtggtgtgcggcgtgggccgcggggaccgccctctacggcaccacaactccctgccgaggacgctggaggtggcgctggcccagtgcggcctgggcgaggaggcgcaggtggcggctgtgcggcagcgcgtcaaggcggcggccgaggccgcgctggccgccgtgctggctctggaggccggcctgagtgccgagcagcgcggcgggcgccgggcgcacacggacttcctgggcgtggatttcgcgctgacagcggccggcggcgtgctgaccccagtggccctggagctgaacggcggcctgtgtctggaggcgtgcggcgcgctggaggggctgtgggccgcgccgcggctggggccggcggccgacgaggcggtggcggcgccgctggtggagaccatgcttcggcggtcggcgcgctgcctcatggagggaaaacagctgctggtggtcggcgctggcggcgtcagcaagaagttcgtgtgggaggcggcgcgcgactacgggctccagctgcacctcgtggagtcagaccccaaccactttgcatcccagttggtacagaccttcatccactttgacatgacagagcaccggagggatgaggagaacgcacggctgctggcagagttggtgcgggctcgcggcctcaagctagatggctgcttctcctactgggatgactgcctggtgctcacagccctgctctgccaggagctaggtctgccctgcagctccccagctgccatgcgcctggctaagcagaagagcctcacccagctgcacctgttgcaccaccatggcccaccctggcctgcgccctccctccatgctgtgccctgctgcccactggagagtgaggctgatgtggagagggccgtgcaccaggtacccctgccaggtgtcatgaagctggagttcggggcaggtgcagtgggtgtccggctggtagaggatgcgccacagtgccatgagcacttttcccggattacccgagacttgcagggcgaggccgaccacccaggcattgggctgggctggggcaatgccatgctgctgatggagtttgtggagggcaccgagcacgacgtggacctggtgttgtttggtgggcggttgctggctgcctttgtctccgacaatggccctacgaggctgcctggcttcactgagacggcggcctgcatgcccaccgggctggcaccagagcaggaggcacagatggttcaggcagccttccgctgttgcctgggctgcgggttgctcgatggagtcttcaacgtggagctcaagctgaccggggctgggcctcggcttatcgagatcaacccccgcatgggtggcttctacctgcgtgattggatcctggagctctatggtgttgacctgctgctggctgctgttatggtggcctgtggcttgcgtcctgccctgcccacccgcccacgtgctcgtggccatctggtgggcgtcatgtgccttgtgtcccagcacctgcaggccctgagttccaccgccagccgtgagaccctgcaggccctgcacgaccgtggactgctacgcctcaatctgctggaggaggccctggtgcctggcgagtatgaggagccctactgcagtgtggcctgtgccggacccagccccaccgaggcccgtctccgcctgctgggcctctgccagggcctgggcatcgatgggcccagctaccctgttgcccacttcctgtctcacttcaaatagcactggggtcagggggcagggaagcagtgctgggtggaggcactgtggtgccctctgctccctggagctcttcctgcttctctccccatcaccatgccccagccccagcctggcccgctgcaatgcctaggtctgttccagagcagcagggcaatttagacaccaaggcatcctggactcaagggcctcttgccctcccgaaggccccagtccagcctacagcttccccagcattctagccttggagaaatgacaatggccacacacacacacacacacacacacacacacctctgacgccagctccccaggtgggagtgggcccaaacccagcccctcctgtccacctctccaggtctcactctcttcctgccatctacaagaggagaggacctggctgggccccaagccttggacaaatcctgggaaaacctgagactagaacccttgtcttcctcttacccaaattctaggatagctctgaagcctgctggaaacttggtggcatccaacctgcctcattcggcctgaccggtagaggcaggtggcctgtggacagaagtaatcctctttctgctcaccccaggcagacacaactgcctatgttcccccgatgagaggaaacaggctgagagaagaaaaatgactgctccaggattataccacagtggagagcgggtcacaggacatgatgcagggtccaggtttctgttttgatcaagtcttacatgcccattcagcttctaggcccccctcacctccctgccctcattcacaagtggccctgagacacgtgaacacctccctcctatgcatcacaaaccttctccaccgagctttggtgctttggcctctggcacacctaactagcattggcagaggagagtctacactctcttcctcattcagggaagatgctttaagaaatcctgcctctgtgcagcagaggagctggaggcagctccccaggcatccctccccaaataaaggcttatgtactggtg

SEQ ID NO: 3188 - DNA, 1451 bp, Homo sapiens
  source 1..1451: mol_type = unassigned DNA; mol_type = unassigned DNA
ccggggagcaggagaagccatggctgatgagaaaccatccaacggtgttctggtccacatggtgaagttgctgatcaagacctttctagatggcatttttgatgatttgatggaaaataatgtgttaaatacagatgagatacaccttataggaaaatgtctaaagtttgtggtgagcaatgctgaaaacctggttgatgatatcactgagacagctcaaattgcaggcaaaatatttagggaacacctgtggaattccaaaaaacagctgagttcagatatatccagtgatggagaaagagaggcgaacatgcctggcctcaacatccgcaacaaagaattcaactatcttcataatcgaaatggttctgaacttgaccttttggggatgtgagatctacttgaaaaccttggatactcagtggttataaaagagaatctcacagctcaggaaatggaaacagcactaaggcagtttgctgctcacccagagcaccagtcctcagacagcacattcctggtgtttatgtcacatagcatcctgaatggaatctgtgggaccaagcactgggatcaagagccagatgttcttcacgatgacaccatctttgaaattttcaacaaccgtaactgccagagtctgaaagacaaacccaaggtcatcatcatgcaagcctgccgaggcaatggtgctgggattgtttggttcaccactgacagtggaaaagccagtgcagatactcatggtcggctcttgcaaggtaacatctgtaatgatgctgttacaaaggctcatgtggaaaaggacttcattgctttcaaatcttccacaccacataatgtttcttggagacatgaaacaaatggctctgtcttcatttcccaaattatctactacttcagagagtattcttggagtcatcatctagaggaaatttttcaaaaggttcaacattcatttgagaccccaaatatactgacccagctgcccaccattgaaagactatccatgacacgatatttctatctctttcctgggaattaaaactcataagaagcaactcaggaaaatgaaggcattatggtgtctatgaatctgctattagaaaaggtcaatttttgattaagaatatttttataccaaactgctcagctgtccaccttttcaaataccaggctaaaatcaatctcatatttttgctaaattaatgcttaataaatttttattataaaattgtgcttgttttctaattttgtcataaattaagtcatgcttataggagaaaaaattaagtattaaaaatcataaaaaatgaagaaataatcatcatcaacctttttaaaactattcataaaaactcaagttttttatatagcttatttattttgtatatccaattttgtgtgcttttattatattgttataacattactactagtaataaaactat

SEQ ID NO: 3189 - DNA, 1166 bp, Homo sapiens
  source 1..1166: mol_type = unassigned DNA; mol_type = unassigned DNA
gtgtacatgatttcattctgttcactttgttatgtcaaaaagaagaaaacaccttctgcttcctattttccaaaggaaagcagttatacacgagatcagagtctaattttatcttggcaaagaaaaagagaatttgaggactgggaattttccattcagggtaatatcaacaagctggtccactgagaggagagcaagcctgttgaaattgtttttgctttcacagctttttcctgtccggggagcaggagaagccatggctgatgagaaaccatccaacggtgttctggtccacatggtgaagttgctgatcaagacctttctagatggcatttttgatgatttgatggaaaataatgtgttaaatacagatgagatacaccttataggaaaatgtctaaagtttgtggtgagcaatgctgaaaacctggttgatgatatcactgagacagctcaaattgcaggcaaaatatttagggaacacctgtggaattccaaaaaacagctgagttcagcttttctggaaatccagggtgcccaacccagtggcaagttaaagctttgtcctcatgctcacttccatgaactaaagacaaaaagggcagatgagatatatccagtgatggagaaagagaggcgaacatgcctggcctcaacatccgcaacaaagaattcaactatcttcataatcgaaatggttctgaacttgaccttttggggatgtgagatctacttgaaaaccttggatactcagtggttataaaagagaatctcacagctcagatggtgctgggattgtttggttcaccactgacagtggaaaagccagtgcagatactcatggtcggctcttgcaaggtaacatctgtaatgatgctgttacaaaggctcatgtggaaaaggacttcattgctttcaaatcttccacaccacataatgtttcttggagacatgaaacaaatggctctgtcttcatttcccaaattatctactacttcagagagtattcttggagtcatcatctagaggaaatttttcaaaaggttcaacattcatttgagaccccaaatatactgacccagctgcccaccattgaaagactatccatgacacgatatttctatctctttcctgggaattaaaactcataagaagcaactcaggta

SEQ ID NO: 3190 - DNA, 1306 bp, Homo sapiens
  source 1..1306: mol_type = unassigned DNA; mol_type = unassigned DNA
gtgtacatgatttcattctgttcactttgttatgtcaaaaagaagaaaacaccttctgcttcctattttccaaaggaaagcagttatacacgagatcagagtctaattttatcttggcaaagaaaaagagaatttgaggactgggaattttccattcagggtaatatcaacaagctggtccactgagaggagagcaagcctgttgaaattgtttttgctttcacagctttttcctgtccggggagcaggagaagccatggctgatgagaaaccatccaacggtgttctggtccacatggtgaagttgctgatcaagacctttctagatggcatttttgatgatttgatggaaaataatgtgttaaatacagatgagatacaccttataggaaaatgtctaaagtttgtggtgagcaatgctgaaaacctggttgatgatatcactgagacagctcaaattgcaggcaaaatatttagggaacacctgtggaattccaaaaaacagctgagttcagatatatccagtgatggagaaagagaggcgaacatgcctggcctcaacatccgcaacaaagaattcaactatcttcataatcgaaatggttctgaacttgaccttttggggatgtgagatctacttgaaaaccttggatactcagtggttataaaagagaatctcacagctcaggaaatggaaacagcactaaggcagtttgctgctcacccagagcaccagtcctcagacagcacattcctggtgtttatgtcacatagcatcctgaatggaatctgtgggaccaagcactgggatcaagagccagatgttcttcacgatgacaccatctttgaaattttcaacaaccgtaactgccagagtctgaaagacaaacccaaggtcatcatcatgcaagcctgccgaggcaatggtgctgggattgtttggttcaccactgacagtggaaaagccagtgcagatactcatggtcggctcttgcaaggtaacatctgtaatgatgctgttacaaaggctcatgtggaaaaggacttcattgctttcaaatcttccacaccacataatgtttcttggagacatgaaacaaatggctctgtcttcatttcccaaattatctactacttcagagagtattcttggagtcatcatctagaggaaatttttcaaaaggttcaacattcatttgagaccccaaatatactgacccagctgcccaccattgaaagactatccatgacacgatatttctatctctttcctgggaattaaaactcataagaagcaactcaggta

SEQ ID NO: 3191 - DNA, 819 bp, Homo sapiens
  source 1..819: mol_type = unassigned DNA; mol_type = unassigned DNA
gtgtacatgatttcattctgttcactttgttatgtcaaaaagaagaaaacaccttctgcttcctattttccaaaggaaagcagttatacacgagatcagagtctaattttatcttggcaaagaaaaagagaatttgaggactgggaattttccattcagggtaatatcaacaagctggtccactgagaggagagcaagcctgttgaaattgtttttgctttcacagctttttcctgtccggggagcaggagaagccatggctgatatatccagtgatggagaaagagaggcgaacatgcctggcctcaacatccgcaacaaagaattcaactatcttcataatcgaaatggttctgaacttgaccttttggggatgtgagatctacttgaaaaccttggatactcagtggttataaaagagaatctcacagctcagatggtgctgggattgtttggttcaccactgacagtggaaaagccagtgcagatactcatggtcggctcttgcaaggtaacatctgtaatgatgctgttacaaaggctcatgtggaaaaggacttcattgctttcaaatcttccacaccacataatgtttcttggagacatgaaacaaatggctctgtcttcatttcccaaattatctactacttcagagagtattcttggagtcatcatctagaggaaatttttcaaaaggttcaacattcatttgagaccccaaatatactgacccagctgcccaccattgaaagactatccatgacacgatatttctatctctttcctgggaattaaaactcataagaagcaactcaggta

SEQ ID NO: 3192 - DNA, 1196 bp, Homo sapiens
  source 1..1196: mol_type = unassigned DNA; mol_type = unassigned DNA
gtgtacatgatttcattctgttcactttgttatgtcaaaaagaagaaaacaccttctgcttcctattttccaaaggaaagcagttatacacgagatcagagtctaattttatcttggcaaagaaaaagagaatttgaggactgggaattttccattcagggtaatatcaacaagctggtccactgagaggagagcaagcctgttgaaattgtttttgctttcacagctttttcctgtccggggagcaggagaagccatggctgatgagaaaccatccaacggtgttctggtccacatggtgaagttgctgatcaagacctttctagatggcatttttgatgatttgatggaaaataatgtgttaaatacagatgagatacaccttataggaaaatgtctaaagtttgtggtgagcaatgctgaaaacctggttgatgatatcactgagacagctcaaattgcaggcaaaatatttagggaacacctgtggaattccaaaaaacagctgagttcagatatatccagtgatggagaaagagaggcgaacatgcctggcctcaacatccgcaacaaagaattcaactatcttcataatcgaaatggttctgaacttgaccttttggggatgtgagatctacttgaaaaccttggatactcagtggttataaaagagaatctcacagctcaggaaatggaaacagcactaaggcagtttgctgctcacccagagcaccagtcctcagacagcacattcctggtgtttatgtcacatagcatcctgaatggaatctgtgggaccaagcactgggatcaagagccagatgttcttcacgatgacaccatctttgaaattttcaacaaccgtaactgccagagtctgaaagacaaacccaaggtcatcatcatgcaagcctgccgaggcaatggtgctgggattgtttggttcaccactgacagtggaaaagccagtgcagatactcatggtcggctcttgcaaggtaacatctgtaatgatgctgttacaaaggctcatgtggaaaaggacttcattgctttcaaatcttccacaccacgttcaacattcatttgagaccccaaatatactgacccagctgcccaccattgaaagactatccatgacacgatatttctatctctttcctgggaattaaaactcataagaagcaactcaggta

SEQ ID NO: 3193 - DNA, 1168 bp, Homo sapiens
  source 1..1168: mol_type = unassigned DNA; mol_type = unassigned DNA
gtgtacatgatttcattctgttcactttgttatgtcaaaaagaagaaaacaccttctgcttcctattttccaaaggaaagcagttatacacgagatcagagtctaattttatcttggcaaagaaaaagagaatttgaggactgggaattttccattcagggtaatatcaacaagctggtccactgagaggagagcaagcctgttgaaattgtttttgctttcacagctttttcctgtccggggagcaggagaagccatggctgatgagaaaccatccaacggtgttctggtccacatggtgaagttgctgatcaagacctttctagatggcatttttgatgatttgatggaaaataatgtgttaaatacagatgagatacaccttataggaaaatgtctaaagtttgtggtgagcaatgctgaaaacctggttgatgatatcactgagacagctcaaattgcaggcaaaatatttagggaacacctgtggaattccaaaaaacagctgagttcagatatatccagtgatggagaaagagaggcgaacatgcctggcctcaacatccgcaacaaagaattcaactatcttcataatcgaaatggttctgaacttgaccttttggggatgtgagatctacttgaaaaccttggatactcagtggttataaaagagaatctcacagctcaggaaatggaaacagcactaaggcagtttgctgctcacccagagcaccagtcctcagacagcacattcctggtgtttatgtcacatagcatcctgaatggaatctgtgggaccaagcactgggatcaagagccagatgttcttcacgatgacaccatctttgaaattttcaacaaccgtaactgccagagtctgaaagacaaacccaagatggtgctgggattgtttggttcaccactgacagtggaaaagccagtgcagatactcatggtcggctcttgcaaggtaacatctgtaatgatgctgttacaaaggctcatgtggaaaaggacttcattgctttcaaatcttccacaccacgttcaacattcatttgagaccccaaatatactgacccagctgcccaccattgaaagactatccatgacacgatatttctatctctttcctgggaattaaaactcataagaagcaactcaggta

SEQ ID NO: 3194 - DNA, 709 bp, Homo sapiens
  source 1..709: mol_type = unassigned DNA; mol_type = unassigned DNA
gtgtacatgatttcattctgttcactttgttatgtcaaaaagaagaaaacaccttctgcttcctattttccaaaggaaagcagttatacacgagatcagagtctaattttatcttggcaaagaaaaagagaatttgaggactgggaattttccattcagggtaatatcaacaagctggtccactgagaggagagcaagcctgttgaaattgtttttgctttcacagctttttcctgtccggggagcaggagaagccatggctgatatatccagtgatggagaaagagaggcgaacatgcctggcctcaacatccgcaacaaagaattcaactatcttcataatcgaaatggttctgaacttgaccttttggggatgtgagatctacttgaaaaccttggatactcagtggttataaaagagaatctcacagctcagatggtgctgggattgtttggttcaccactgacagtggaaaagccagtgcagatactcatggtcggctcttgcaaggtaacatctgtaatgatgctgttacaaaggctcatgtggaaaaggacttcattgctttcaaatcttccacaccacgttcaacattcatttgagaccccaaatatactgacccagctgcccaccattgaaagactatccatgacacgatatttctatctctttcctgggaattaaaactcataagaagcaactcaggta

SEQ ID NO: 3195 - DNA, 1071 bp, Homo sapiens
  source 1..1071: mol_type = unassigned DNA; mol_type = unassigned DNA
gtgtacatgatttcattctgttcactttgttatgtcaaaaagaagaaaacaccttctgcttcctattttccaaaggaaagcagttatacacgagatcagagtctaattttatcttggcaaagaaaaagagaatttgaggactgggaattttccattcagggtaatatcaacaagctggtccactgagaggagagcaagcctgttgaaattgtttttgctttcacagctttttcctgtccggggagcaggagaagccatggctgatgagaaaccatccaacggtgttctggtccacatggtgaagttgctgatcaagacctttctagatggcatttttgatgatttgatggaaaataatgtgttaaatacagatgagatacaccttataggaaaatgtctaaagtttgtggtgagcaatgctgaaaacctggttgatgatatcactgagacagctcaaattgcaggcaaaatatttagggaacacctgtggaattccaaaaaacagctgagttcagatatatccagtgatggagaaagagaggcgaacatgcctggcctcaacatccgcaacaaagaattcaactatcttcataatcgaaatggttctgaacttgaccttttggggatgtgagatctacttgaaaaccttggatactcagtggttataaaagagaatctcacagctcagatggtgctgggattgtttggttcaccactgacagtggaaaagccagtgcagatactcatggtcggctcttgcaaggtaacatctgtaatgatgctgttacaaaggctcatgtggaaaaggacttcattgctttcaaatcttccacaccacataatgtttcttggagacatgaaacaaatggctctgtcttcatttcccaaattatctactacttcagagagtattcttggagtcatcatctagaggaaatttttcaaaaggttcaacattcatttgagaccccaaatatactgacccagctgcccaccattgaaagactatccatgacacgatatttctatctctttcctgggaattaaaactcataagaagcaactcaggta

SEQ ID NO: 3196 - DNA, 1401 bp, Homo sapiens
  source 1..1401: mol_type = unassigned DNA; mol_type = unassigned DNA
gtgtacatgatttcattctgttcactttgttatgtcaaaaagaagaaaacaccttctgcttcctattttccaaaggaaagcagttatacacgagatcagagtctaattttatcttggcaaagaaaaagagaatttgaggactgggaattttccattcagggtaatatcaacaagctggtccactgagaggagagcaagcctgttgaaattgtttttgctttcacagctttttcctgtccggggagcaggagaagccatggctgatgagaaaccatccaacggtgttctggtccacatggtgaagttgctgatcaagacctttctagatggcatttttgatgatttgatggaaaataatgtgttaaatacagatgagatacaccttataggaaaatgtctaaagtttgtggtgagcaatgctgaaaacctggttgatgatatcactgagacagctcaaattgcaggcaaaatatttagggaacacctgtggaattccaaaaaacagctgagttcagcttttctggaaatccagggtgcccaacccagtggcaagttaaagctttgtcctcatgctcacttccatgaactaaagacaaaaagggcagatgagatatatccagtgatggagaaagagaggcgaacatgcctggcctcaacatccgcaacaaagaattcaactatcttcataatcgaaatggttctgaacttgaccttttggggatgtgagatctacttgaaaaccttggatactcagtggttataaaagagaatctcacagctcaggaaatggaaacagcactaaggcagtttgctgctcacccagagcaccagtcctcagacagcacattcctggtgtttatgtcacatagcatcctgaatggaatctgtgggaccaagcactgggatcaagagccagatgttcttcacgatgacaccatctttgaaattttcaacaaccgtaactgccagagtctgaaagacaaacccaaggtcatcatcatgcaagcctgccgaggcaatggtgctgggattgtttggttcaccactgacagtggaaaagccagtgcagatactcatggtcggctcttgcaaggtaacatctgtaatgatgctgttacaaaggctcatgtggaaaaggacttcattgctttcaaatcttccacaccacataatgtttcttggagacatgaaacaaatggctctgtcttcatttcccaaattatctactacttcagagagtattcttggagtcatcatctagaggaaatttttcaaaaggttcaacattcatttgagaccccaaatatactgacccagctgcccaccattgaaagactatccatgacacgatatttctatctctttcctgggaattaaaactcataagaagcaactcaggta

SEQ ID NO: 3197 - DNA, 961 bp, Homo sapiens
  source 1..961: mol_type = unassigned DNA; mol_type = unassigned DNA
gtgtacatgatttcattctgttcactttgttatgtcaaaaagaagaaaacaccttctgcttcctattttccaaaggaaagcagttatacacgagatcagagtctaattttatcttggcaaagaaaaagagaatttgaggactgggaattttccattcagggtaatatcaacaagctggtccactgagaggagagcaagcctgttgaaattgtttttgctttcacagctttttcctgtccggggagcaggagaagccatggctgatgagaaaccatccaacggtgttctggtccacatggtgaagttgctgatcaagacctttctagatggcatttttgatgatttgatggaaaataatgtgttaaatacagatgagatacaccttataggaaaatgtctaaagtttgtggtgagcaatgctgaaaacctggttgatgatatcactgagacagctcaaattgcaggcaaaatatttagggaacacctgtggaattccaaaaaacagctgagttcagatatatccagtgatggagaaagagaggcgaacatgcctggcctcaacatccgcaacaaagaattcaactatcttcataatcgaaatggttctgaacttgaccttttggggatgtgagatctacttgaaaaccttggatactcagtggttataaaagagaatctcacagctcagatggtgctgggattgtttggttcaccactgacagtggaaaagccagtgcagatactcatggtcggctcttgcaaggtaacatctgtaatgatgctgttacaaaggctcatgtggaaaaggacttcattgctttcaaatcttccacaccacgttcaacattcatttgagaccccaaatatactgacccagctgcccaccattgaaagactatccatgacacgatatttctatctctttcctgggaattaaaactcataagaagcaactcaggta

SEQ ID NO: 3198 - DNA, 774 bp, Homo sapiens
  source 1..774: mol_type = unassigned DNA; mol_type = unassigned DNA
atggctgatatatccagtgatggagaaagagaggcgaacatgcctggcctcaacatccgcaacaaagaattcaactatcttcataatcgaaatggttctgaacttgaccttttggggatgtgagatctacttgaaaaccttggatactcagtggttataaaagagaatctcacagctcaggaaatggaaacagcactaaggcagtttgctgctcacccagagcaccagtcctcagacagcacattcctggtgtttatgtcacatagcatcctgaatggaatctgtgggaccaagcactgggatcaagagccagatgttcttcacgatgacaccatctttgaaattttcaacaaccgtaactgccagagtctgaaagacaaacccaaggtcatcatcatgcaagcctgccgaggcaatggtgctgggattgtttggttcaccactgacagtggaaaagccagtgcagatactcatggtcggctcttgcaaggtaacatctgtaatgatgctgttacaaaggctcatgtggaaaaggacttcattgctttcaaatcttccacaccacataatgtttcttggagacatgaaacaaatggctctgtcttcatttcccaaattatctactacttcagagagtattcttggagtcatcatctagaggaaatttttcaaaaggttcaacattcatttgagaccccaaatatactgacccagctgcccaccattgaaagactatccatgacacgatatttctatctctttcctgggaattaa

SEQ ID NO: 3199 - DNA, 1685 bp, Homo sapiens
  source 1..1685: mol_type = unassigned DNA; mol_type = unassigned DNA
gtgtacatgatttcattctgttcactttgttatgtcaaaaagaagaaaacaccttctgcttcctattttccaaaggaaagcagttatacacgagatcagagtctaattttatcttggcaaagaaaaagagaatttgaggactgggaattttccattcagggtaatatcaacaagctggtccactgagaggagagcaagcctgttgaaattgtttttgctttcacagctttttcctgtccggggagcaggagaagccatggctgatgagaaaccatccaacggtgttctggtccacatggtgaagttgctgatcaagacctttctagatggcatttttgatgatttgatggaaaataatgtgttaaatacagatgagatacaccttataggaaaatgtctaaagtttgtggtgagcaatgctgaaaacctggttgatgatatcactgagacagctcaaattgcaggcaaaatatttagggaacacctgtggaattccaaaaaacagctgagttcagatatatccagtgatggagaaagagaggcgaacatgcctggcctcaacatccgcaacaaagaattcaactatcttcataatcgaaatggttctgaacttgaccttttggggatggatctacttgaaaaccttggatactcagtggttataaaagagaatctcacagctcaggaaatggaaacagcactaaggcagtttgctgctcacccagagcaccagtcctcagacagcacattcctggtgtttatgtcacatagcatcctgaatggaatctgtgggaccaagcactgggatcaagagccagatgttcttcacgatgacaccatctttgaaattttcaacaaccgtaactgccagagtctgaaagacaaacccaaggtcatcatcatgcaagcctgccgaggcaatggtgctgggattgtttggttcaccactgacagtggaaaagccagtgcagatactcatggtcggctcttgcaaggtaacatctgtaatgatgctgttacaaaggctcatgtggaaaaggacttcattgctttcaaatcttccacaccacataatgtttcttggagacatgaaacaaatggctctgtcttcatttcccaaattatctactacttcagagagtattcttggagtcatcatctagaggaaatttttcaaaaggttcaacattcatttgagaccccaaatatactgacccagctgcccaccattgaaagactatccatgacacgatatttctatctctttcctgggaattaaaactcataagaagcaactcaggaaaatgaaggcattatggtgtctatgaatctgctattagaaaaggtcaatttttgattaagaatatttttataccaaactgctcagctgtccaccttttcaaataccaggctaaaatcaatctcatatttttgctaaattaatgcttaataaatttttattataaaattgtgcttgttttctaattttgtcataaattaagtcatgcttataggagaaaaaattaagtattaaaaatcataaaaaatgaagaaataatcatcatcaacctttttaaaactattcataaaaactcaagttttttatatagcttatttattttgtatatccaattttgtgtgcttttattatattgttataacattactactagtaataaaactat

SEQ ID NO: 3200 - DNA, 2624 bp, Homo sapiens
  source 1..2624: mol_type = unassigned DNA; mol_type = unassigned DNA
atccgtggccacagctggttggcgtcgccttgaaatcccaggccgtgaggagttagcgagccctgctcacactcggcgctctggttttcggtgggtgtgccctgcacctgcctcttcccccattctcaatgagatcaccatcctcagaataatttgtaccccgctgggcactagctaatggaggtgatgtcatgctaagcagcacttcagtgagttttgcgggaaccaaagctctgctcccaggagtgtggatttggtgctttcatgtggaaaaagcggatgatgacaagtagagagcaaatgtgcgcatgtctgatgctttaataaaggtatccatggagaacactgaaaactcagtggattcaaaatccattaaaaatttggaaccaaagatcatacatggaagcgaatcaatggactctggaatatccctggacaacagttataaaatggattatcctgagatgggtttatgtataataattaataataagaattttcataaaagcactggaatgacatctcggtctggtacagatgtcgatgcagcaaacctcagggaaacattcagaaacttgaaatatgaagtcaggaataaaaatgatcttacacgtgaagaaattgtggaattgatgcgtgatgtttctaaagaagatcacagcaaaaggagcagttttgtttgtgtgcttctgagccatggtgaagaaggaataatttttggaacaaatggacctgttgacctgaaaaaaataacaaactttttcagaggggatcgttgtagaagtctaactggaaaacccaaacttttcattattcaggttattattcttggcgaaattcaaaggatggctcctggttcatccagtcgctttgtgccatgctgaaacagtatgccgacaagcttgaatttatgcacattcttacccgggttaaccgaaaggtggcaacagaatttgagtccttttcctttgacgctacttttcatgcaaagaaacagattccatgtattgtttccatgctcacaaaagaactctatttttatcactaaagaaatggttggttggtggttttttttagtttgtatgccaagtgagaagatggtatatttggtactgtatttccctctcattttgacctactctcatgctgcagagggtactttaagacatactccttccatcaaatagaaccactatgaagctacctcaaacttccagtcaggtagttgcaattgaattaaattaggaataaataaaaatggatactggtgcagtcattatgagaggcaatgattgttaatttacagctttcatgattagcaagttacagtgatgctgtgctatgaattttcaagtaattgtgaaaaagttaaacattgaagtaatgaatttttatgatattccccccacttaagactgtgtattctagttttgtcaaactgtagaaatgatgatgtggaagaacttaggcatctgtgggcatggtcaaaggctcaaacctttattttagaattgatatacacggatgacttaactgcatttttagaccatttatctgggattatggttttgtgatgtttgtcctgaacacttttgttgtaaaaaaataataataatgtttaatattgagaaagaaactaatattttatgtgagagaaagtgtgagcaaactaacttgacttttaaggctaaaacttaacattcatagaggggtggagttttaactgtaaggtgctacaatgcccctggatctaccagcataaatatcttctgatttgtccctatgcatatcagttgagcttcatataccagcaatatatctgaagagctattatataaaaaccccaaactgttgattattagccaggtaatgtgaataaattctataggaacatatgaaaatacaacttaaataataaacagtggaatataaggaaagcaataaatgaatgggctgagctgcctgtaacttgagagtagatggtttgagcctgagcagagacatgactcagcctgttccatgaaggcagagccatggaccacgcaggaagggcctacagcccatttctccatacgcactggtatgtgtggatgatgctgccagggcgccatcgccaagtaagaaagtgaagcaaatcagaaacttgtgaagtggaaatgttctaaaggtggtgaggcaataaaaatcatagtactctttgtagcaaaattcttaagtatgttattttctgttgaagtttacaatcaaaggaaaatagtaatgttttatactgtttactgaaagaaaaagacctatgagcacataggactctagacggcatccagccggaggccagagctgagccctcagcccgggaggcaggctccaggcctcagcaggtgcggagccgtcactgcaccaagtctcactggctgtcagtatgacatttcacgggagatttcttgttgctcaaaaaatgagctcgcatttgtcaatgacagtttcttttttcttactagacctgtaacttttgtaaatacacatagcatgtaatggtatcttaaagtgtgtttctatgtgacaattttgtacaaatttgttattttccatttttatttcaaaatatacattcaaacttaaaatta

SEQ ID NO: 3201 - DNA, 2673 bp, Homo sapiens
  source 1..2673: mol_type = unassigned DNA; mol_type = unassigned DNA
acatctcccggcggcgggccgcggaagcagtgcagacgcggctcctagcggatgggtgctattgtgaggcggttgtagaagagtttcgtgagtgctcgcagctcatacctgtggctgtgtatccgtggccacagctggttggcgtcgccttgaaatcccaggccgtgaggagttagcgagccctgctcacactcggcgctctggttttcggtgggtgtgccctgcacctgcctcttcccccattctcattaataaaggtatccatggagaacactgaaaactcagtggattcaaaatccattaaaaatttggaaccaaagatcatacatggaagcgaatcaatggactctggaatatccctggacaacagttataaaatggattatcctgagatgggtttatgtataataattaataataagaattttcataaaagcactggaatgacatctcggtctggtacagatgtcgatgcagcaaacctcagggaaacattcagaaacttgaaatatgaagtcaggaataaaaatgatcttacacgtgaagaaattgtggaattgatgcgtgatgtttctaaagaagatcacagcaaaaggagcagttttgtttgtgtgcttctgagccatggtgaagaaggaataatttttggaacaaatggacctgttgacctgaaaaaaataacaaactttttcagaggggatcgttgtagaagtctaactggaaaacccaaacttttcattattcaggcctgccgtggtacagaactggactgtggcattgagacagacagtggtgttgatgatgacatggcgtgtcataaaataccagtggaggccgacttcttgtatgcatactccacagcacctggttattattcttggcgaaattcaaaggatggctcctggttcatccagtcgctttgtgccatgctgaaacagtatgccgacaagcttgaatttatgcacattcttacccgggttaaccgaaaggtggcaacagaatttgagtccttttcctttgacgctacttttcatgcaaagaaacagattccatgtattgtttccatgctcacaaaagaactctatttttatcactaaagaaatggttggttggtggttttttttagtttgtatgccaagtgagaagatggtatatttggtactgtatttccctctcattttgacctactctcatgctgcagagggtactttaagacatactccttccatcaaatagaaccactatgaagctacctcaaacttccagtcaggtagttgcaattgaattaaattaggaataaataaaaatggatactggtgcagtcattatgagaggcaatgattgttaatttacagctttcatgattagcaagttacagtgatgctgtgctatgaattttcaagtaattgtgaaaaagttaaacattgaagtaatgaatttttatgatattccccccacttaagactgtgtattctagttttgtcaaactgtagaaatgatgatgtggaagaacttaggcatctgtgggcatggtcaaaggctcaaacctttattttagaattgatatacacggatgacttaactgcatttttagaccatttatctgggattatggttttgtgatgtttgtcctgaacacttttgttgtaaaaaaataataataatgtttaatattgagaaagaaactaatattttatgtgagagaaagtgtgagcaaactaacttgacttttaaggctaaaacttaacattcatagaggggtggagttttaactgtaaggtgctacaatgcccctggatctaccagcataaatatcttctgatttgtccctatgcatatcagttgagcttcatataccagcaatatatctgaagagctattatataaaaaccccaaactgttgattattagccaggtaatgtgaataaattctataggaacatatgaaaatacaacttaaataataaacagtggaatataaggaaagcaataaatgaatgggctgagctgcctgtaacttgagagtagatggtttgagcctgagcagagacatgactcagcctgttccatgaaggcagagccatggaccacgcaggaagggcctacagcccatttctccatacgcactggtatgtgtggatgatgctgccagggcgccatcgccaagtaagaaagtgaagcaaatcagaaacttgtgaagtggaaatgttctaaaggtggtgaggcaataaaaatcatagtactctttgtagcaaaattcttaagtatgttattttctgttgaagtttacaatcaaaggaaaatagtaatgttttatactgtttactgaaagaaaaagacctatgagcacataggactctagacggcatccagccggaggccagagctgagccctcagcccgggaggcaggctccaggcctcagcaggtgcggagccgtcactgcaccaagtctcactggctgtcagtatgacatttcacgggagatttcttgttgctcaaaaaatgagctcgcatttgtcaatgacagtttcttttttcttactagacctgtaacttttgtaaatacacatagcatgtaatggtatcttaaagtgtgtttctatgtgacaattttgtacaaatttgttattttccatttttatttcaaaatatacattcaaacttaaaatta

SEQ ID NO: 3202 - DNA, 2540 bp, Homo sapiens
  source 1..2540: mol_type = unassigned DNA; mol_type = unassigned DNA
aggggcgggcgggaggcggggctggcgctggagcacatctcccggcggcgggccgcggaagcagtgcagacgcggctcctagcggatgggtgctattgtgaggcggttgtagaagttaataaaggtatccatggagaacactgaaaactcagtggattcaaaatccattaaaaatttggaaccaaagatcatacatggaagcgaatcaatggactctggaatatccctggacaacagttataaaatggattatcctgagatgggtttatgtataataattaataataagaattttcataaaagcactggaatgacatctcggtctggtacagatgtcgatgcagcaaacctcagggaaacattcagaaacttgaaatatgaagtcaggaataaaaatgatcttacacgtgaagaaattgtggaattgatgcgtgatgtttctaaagaagatcacagcaaaaggagcagttttgtttgtgtgcttctgagccatggtgaagaaggaataatttttggaacaaatggacctgttgacctgaaaaaaataacaaactttttcagaggggatcgttgtagaagtctaactggaaaacccaaacttttcattattcaggcctgccgtggtacagaactggactgtggcattgagacagacagtggtgttgatgatgacatggcgtgtcataaaataccagtggaggccgacttcttgtatgcatactccacagcacctggttattattcttggcgaaattcaaaggatggctcctggttcatccagtcgctttgtgccatgctgaaacagtatgccgacaagcttgaatttatgcacattcttacccgggttaaccgaaaggtggcaacagaatttgagtccttttcctttgacgctacttttcatgcaaagaaacagattccatgtattgtttccatgctcacaaaagaactctatttttatcactaaagaaatggttggttggtggttttttttagtttgtatgccaagtgagaagatggtatatttggtactgtatttccctctcattttgacctactctcatgctgcagagggtactttaagacatactccttccatcaaatagaaccactatgaagctacctcaaacttccagtcaggtagttgcaattgaattaaattaggaataaataaaaatggatactggtgcagtcattatgagaggcaatgattgttaatttacagctttcatgattagcaagttacagtgatgctgtgctatgaattttcaagtaattgtgaaaaagttaaacattgaagtaatgaatttttatgatattccccccacttaagactgtgtattctagttttgtcaaactgtagaaatgatgatgtggaagaacttaggcatctgtgggcatggtcaaaggctcaaacctttattttagaattgatatacacggatgacttaactgcatttttagaccatttatctgggattatggttttgtgatgtttgtcctgaacacttttgttgtaaaaaaataataataatgtttaatattgagaaagaaactaatattttatgtgagagaaagtgtgagcaaactaacttgacttttaaggctaaaacttaacattcatagaggggtggagttttaactgtaaggtgctacaatgcccctggatctaccagcataaatatcttctgatttgtccctatgcatatcagttgagcttcatataccagcaatatatctgaagagctattatataaaaaccccaaactgttgattattagccaggtaatgtgaataaattctataggaacatatgaaaatacaacttaaataataaacagtggaatataaggaaagcaataaatgaatgggctgagctgcctgtaacttgagagtagatggtttgagcctgagcagagacatgactcagcctgttccatgaaggcagagccatggaccacgcaggaagggcctacagcccatttctccatacgcactggtatgtgtggatgatgctgccagggcgccatcgccaagtaagaaagtgaagcaaatcagaaacttgtgaagtggaaatgttctaaaggtggtgaggcaataaaaatcatagtactctttgtagcaaaattcttaagtatgttattttctgttgaagtttacaatcaaaggaaaatagtaatgttttatactgtttactgaaagaaaaagacctatgagcacataggactctagacggcatccagccggaggccagagctgagccctcagcccgggaggcaggctccaggcctcagcaggtgcggagccgtcactgcaccaagtctcactggctgtcagtatgacatttcacgggagatttcttgttgctcaaaaaatgagctcgcatttgtcaatgacagtttcttttttcttactagacctgtaacttttgtaaatacacatagcatgtaatggtatcttaaagtgtgtttctatgtgacaattttgtacaaatttgttattttccatttttatttcaaaatatacattcaaacttaaaatta

SEQ ID NO: 3203 - DNA, 964 bp, Homo sapiens
  source 1..964: mol_type = unassigned DNA; mol_type = unassigned DNA
agtgcagacgcggctcctagcggatgggtgctattgtgaggcggttgtagaagagtttcgtgagtgctcgcagctcatacctgtggctgtgtatccgtggccacagctggttggcgtcgccttgaaatcccaggccgtgaggagttagcgagccctgctcacactcggcgctctggttttcggtgggtgtgccctgcacctgcctcttcccccattctcattaataaaggtatccatggagaacactgaaaactcagtggattcaaaatccattaaaaatttggaaccaaagatcatacatggaagcgaatcaatggactctggaatatccctggacaacagttataaaatggattatcctgagatgggtttatgtataataattaataataagaattttcataaaagcactggaatgacatctcggtctggtacagatgtcgatgcagcaaacctcagggaaacattcagaaacttgaaatatgaagtcaggaataaaaatgatcttacacgtgaagaaattgtggaattgatgcgtgatgtttctaaagaagatcacagcaaaaggagcagttttgtttgtgtgcttctgagccatggtgaagaaggaataatttttggaacaaatggacctgttgacctgaaaaaaataacaaactttttcagaggggatcgttgtagaagtctaactggaaaacccaaacttttcattattcaggttattattcttggcgaaattcaaaggatggctcctggttcatccagtcgctttgtgccatgctgaaacagtatgccgacaagcttgaatttatgcacattcttacccgggttaaccgaaaggtggcaacagaatttgagtccttttcctttgacgctacttttcatgcaaagaaacagattccatgtattgtttccatgctcacaaaagaactctatttttatcactaaagaaatggttggttgg

SEQ ID NO: 3204 - DNA, 677 bp, Homo sapiens
  source 1..677: mol_type = unassigned DNA; mol_type = unassigned DNA
gcggaagcagtgcagacgcggctcctagcggatgggtgctattgtgaggcggttgtagaagttaataaaggtatccatggagaacactgaaaactcagtggattcaaaatccattaaaaatttggaaccaaagatcatacatggaagcgaatcaatggactctggaatatccctggacaacagttataaaatggattatcctgagatgggtttatgtataataattaataataagaattttcataaaagcactggaatgacatctcggtctggtacagatgtcgatgcagcaaacctcagggaaacattcagaaacttgaaatatgaagtcaggaataaaaatgatcttacacgtgaagaaattgtggaattgatgcgtgatgtttctaaagaagatcacagcaaaaggagcagttttgtttgtgtgcttctgagccatggtgaagaaggaataatttttggaacaaatggacctgttgacctgaaaaaaataacaaactttttcagaggggatcgttgtagaagtctaactggaaaacccaaacttttcattattcaggttattattcttggcgaaattcaaaggatggctcctggttcatccagtcgctttgtgccatgctgaaacagtatgccgacaagcttgaatttatgcacattcttacccgggttaaccg

SEQ ID NO: 3205 - DNA, 549 bp, Homo sapiens
  source 1..549: mol_type = unassigned DNA; mol_type = unassigned DNA
agtgcagacgcggctcctagcggatgggtgctattgtgaggcggttgtagaagagtttcgtgagtgctcgcagctcatacctgtggctgtgtatccgtggccacagctggttggcgtcgccttgaaatcccaggccgtgaggagttagcgagccctgctcacactcggcgctctggttttcgttaataaaggtatccatggagaacactgaaaactcagtggattcaaaatccattaaaaatttggaaccaaagatcatacatggaagcgaatcaatggactctggaatatccctggacaacagttataaaatggattatcctgagatgggtttatgtataataattaataataagaattttcataaaagcactggaatgacatctcggtctggtacagatgtcgatgcagcaaacctcagggaaacattcagaaacttgaaatatgaagtcaggaataaaaatgatcttacacgtgaagaaattgtggaattgatgcgtgatgtttctaaagaagatcacagcaaaaggagcagttttgtttgtgtgc

SEQ ID NO: 3206 - DNA, 684 bp, Homo sapiens
  source 1..684: mol_type = unassigned DNA; mol_type = unassigned DNA
gatgatttcactatcagtaggcacattgttgaatgacactggagagaaagaaaagtggtgtgtgtgtgtgtgtgtctctctctgtgtgtgtttgtatgtgtgtgggtctgtatgtatgaaactagtaagaatgaacattcaaaaagaacaaggtgggcaactgtgacagccattctgtgggaggcacagcagtgtgcagaaagttaatgtctccatagcaaaccgtggggaactgtgggtcagagactctccagcatccttggaagtggcctcttcacagtcatctgagaacctagaggaagatgctgtttacaagacccacgtggagaaggacttcattgctttctgctcttcaacgccacacaacgtgtcctggagagacagcacaatgggctctatcttcatcacacaactcatcacatgcttccagaaatattcttggtgctgccacctagaggaagtatttcggaaggtacagcaatcatttgaaactccaagggccaaagctcaaatgcccaccatagaacgactgtccatgacaagatatttctacctctttcctggcaattgaaaatggaagccacaagcagcccagccctccttaatcaacttcaaggagcaccttcattagtacagcttgcatatttaacattttgtatttcaataaaagtgaagacaaacgaa

SEQ ID NO: 3207 - DNA, 2158 bp, Homo sapiens
  source 1..2158: mol_type = unassigned DNA; mol_type = unassigned DNA
aaatgagagctctgtctgtaaactctaggtggagttgctgaaattcctgcaagcatttcttgccgggagaggagggatggatcccggtcccacctaaagaagcagtctggccatgatctgccacagcggctgtgctgcactgtgaagactgctgcccagtccaatctgcccagcctccctagcactggtagggaaaaaccgctgactagagctgcagtaatggcagtcgcccctcccctggggaactcggtcatctctggcgtactccaggctgctatgctggctagtggggattctaatccagcggatctaagcttgcaggcttctgtgagaatggacctgctgcaaggccattttgctccctggcttcagccccctttccatgggagtggacgggactcctgcctcactagagttccgggagctgctggactatgtaaaaactcctgcagctcagtgcctgcccaaaaagctggaaatatgaactattgggttaattcttatcaggaaatgaaaaagagttgttagattaaacttcttcagtcattgtcgttctttgtaatcagagaaagaaaaactgagagatcaggaagagaagagacagatggatagaagaagtttgggtggccacaggaaacaagaaaagaaacaagctgaggtgtcaacccacaggataatattttgtcattttcatttttttcccccaagtcagaaactaaattccagtaattggatgccaatttgctgatgacaaggcacttcctgataatgagtctggaattctgagcagcagtttcacaatctgtaattacacgtttccgccctttgcaataaggaaatacatagtttactttcatttttgactctgaggctctttccaacgctgtaaaaaaggacagaggctgttccctatggcagaaggcaaccacagaaaaaagccacttaaggtgttggaatccctgggcaaagatttcctcactggtgttttggataacttggtggaacaaaatgtactgaactggaaggaagaggaaaaaaagaaatattacgatgctaaaactgaagacaaagttcgggtcatggcagactctatgcaagagaagcaacgtatggcaggacaaatgcttcttcaaaccttttttaacatagaccaaatatcccccaataaaaaagctcatccgaatatggaggctggaccacctgagtcaggagaatctacagatgccctcaagctttgtcctcatgaagaattcctgagactatgtaaagaaagagctgaagagatctatccaataaaggagagaaacaaccgcacacgcctggctctcatcatatgcaatacagagtttgaccatctgcctccgaggaatggagctgactttgacatcacagggatgaaggagctacttgagggtctggactatagtgtagatgtagaagagaatctgacagccagggatatggagtcagcgctgagggcatttgctaccagaccagagcacaagtcctctgacagcacattcttggtactcatgtctcatggcatcctggagggaatctgcggaactgtgcatgatgagaaaaaaccagatgtgctgctttatgacaccatcttccagatattcaacaaccgcaactgcctcagtctgaaggacaaacccaaggtcatcattgtccaggcctgcagaggtgcaaaccgtggggaactgtgggtcagagactctccagcatccttggaagtggcctcttcacagtcatctgagaacctagaggaagatgctgtttacaagacccacgtggagaaggacttcattgctttctgctcttcaacgccacacaacgtgtcctggagagacagcacaatgggctctatcttcatcacacaactcatcacatgcttccagaaatattcttggtgctgccacctagaggaagtatttcggaaggtacagcaatcatttgaaactccaagggccaaagctcaaatgcccaccatagaacgactgtccatgacaagatatttctacctctttcctggcaattgaaaatggaagccacaagcagcccagccctccttaatcaacttcaaggagcaccttcattagtacagcttgcatatttaacattttgtatttcaataaaagtgaagacaaacgaa

SEQ ID NO: 3208 - DNA, 1340 bp, Homo sapiens
  source 1..1340: mol_type = unassigned DNA; mol_type = unassigned DNA
cagaagcctttgtgatctcacctgttggaatgcactaatgttttctgagccccttaaatatcttgtctacattcttttaagaagctcttcaccaactgtcagaaggcaaccacagaaaaaagccacttaaggtgttggaatccctgggcaaagatttcctcactggtgttttggataacttggtggaacaaaatgtactgaactggaaggaagaggaaaaaaagaaatattacgatgctaaaactgaagacaaagttcgggtcatggcagactctatgcaagagaagcaacgtatggcaggacaaatgcttcttcaaaccttttttaacatagaccaaatatcccccaataaaaaagctcatccgaatatggaggctggaccacctgagtcaggagaatctacagatgccctcaagctttgtcctcatgaagaattcctgagactatgtaaagaaagagctgaagagatctatccaataaaggagagaaacaaccgcacacgcctggctctcatcatatgcaatacagagtttgaccatctgcctccgaggaatggagctgactttgacatcacagggatgaaggagctacttgagggtctggactatagtgtagatgtagaagagaatctgacagccagggatatggagtcagcgctgagggcatttgctaccagaccagagcacaagtcctctgacagcacattcttggtactcatgtctcatggcatcctggagggaatctgcggaactgtgcatgatgagaaaaaaccagatgtgctgctttatgacaccatcttccagatattcaacaaccgcaactgcctcagtctgaaggacaaacccaaggtcatcattgtccaggcctgcagaggtgcaaaccgtggggaactgtgggtcagagactctccagcatccttggaagtggcctcttcacagtcatctgagaacctagaggaagatgctgtttacaagacccacgtggagaaggacttcattgctttctgctcttcaacgccacacaacgtgtcctggagagacagcacaatgggctctatcttcatcacacaactcatcacatgcttccagaaatattcttggtgctgccacctagaggaagtatttcggaaggtacagcaatcatttgaaactccaagggccaaagctcaaatgcccaccatagaacgactgtccatgacaagatatttctacctctttcctggcaattgaaaatggaagccacaagcagcccagccctccttaatcaacttcaaggagcaccttcattagtacagcttgcatatttaacattttgtatttcaataaaagtgaagacaaacg

SEQ ID NO: 3209 - DNA, 215 bp, Homo sapiens
  source 1..215: mol_type = unassigned DNA; mol_type = unassigned DNA
acaacgtgtcctggagagacagcacaatgggctctatcttcatcacacaactcatcacatgcttccagaaatattcttggtgctgccacctagaggaagtatttcggaaggaagccacaagcagcccagccctccttaatcaacttcaaggagcaccttcattagtacagcttgcatatttaacattttgtatttcaataaaagtgaagacaaac

SEQ ID NO: 3210 - DNA, 4745 bp, Homo sapiens
  source 1..4745: mol_type = unassigned DNA; mol_type = unassigned DNA
cagggatgaaggagctacttgagggtctggactatagtgtagatgtagaagagaatctgacagccagggatatggagtcagcgctgagggcatttgctaccagaccagagcacaagtcctctgacagcacattcttggtactcatgtctcatggcatcctggagggaatctgcggaactgtgcatgatgagaaaaaaccagatgtgctgctttatgacaccatcttccagatattcaacaaccgcaactgcctcagtctgaaggacaaacccaaggtcatcattgtccaggcctgcagaggtggtgagtgctgagactgaacatctaacagttatgaaggtgtatgcagaggattgtgatgtttggtttatatttaggggcaacattcttaaacctcatccagtgtaaataaagtacattgaattctaaagaaactctacctaagggtctggtataacaagaaattgtctcatcaaaattagtggagaaatttctgttcaattttatccacagtaagtggtgaaggagatcatcagaatccctaaatcaaagttaaacagaaatactcaaactttggaatggaatcattttcatgatagcttgatttgtaaatgttttacagaaattttgacattgtgtggtttgagaagaatttcatttgaaactggggccattatgtaaaacagcatccctttttcttataattattgagggggaaattagtaaagagatcaggggactgtagaatgttgcagtgccactttgctccaaagattcaattgcctcatggctggctgaggatggtggctcatgcctataatcccaacactttgggaggccaagacaggaggatggcttgaggccaggaatttgagaccaattgtctgatagctcttgggagctatttttcaaaagaaaacagattttttttctagaaaatggtaaattcaagatgatttcactatcagtaggcacattgttgaatgacactggagagaaagaaaagtggtgtgtgtgtgtgtgtgtctctctctgtgtgtgtttgtatgtgtgtgggtctgtatgtatgaaactagtaagaatgaacattcaaaaagaacaaggtgggcaactgtgacagccattctgtgggaggcacagcagtgtgcagaaagttaatgtctccatagcaaaccgtggggaactgtgggtcagagactctccagcatccttggaagtggcctcttcacagtcatctgagaacctagaggaagatgctgtttacaagacccacgtggagaaggacttcattgctttctgctcttcaacgccacgtatgtatctttcagtggcagtaagggatttgtgggcctgaggccatctttgaatgaatctagaaaatcaagaatccctatgaaacaatgatctgatagaatgttgtgtgctctccacatattttacatgatcttatgtgtgccgtgagaacagattcctaaagcaacccgatacatggaaacccattcaccactcaccatttaaacagatgatgaattctgttttttttattaagcccatttaacattttacatagtgtttttatggattccaggaatggcttctctttctcaaatgatcaacttcaagtcttctttccatatttcacatctgattctacaatgagcagtgccattgcatgccctgctagaactgtggataccctttaaaacaagtagaaaatgatagggtggggctgattaggtctaatctcagggaacactggttagtatttcatgtctaggtaattatcttaaggagcgtacatttaactgtttttgatttgtatatttttaaatcttattttttaaaaccactttattgaggtatgattgacatacataatgttacatatttaatgtatacaacttaatgagtttggagatttctatgtactcctgaaatcatcaccactatctatgccataaacatatctctcttctccaaaagattcttacacttctctgtttattattatcatcattccgtgactgcgtgtgagaagtatacttagcataaaatctactctcttaacaaatttcaagtacataacacaatgttggttactactggcaccaccctgtacaatagatttttatcacttttttcagcttctatcactgaaacttgtcatgtgttcatctatttctattatacggtgaaagacagtgtggcataatctgcaaacaactttggagcctggtggcaattttttgttgcttactcactgtgtgaacatggggaagttccttcatctttctgtgcttctatttcttcctctgtaaagtgggataattctagttatttctcaagcccctataaaagctgagagaatgaacatgagttttgtagtagaaagccaatcccaagaatcaaaatttcttcaatacacaatctcttgcaatgcttaccaactgcaacttttgatcaccttttgctaggttttctgtttacgttctgtggaaagtaggtaaatgtcaggttgtaagtgcttcctacaaatctgtaaagataattcccaagctatgcttttctttttaaaaacattctcaaaacaaaaatatgaacaaaaacatagtgaaagtcatagcccaaggcatacccatctgtatcattatagacaacgtgtcctggagagacagcacaatgggctctatcttcatcacacaactcatcacatgcttccagaaatattcttggtgctgccacctagaggaagtatttcggaaggtacagcaatcatttgaaactccaagggccaaagctcaaatgcccaccatagaacgactgtccatgacaagatatttctacctctttcctggcaattgaaaatggttaagtattgagagttgttggtggtatgtgaaataaataagagagtgatattggtggttaagttcaatgacaaatgacagctgagtacttggatggtcaaattggtgtttttgttgatatagtctggtgattatctgctacttctttccgacttacatgtatttggattcctccaactctacaattaatcaggcaatcaatcaatcaatcaaggaggtaaggaaaaccgcagcagaatgtgatgatgaaaaaccaaggatagtaattattaaaatagaaacatgctcatgcttccattactatttatattcatttatctctcatagtctttctcttttattcccctttcttacacacacacacacacacacacacacagagagagagagagagagagagagacactaagtagccaaacattgcatcaaaccctaaacaaaacagagtaaacaaaggagctaactctggagaaagcagcattttgatcctctgagtgaggatgtcacagcaaataccacattactgacatccagataccattaccagatggtacagaatacatcctacactgtagagtttgtgttgatccaggctctggttctcagactgttctcacaatgcagatcaccaatcactcagggttggcttttgaatcttcaatcacagtccagaagttccttcaagctcccatgtaacttttgttattattttgaccaaaatattatagaatgggtacattgagtctggactaaatgatgactttcttcactcataatagctttatttaacactagactataagactattatcaatctccctctaagatacatacttaaaattatattttatagtgaaatgtataaagttgttctcaatacttccaacatttaccacataatttttactcttggtttctgacacttcagtcacaatattgcatcatttcagcataacagctttcagtgcctaatccatccagtggggctgcatttggacattgaattgtttgttgactaatatttgccaacactaactgtgcaccaggttttgttctagatgcttggaatatgccaattaacaacgtaaatagatttcttacactctgaaagcttatattctagtgagtagaaacagactctgaagacataaagtggtaaatatatcacaggccggagagcaaaaaaagataaaaggaaaaataaaggaagacaaaggaaaacacagaatgatggatgctgtactcctatagatatttcactcaaaagcttttcttgaaataatgaaatcagaacaaagaatggacagagttggggagtgaataatgtggttcttatgcaggaaaagtgttccagcacagaatacagccagtgcaaatgccctgggatagcaatgcactaaacatgtttaaagaactgcaatgagacagtgtgaccaaaagagaacgtgagtggagaaaatggcagagacaaattaggagaagcagtgagaagccagatcgcgtggttctatgttatcacatggtaaacctttaaaaattattatctgagcgagacaggaagcctttctagtgctttagaaaaaagaagtaatatgctttaaattaggttttacaaagatcacattttggtgaatagactaagatgtcacagatggaagtcaagggaagtggcaagagcacatggaagaggatgcaagaagaatcatgatgagggatgggatgaaggcagcaaggggtaaccatcttgaccttctgttttttctctcccctgcaggaagccacaagcagcccagccctccttaatcaacttcaaggagcaccttcattagtacagcttgcatatttaacattttgtatttcaataaaagtgaagacaaa

SEQ ID NO: 3211 - DNA, 481 bp, Homo sapiens
  source 1..481: mol_type = unassigned DNA; mol_type = unassigned DNA
gttctgtggaaagtaggtaaatgtcaggttgtaagtgcttcctacaaatctgtaaagataattcccaagctatgcttttctttttaaaaacattctcaaaacaaaaatatgaacaaaaacatagtgaaagtcatagcccaaggcatacccatctgtatcattatagacaacgtgtcctggagagacagcacaatgggctctatcttcatcacacaactcatcacatgcttccagaaatattcttggtgctgccacctagaggaagtatttcggaaggtacagcaatcatttgaaactccaagggccaaagctcaaatgcccaccatagaacgactgtccatgacaagatatttctacctctttcctggcaattgaaaatggaagccacaagcagcccagccctccttaatcaacttcaaggagcaccttcattagtacagcttgcatatttaacattttgtatttcaataaaagtgaagac

SEQ ID NO: 3212 - DNA, 1214 bp, Homo sapiens
  source 1..1214: mol_type = unassigned DNA; mol_type = unassigned DNA
aaaaggacagaggctgttccctatggcagaaggcaaccacagaaaaaagccacttaaggtgttggaatccctgggcaaagatttcctcactggtgttttggataacttggtggaacaaaatgtactgaactggaaggaagaggaaaaaaagaaatattacgatgctaaaactgaagacaaagttcgggtcatggcagactctatgcaagagaagcaacgtatggcaggacaaatgcttcttcaaaccttttttaacatagaccaaatatcccccaataaaaaaggtgataaattgggtcacagaggcagaaatcacaatttatgttctgcaatatcctgcagctcatccgaatatggaggctggaccacctgagtcaggagaatctacagatgccctcaagctttgtcctcatgaagaattcctgagactatgtaaagaaagagctgaagagatctatccaataaaggagagaaacaaccgcacacgcctggctctcatcatatgcaatacagagtttgaccatctgcctccgaggaatggagctgactttgacatcacagggatgaaggagctacttgagggtctggactatagtgtagatgtagaagagaatctgacagccagggatatggagtcagcgctgagggcatttgctaccagaccagagcacaagtcctctgacagcacattcttggtactcatgtctcatggcatcctggagggaatctgcggaactgtgcatgatgagaaaaaaccagatgtgctgctttatgacaccatcttccagatattcaacaaccgcaactgcctcagtctgaaggacaaacccaaggtcatcattgtccaggcctgcagaggtgcaaaccgtggggaactgtgggtcagagactctccagcatccttggaagtggcctcttcacagtcatctgagaacctagaggaagatgctgtttacaagacccacgtggagaaggacttcattgctttctgctcttcaacgccacacaacgtgtcctggagagacagcacaatgggctctatcttcatcacacaactcatcacatgcttccagaaatattcttggtgctgccacctagaggaagtatttcggaaggtacagcaatcatttgaaactccaagggccaaagctcaaatgcccaccatagaacgactgtccatgacaagatatttctacctctttcctggcaattga

SEQ ID NO: 3213 - DNA, 771 bp, Homo sapiens
  source 1..771: mol_type = unassigned DNA; mol_type = unassigned DNA
ctgtgacagccattctgtgggaggcacagcagtgtgcagaaagttaatgtctccatagcaaaccgtggggaactgtgggtcagagactctccagcatccttggaagtggcctcttcacagtcatctgagaacctagaggaagatgctgtttacaagacccacgtggagaaggacttcattgctttctgctcttcaacgccacacaacgtgtcctggagagacagcacaatgggctctatcttcatcacacaactcatcacatgcttccagaaatattcttggtgctgccacctagaggaagtatttcggaaggtaagtgtctcttttctagttactcatttatttcttcaggaagaatttgtcatgattcactttttacttcacaatgacaatttttgtcagggaagtgaaagtagagaggtacccagtttctgtcattcagttgtttaaaatatggctaaggaaaagacaattccaatatatcccagcagaagatcaaagtaaaataaaataatatcaaccataagctttatgttatggagcgtaagttcttaagttttagagaaggaaaaatattttgaaataatttttatttcttaatttattaaatgaataaaatctgggtggtctgctaggtcatggatttcctcctggtgacagaggggtaaatgaggcctacatgacgtaatcctatctaggactcacattttcgtgggagatatggatactgaaaatgtgggttaacaaacaaatatgtgcttacagattgtg

SEQ ID NO: 3214 - DNA, 612 bp, Homo sapiens
  source 1..612: mol_type = unassigned DNA; mol_type = unassigned DNA
ctctttccaacgctgtaaaaaaggacagaggctgttccctatggcagaaggcaaccacagaaaaaagccacttaaggtgttggaatccctgggcaaagatttcctcactggtgttttggataacttggtggaacaaaatgtactgaactggaaggaagaggaaaaaaagaaatattacgatgctaaaactgaagacaaagttcgggtcatggcagactctatgcaagagaagcaacgtatggcaggacaaatgcttcttcaaaccttttttaacatagaccaaatatcccccaataaaaaaggatatggagtcagcgctgagggcatttgctaccagaccagagcacaagtcctctgacagcacattcttggtactcatgtctcatggcatcctggagggaatctgcggaactgtgcatgatgagaaaaaaccagatgtgctgctttatgacaccatcttccagatattcaacaaccgcaactgcctcagtctgaaggacaaacccaaggtcatcattgtccaggcctgcagaggtgcaaaccgtggggaactgtgggtcagagactctccagcatccttggaagtggcctcttcacagtcatctgagaacc

SEQ ID NO: 3215 - DNA, 978 bp, Homo sapiens
  source 1..978: mol_type = unassigned DNA; mol_type = unassigned DNA
atttttgactctgaggctctttccaacgctgtaaaaaaggacagaggctgttccctatggcagaaggcaaccacagaaaaaagccacttaaggtgttggaatccctgggcaaagatttcctcactggtgttttggataacttggtggaacaaaatgtactgaactggaaggaagaggaaaaaaagaaatattacgatgctaaaactgaagacaaagttcgggtcatggcagactctatgcaagagaagcaacgtatggcaggacaaatgcttcttcaaaccttttttaacatagaccaaatatcccccaataaaaaagctcatccgaatatggaggctggaccacctgagtcaggagaatctacagatgccctcaagctttgtcctcatgaagaattcctgagactatgtaaagaaagagctgaagagatctatccaataaaggagagaaacaaccgcacacgcctggctctcatcatatgcaatacagagtttgaccatctgcctccgaggaatggagctgactttgacatcacagggatgaaggagctacttgagggtctggactatagtgtagatgtagaagagaatctgacagccagggatatggagtcagcgctgagggcatttgctaccagaccagagcacaagtcctctgacagcacattcttggtactcatgtctcatggcatcctggagggaatctgcggaactgtgcatgatgagaaaaaaccagatgtgctgctttatgacaccatcttccagatattcaacaaccgcaactgcctcagtctgaaggacaaacccaaggtcatcattgtccaggcctgcagaggtggtgagtgctgagactgaacatctaacagttatgaaggtgtatgcagaggattgtgatgtttggtttatatttaggggcaacattcttaaacctcatccagtgtaaataaagtacattgaattctaaagaaactctacctaa

SEQ ID NO: 3216 - DNA, 667 bp, Homo sapiens
  source 1..667: mol_type = unassigned DNA; mol_type = unassigned DNA
acaatctgtaattacacgtttccgccctttgcaataaggaaatacatagtttactttcatttttgactctgaggctctttccaacgctgtaaaaaaggacagaggctgttccctatggcagaaggcaaccacagaaaaaagccacttaaggtgttggaatccctgggcaaagatttcctcactggtgttttggataacttggtggaacaaaatgtactgaactggaaggaagaggaaaaaaagaaatattacgatgctaaaactgaagacaaagttcgggtcatggcagactctatgcaagagaagcaacgtatggcaggacaaatgcttcttcaaaccttttttaacatagaccaaatatcccccaataaaaaagatctatccaataaaggagagaaacaaccgcacacgcctggctctcatcatatgcaatacagagtttgaccatctgcctccgaggaatggagctgactttgacatcacagggatgaaggagctacttgagggtctggactatagtgtagatgtagaagagaatctgacagccagggatatggagtcagcgctgagggcatttgctaccagaccagagcacaagtcctctgacagcacattcttggtactcatgtctcatggcatcctggagggaatctgcggaactgtgcat

SEQ ID NO: 3217 - DNA, 763 bp, Homo sapiens
  source 1..763: mol_type = unassigned DNA; mol_type = unassigned DNA
ggagggatggatcccggtcccacctaaagaagcagtctggccatgatctgccacagcggctgtgctgcactgtgaagactgctgcccagtccaatctgcccagcctccctagcactgtcagaaactaaattccagtaattggatgccaatttgctgatgacaaggcacttcctgataatgagtctggaattctgagcagcagtttcacaatctgtaattacacgtttccgccctttgcaataaggaaatacatagtttactttcatttttgactctgaggctctttccaacgctgtaaaaaaggacagaggctgttccctatggcagaaggcaaccacagaaaaaagccacttaaggtgttggaatccctgggcaaagatttcctcactggtgttttggataacttggtggaacaaaatgtactgaactggaaggaagaggaaaaaaagaaatattacgatgctaaaactgaagacaaagttcgggtcatggcagactctatgcaagagaagcaacgtatggcaggacaaatgcttcttcaaaccttttttaacatagaccaaatatcccccaataaaaaagctcatccgaatatggaggctggaccacctgagtcaggagaatctacagatgccctcaagctttgtcctcatgaagaattcctgagactatgtaaagaaagagctgaagagatctatccaataaaggagagaaacaaccgcacacgcctggctctcatcatatgcaatacagagtttgacca

SEQ ID NO: 3218 - DNA, 921 bp, Homo sapiens
  source 1..921: mol_type = unassigned DNA; mol_type = unassigned DNA
gactctgaggctctttccaacgctgtaaaaaaggacagaggctgttccctatggcagaaggcaaccacagaaaaaagccacttaaggtgttggaatccctgggcaaagatttcctcactggtgttttggataacttggtggaacaaaatgtactgaactggaaggaagaggaaaaaaagaaatattacgatgctaaaactgaagacaaagttcgggtcatggcagactctatgcaagagaagcaacgtatggcaggacaaatgcttcttcaaaccttttttaacatagaccaaatatcccccaataaaaaagctcatccgaatatggaggctggaccacctgagtcaggagaatctacagatgccctcaagctttgtcctcatgaagaattcctgagactatgtaaagaaagagctgaagaggtgctatgctatctatatgaaatagaaaaaaaagaagagatatcattgctttccttcagtgcaccatttcttacagcactaaatgattgggggtggggatgacagtaaccattttcaataatgcttttactaagggaaagattatgtgacttcacaatgataccaatcctttctcaatccatgatgcagatcattttatcatgagttgaaagaaaattggtatttctattgctcctgtatttattcttgtaattatttggattttatggcaattgtagcattagccatggaataaacatatttggaggataatatagctgacttgtaattggttgcactctacttgaaaagtctagacatgaaggatacttgggaaatataattaaagcttgaaaaacattataaatttatgtgttaaaaatagtaacaaaatagctatgcttccgaaggcaaagacttttgctgtattcatttttcactggagtcaacgacaacatct

SEQ ID NO: 3219 - DNA, 4463 bp, Homo sapiens
  source 1..4463: mol_type = unassigned DNA; mol_type = unassigned DNA
ttggccctgggggcggggcgaggcgcagaggtgcgtcctgagggcggggcggtgacgcaagagcgactcctgggggcggggcgaggccttggagatgcgtccggaggcggtggggagcgaagactgacccggggccgtgacgcgggggcaggccctggggcgggggcgggtcctggggactggggcgggcggccgaggcccggaagcggactgaggcggcctggagtcttagttggctactcgccatggacgaagcggatcggcggctcctgcggcggtgccggctgcggctggtggaagagctgcaggtggaccagctctgggacgccctgctgagccgcgagctgttcaggccccatatgatcgaggacatccagcgggcaggctctggatctcggcgggatcaggccaggcagctgatcatagatctggagactcgagggagtcaggctcttcctttgttcatctcctgcttagaggacacaggccaggacatgctggcttcgtttctgcgaactaacaggcaagcagcaaagttgtcgaagccaaccctagaaaaccttaccccagtggtgctcagaccagagattcgcaaaccagaggttctcagaccggaaacacccagaccagtggacattggttctggaggatttggtgatgtcggtgctcttgagagtttgaggggaaatgcagatttggcttacatcctgagcatggagccctgtggccactgcctcattatcaacaatgtgaacttctgccgtgagtccgggctccgcacccgcactggctccaacatcgactgtgagaagttgcggcgtcgcttctcctcgctgcatttcatggtggaggtgaagggcgacctgactgccaagaaaatggtgctggctttgctggagctggcgcagcaggaccacggtgctctggactgctgcgtggtggtcattctctctcacggctgtcaggccagccacctgcagttcccaggggctgtctacggcacagatggatgccctgtgtcggtcgagaagattgtgaacatcttcaatgggaccagctgccccagcctgggagggaagcccaagctctttttcatccaggcctgtggtggggagcagaaagaccatgggtttgaggtggcctccacttcccctgaagacgagtcccctggcagtaaccccgagccagatgccaccccgttccaggaaggtttgaggaccttcgaccagctggacgccatatctagtttgcccacacccagtgacatctttgtgtcctactctactttcccaggttttgtttcctggagggaccccaagagtggctcctggtacgttgagaccctggacgacatctttgagcagtgggctcactctgaagacctgcagtccctcctgcttagggtgagtgctgccttcctctgcaaaggagaggggaggctgctgaggggcagcgtgtcctcctggggctggggatttggggtgagcagggcaggcccaaaccaagggtaaaaggtagtagactcctgcctctgagccttggagtcggcacttttgtgtctctttatgagaggcatcctgcctgtggtgacgtttgccctttattcaaagagttgccttccctgtctcctccaaggtccccaggttgacacctcccgctcctccactgatggagctggtcctcagtgccagcgcaggatggctctgtccagaccctgaaggcgggtcatgggcccctccctatatcctgtgggcatcatgtagtcttctactcttgaccctcaagaattgtgaacccctccttgtacatcgccttctcaggaggccccagtgaggaaacagatagggaagggtggcctgataggcccagtcctactccatagaaacccgactcagagcagttgcttcctctgagggtcctgtggccttgtggctgccttgggaggcagcatgtatgggccccagctgctctgctcaggtattcatgccacgagaaggggctgcgaggctggggccactcctggctccttgcaaatatttcagtctgatttgaactttatgaatttggaaattttgaattttgagttttttaaaggtaaagttgaggtgcgtattctttaagccctcctgctcaaagaggctgcagtttgagctgtttttaaggtgcgggttgagtggacattccccccagcccctcttgaattcttccttcagtccagagaactgaactcacagagctctccatggtcatgtcttacaggtcgctaatgctgtttcggtgaaagggatttataaacagatgcctggttgctttaatttcctccggaaaaaacttttctttaaaacatcataaggccagggcccctcaccctgccttatcttgcaccccaaagctttcctgccccaggcctgaaagaggctgaggcctggactttcctgcaactcaaggactttgcagccggcacagggtctgctctttctctgccagtgacagacaggctcttagcagcttccagattgacgacaagtgctgaacagtggaggaagagggacagatgaatgccgtggattgcacgtggcctcttgagcagtggctggtccagggctagtgacttgtgtcccatgatccctgtgttgtctctagagcagggattaacctctgcactactgacatgtggggccaggtcaccctttgctgtgaggctgtcctgtacattgtgggatgttcagcactgtcccttgcctcaatgccagtaacgcgtcttcctgagtggtgccaaacaaaaaggttctcaggtgttgccaaatatgtcctggggtataaaactttcctcgcctgacaaccactggtctgtagggatttttggctacacacaaaccagtatcgctcatagatcagcaaaccggggcctactagagtctgaacagctgtaatctatgaattctaagtgaaattttaaaaattgttaatttttcctatattgcattaattttaaaaaataaatctgaggcaaatatggactctcttttgcctatttcttccctcattttgctccaactctttcttcttccttacaaaagagacttttgcttttttcgaaacatttccccatgtttttctggggtctcgctatgttgcccaggctggtctcaaactcctgggctcaagtgaccctcccaagtagctcttactacaggcgtgcaccattgcacccagccccatttattcatgtcttatttcacttgatccttatcccatcccaggaaggcaacaagggtgagaaccctgtgctcagggaggttaggtctcttgtccaagggaaaacgattatccagagaagagacctggccagaacctgggtcccctgagtcctagccatgcttcccatgtgccttacttgctgaagcacccccggactgcagtgtgaacgtgctgtgcaatagtgacacgctgggcttccccacaaggctccaccctgaggtcttttaagctgtccttatgccagcctatttcttgttttttgggcctttttttttggagatagggtctcactctgtcgcccaggctggagtgcaatgacgcaatcttggcttattgcagtctcgacctcctgggctcaagagatccttccacctcagccacctgagtagcttggactacaggtgtgcaccacctctcccagttaatttttgtatttttagtagagacagagttatgccatgttactcaggctggtcttgaactcctggactcaagcgatcagcctgccttagcctcccaaagtgcaggggttacaggcttgagccattgcgcctgacctatttctggttcttagggccctggatgttaggatggatttctgaattaataataataataaaaccctcatcaagatgtgatttgcatagttgtcactttatataatattattttccttctgtgacctttccaagtctgaaacagtcccagggacttcttttggttagttatttgcaatcacctgcaggacacacacacaagaaaattgtcaggttcacgtaaccacagagctgtgcgtggcagtttcctgtctctgtcctcctgggctaagctactcaagtgagtcacaggcagcccacactacagtagctcctgcctgaggagttcagatgatgtttcggagaaaaagatgcaatcacagcttttcattgacctgttagggtcttcctgtaaagggggtcttagccaggagtcctgtgtgggcttcaggtcagggggccttcgaaccccctaaaaattatatgccaaatgtgcggatggcatatttttagatttcatttgtttctcatcaaaactgctgtttgcaaggcagttatgcactgtggttggggctataactgtttccagaggctgttgatcagtatctgttaaactttttttttttttttttgagacagtcttgctctgttgcccagacgagtaca

SEQ ID NO: 3220 - DNA, 2019 bp, Homo sapiens
  source 1..2019: mol_type = unassigned DNA; mol_type = unassigned DNA
ggccctggggcgggggcgggtcctggggactggggcgggcggccgaggcccggaagcggactgaggcggcctggagtcttagttggctactcgccatggacgaagcggatcggcggctcctgcggcggtgccggctgcggctggtggaagagctgcaggtggaccagctctgggacgccctgctgagccgcgagctgttcaggccccatatgatcgaggacatccagcgggcaggctctggatctcggcgggatcaggccaggcagctgatcatagatctggagactcgagggagtcaggctcttcctttgttcatctcctgcttagaggacacaggccaggacatgctggcttcgtttctgcgaactaacaggcaagcagcaaagttgtcgaagccaaccctagaaaaccttaccccagtggtgctcagaccagagattcgcaaaccagaggttctcagaccggaaacacccagaccagtggacattggttctggaggatttggtgatgtcggtgctcttgagagtttgaggggaaatgcagatttggcttacatcctgagcatggagccctgtggccactgcctcattatcaacaatgtgaacttctgccgtgagtccgggctccgcacccgcactggctccaacatcgactgtgagaagttgcggcgtcgcttctcctcgctgcatttcatggtggaggtgaagggcgacctgactgccaagaaaatggtgctggctttgctggagctggcgcagcaggaccacggtgctctggactgctgcgtggtggtcattctctctcacggctgtcaggccagccacctgcagttcccaggggctgtctacggcacagatggatgccctgtgtcggtcgagaagattgtgaacatcttcaatgggaccagctgccccagcctgggagggaagcccaagctctttttcatccaggcctgtggtggggagcagaaagaccatgggtttgaggtggcctccacttcccctgaagacgagtcccctggcagtaaccccgagccagatgccaccccgttccaggaaggtttgaggaccttcgaccagctggacgccatatctagtttgcccacacccagtgacatctttgtgtcctactctactttcccaggttttgtttcctggagggaccccaagagtggctcctggtacgttgagaccctggacgacatctttgagcagtgggctcactctgaagacctgcagtccctcctgcttagggtcgctaatgctgtttcggtgaaagggatttataaacagatgcctggttgctttaatttcctccggaaaaaacttttctttaaaacatcataaggccagggcccctcaccctgccttatcttgcaccccaaagctttcctgccccaggcctgaaagaggctgaggcctggactttcctgcaactcaaggactttgcagccggcacagggtctgctctttctctgccagtgacagacaggctcttagcagcttccagattgacgacaagtgctgaacagtggaggaagagggacagatgaatgccgtggattgcacgtggcctcttgagcagtggctggtccagggctagtgacttgtgtcccatgatccctgtgttgtctctagagcagggattaacctctgcactactgacatgtggggccaggtcaccctttgctgtgaggctgtcctgtacattgtgggatgttcagcactgtcccttgcctcaatgccagtaacgcgtcttcctgagtggtgccaaacaaaaaggttctcaggtgttgccaaatatgtcctggggtataaaactttcctcgcctgacaaccactggtctgtagggatttttggctacacacaaaccagtatcgctcatagatcagcaaaccggggcctactagagtctgaacagctgtaatctatgaattctaagtgaaattttaaaaattgttaatttttcctatattgcattaattttaaaaaataaatctgaggcaaatatggactctc

SEQ ID NO: 3221 - DNA, 1621 bp, Homo sapiens
  source 1..1621: mol_type = unassigned DNA; mol_type = unassigned DNA
gtccggaggcggtggggagcgaagactgacccggggccgtgacgcgggggcaggccctggggcgggggcgggtcctggggactggggcgggcggccgaggcccggaagcggactgaggcggcctggagtcttagttggctactcgccatggacgaagcggatcggcggctcctgcggcggtgccggctgcggctggtggaagagctgcaggtggaccagctctgggacgccctgctgagccgcgagctgttcaggccccatatgatcgaggacatccagcgggcaggctctggatctcggcgggatcaggccaggcagctgatcatagatctggagactcgagggagtcaggctcttcctttgttcatctcctgcttagaggacacaggccaggacatgctggcttcgtttctgcgaactaacaggcaagcagcaaagttgtcgaagccaaccctagaaaaccttaccccagtggtgctcagaccagagattcgcaaaccagaggttctcagaccggaaacacccagaccagtggacattggttctggaggatttggtgatgtcgagcagaaagaccatgggtttgaggtggcctccacttcccctgaagacgagtcccctggcagtaaccccgagccagatgccaccccgttccaggaaggtttgaggaccttcgaccagctggacgccatatctagtttgcccacacccagtgacatctttgtgtcctactctactttcccaggttttgtttcctggagggaccccaagagtggctcctggtacgttgagaccctggacgacatctttgagcagtgggctcactctgaagacctgcagtccctcctgcttagggtcgctaatgctgtttcggtgaaagggatttataaacagatgcctggttgctttaatttcctccggaaaaaacttttctttaaaacatcataaggccagggcccctcaccctgccttatcttgcaccccaaagctttcctgccccaggcctgaaagaggctgaggcctggactttcctgcaactcaaggactttgcagccggcacagggtctgctctttctctgccagtgacagacaggctcttagcagcttccagattgacgacaagtgctgaacagtggaggaagagggacagatgaatgccgtggattgcacgtggcctcttgagcagtggctggtccagggctagtgacttgtgtcccatgatccctgtgttgtctctagagcagggattaacctctgcactactgacatgtggggccaggtcaccctttgctgtgaggctgtcctgtacattgtgggatgttcagcactgtcccttgcctcaatgccagtaacgcgtcttcctgagtggtgccaaacaaaaaggttctcaggtgttgccaaatatgtcctggggtataaaactttcctcgcctgacaaccactggtctgtagggatttttggctacacacaaaccagtatcgctcatagatcagcaaaccggggcctactagagtctgaacagctgtaatctatgaattctaagtgaaattttaaaaattgttaatttttcctatattgcattaattttaaaaaataaatctgaggcaaatatggactctc

SEQ ID NO: 3222 - DNA, 1878 bp, Homo sapiens
  source 1..1878: mol_type = unassigned DNA; mol_type = unassigned DNA
agcggatcggcggctcctgcggcggtgccggctgcggctggtggaagagctgcaggtggaccagctctgggacgccctgctgagccgcgagctgttcaggccccatatgatcgaggacatccagcgggcaggctctggatctcggcgggatcaggccaggcagctgatcatagatctggagactcgagggagtcaggctcttcctttgttcatctcctgcttagaggacacaggccaggacatgctggcttcgtttctgcgaactaacaggcaagcagcaaagttgtcgaagccaaccctagaaaaccttaccccagtggtgctcagaccagagattcgcaaaccagaggttctcagaccggaaacacccagaccagtggacattggttctggaggatttggtgatgtcggtgctcttgagagtttgaggggaaatgcagatttgactgtcctctagggagcgtggggagagcccgggtttacgtgggtccctgtgctggcaggcttacatcctgagcatggagccctgtggccactgcctcattatcaacaatgtgaacttctgccgtgagtccgggctccgcacccgcactggctccaacatcgactgtgagaagttgcggcgtcgcttctcctcgctgcatttcatggtggaggtgaagggcgacctgactgccaagaaaatggtgctggctttgctggagctggcgcagcaggaccacggtgctctggactgctgcgtggtggtcattctctctcacggctgtcaggccagccacctgcagttcccaggggctgtctacggcacagatggatgccctgtgtcggtcgagaagattgtgaacatcttcaatgggaccagctgccccagcctgggagggaagcccaagctctttttcatccaggcctgtggtggggagcagaaagaccatgggtttgaggtggcctccacttcccctgaagacgagtcccctggcagtaaccccgagccagatgccaccccgttccaggaaggtttgaggaccttcgaccagctggacgccatatctagtttgcccacacccagtgacatctttgtgtcctactctactttcccaggttttgtttcctggagggaccccaagagtggctcctggtacgttgagaccctggacgacatctttgagcagtgggctcactctgaagacctgcagtccctcctgcttagggtcgctaatgctgtttcggtgaaagggatttataaacagatgcctggttgctttaatttcctccggaaaaaacttttctttaaaacatcataaggccagggcccctcaccctgccttatcttgcaccccaaagctttcctgccccaggcctgaaagaggctgaggcctggactttcctgcaactcaaggactttgcagccggcacagggtctgctctttctctgccagtgacagacaggctcttagcagcttccagattgacgacaagtgctgaacagtggaggaagagggacagatgaatgccgtggattgcacgtggcctcttgagcagtggctggtccagggctagtgacttgtgtcccatgatccctgtgttgtctctagagcagggattaacctctgcactactgacatgtggggccaggtcaccctttgctgtgaggctgtcctgtacattgtgggatgttcagcactgtcccttgcctcaatgccagtaacgcgtcttcctgagtggtgccaaacaaaaaggttctcaggtgttgccaaatatgtcctggggtataaaactttcctcgcctgacaaccactggtctgtagggatttttggctacacacaaaccagtatcgctcatagatcagcaaaccggggcctactagagtctgaacagct

SEQ ID NO: 3223 - DNA, 740 bp, Homo sapiens
  source 1..740: mol_type = unassigned DNA; mol_type = unassigned DNA
ctgtggccactgcctcattatcaacaatgtgaacttctgccgtgagtccgggctccgcacccgcactggctccaacatcgactgtgagaagttgcggcgtcgcttctcctcgctgcatttcatggtggaggtgaagggcgacctgactgccaagaaaatggtgctggctttgctggagctggcgcagcaggaccacggtgctctggactgctgcgtggtggtcattctctctcacggctgtcaggccagccacctgcagttcccaggggctgtctacggcacagatggatgccctgtgtcggtcgagaagattgtgaacatcttcaatgggaccagctgccccagcctgggagggaagcccaagctctttttcatccaggcctgtggtgggggttttgtttcctggagggaccccaagagtggctcctggtacgttgagaccctggacgacatctttgagcagtgggctcactctgaagacctgcagtccctcctgcttagggtcgctaatgctgtttcggtgaaagggatttataaacagatgcctggttgctttaatttcctccggaaaaaacttttctttaaaacatcataaggccagggcccctcaccctgccttatcttgcaccccaaagctttcctgccccaggcctgaaagaggctgaggcctggactttcctgcaactcaaggactttgcagccggcacagggtctgctctttctctgccagtgacagacag

SEQ ID NO: 3224 - DNA, 1351 bp, Homo sapiens
  source 1..1351: mol_type = unassigned DNA; mol_type = unassigned DNA
aattgaccctggggacagggcgaggcgcggaggcgtcctgaaggcgaggcggtgacgcaagagcgaatccttggggcggggcgaggcgttggagatgcgtcctgcgggcgggacggtaacgcgggggcggggcggtgacgtgagcgggcaggctctggatctcggcgggatcaggccaggcagctgatcatagatctggagactcgagggagtcaggctcttcctttgttcatctcctgcttagaggacacaggccaggacatgctggcttcgtttctgcgaactaacaggcaagcagcaaagttgtcgaagccaaccctagaaaaccttaccccagtggtgctcagaccagagattcgcaaaccagaggttctcagaccggaaacacccagaccagtggacattggttctggaggatttggtgatgtcggtgctcttgagagtttgaggggaaatgcagatttggcttacatcctgagcatggagccctgtggccactgcctcattatcaacaatgtgaacttctgccgtgagtccgggctccgcacccgcactggctccaacatcgactgtgagaagttgcggcgtcgcttctcctcgctgcatttcatggtggaggtgaagggcgacctgactgccaagaaaatggtgctggctttgctggagctggcgcagcaggaccacggtgctctggactgctgcgtggtggtcattctctctcacggctgtcaggccagccacctgcagttcccaggggctgtctacggcacagatggatgccctgtgtcggtcgagaagattgtgaacatcttcaatgggaccagctgccccagcctgggagggaagcccaagctctttttcatccaggcctgtggtggggagcagaaagaccatgggtttgaggtggcctccacttcccctgaagacgagtcccctggcagtaaccccgagccagatgccaccccgttccaggaaggtttgaggaccttcgaccagctggacgccatatctagtttgcccacacccagtgacatctttgtgtcctactctactttcccaggttttgtttcctggagggaccccaagagtggctcctggtacgttgagaccctggacgacatctttgagcagtgggctcactctgaagacctgcagtccctcctgcttagggtcgctaatgctgtttcggtgaaagggatttataaacagatgcctggttgctttaatttcctccggaaaaaacttttctttaaaacatcataaggccagggcccctcaccctgccttatcttgcaccccaaagctttcctgccccaggcctgaaagaggctgaggcctggactttcctgca

SEQ ID NO: 3225 - DNA, 1111 bp, Homo sapiens
  source 1..1111: mol_type = unassigned DNA; mol_type = unassigned DNA
atggacgaagcggatcggcggctcctgcggcggtgccggctgcggctggtggaagagctgcaggtggaccagctctgggacgccctgctgagccgcgagctgttcaggccccatatgatcgaggacatccagcgggcaggctctggatctcggcgggatcaggccaggcagctgatcatagatctggagactcgagggagtcaggctcttcctttgttcatctcctgcttagaggacacaggccaggacatgctggcttcgtttctgcgaactaacaggtgctcttgagagtttgaggggaaatgcagatttggcttacatcctgagcatggagccctgtggccactgcctcattatcaacaatgtgaacttctgccgtgagtccgggctccgcacccgcactggctccaacatcgactgtgagaagttgcggcgtcgcttctcctcgctgcatttcatggtggaggtgaagggcgacctgactgccaagaaaatggtgctggctttgctggagctggcgcagcaggaccacggtgctctggactgctgcgtggtggtcattctctctcacggctgtcaggccagccacctgcagttcccaggggctgtctacggcacagatggatgccctgtgtcggtcgagaagattgtgaacatcttcaatgggaccagctgccccagcctgggagggaagcccaagctctttttcatccaggcctgtggtggggagcagaaagaccatgggtttgaggtggcctccacttcccctgaagacgagtcccctggcagtaaccccgagccagatgccaccccgttccaggaaggtttgaggaccttcgaccagctggacgccatatctagtttgcccacacccagtgacatctttgtgtcctactctactttcccaggttttgtttcctggagggaccccaagagtggctcctggtacgttgagaccctggacgacatctttgagcagtgggctcactctgaagacctgcagtccctcctgcttagggtcgctaatgctgtttcggtgaaagggatttataaacagatgcctggttgctttaatttcctccggaaaaaacttttctttaaaacatcataa

SEQ ID NO: 3226 - DNA, 954 bp, Homo sapiens
  source 1..954: mol_type = unassigned DNA; mol_type = unassigned DNA
gcgcggaatggattctggggtcggcgcgaggcgctgagcgggcaggctctggatctcggcgggatcaggccaggcagctgatcatagatctggagactcgagggagtcaggctcttcctttgttcatctcctgcttagaggacacaggccaggacatgctggcttcgtttctgcgaactaacaggcaagcagcaaagttgtcgaagccaaccctagaaaaccttaccccagtggtgctcagaccagagattcgcaaaccagaggttctcagaccggaaacacccagaccagtggacattggttctggaggatttggtgatgtcggtgctcttgagagtttgaggggaaatgcagatttggcttacatcctgagcatggagccctgtggccactgcctcattatcaacaatgtgaacttctgccgtgagtccgggctccgcacccgcactggctccaacatcgactgtgagaagttgcggcgtcgcttctcctcgctgcatttcatggtggaggtgaagggcgacctgactgccaagaaaatggtgctggctttgctggagctggcgcagcaggaccacggtgctctggactgctgcgtggtggtcattctctctcacggctgtcaggccagccacctgcagttcccaggggctgtctacggcacagatggatgccctgtgtcggtcgagaagattgtgaacatcttcaatgggaccagctgccccagcctgggagggaagcccaagctctttttcatccaggcctgtggtggggagcagaaagaccatgggtttgaggtggcctccacttcccctgaagacgagtcccctggcagtaaccccgagccagatgccaccccgttccaggaaggtttgaggaccttcgaccagctggacgccatatctagtttgcccacacccagtgacatctttgtgtcctactctactttcccag

SEQ ID NO: 3227 - DNA, 781 bp, Homo sapiens
  source 1..781: mol_type = unassigned DNA; mol_type = unassigned DNA
ttagttggctactcgccatggacgaagcggatcggcggctcctgcggcggtgccggctgcggctggtggaagagctgcaggtggaccagctctgggacgccctgctgagccgcgagctgttcaggccccatatgatcgaggacatccagcgggcaggctctggatctcggcgggatcaggccaggcagctgatcatagatctggagactcgagggagtcaggctcttcctttgttcatctcctgcttagaggacacaggccaggacatgctggcttcgtttctgcgaactaacaggcaagcagcaaagttgtcgaagccaaccctagaaaaccttaccccagtggtgctcagaccagagattcgcaaaccagaggttctcagaccggaaacacccagaccagtggacattggttctggaggatttggtgatgtcggtgctcttgagagtttgaggggaaatgcagatttggcttacatcctgagcatggagccctgtggccactgcctcattatcaacaatgtgaacttctgccgtgagtccgggctccgcacccgcactggctccaacatcgactgtgagaagttgcggcgtcgcttctcctcgctgcatttcatggtggaggtgaagggcgacctgactgccaaggccagccacctgcagttcccaggggctgtctacggcacagatggatgccctgtgtcggtcgagaagattgtgaacatcttcaatgggaccagctgccccagcctgggagggaagcccaagctctttttcatcca

SEQ ID NO: 3228 - DNA, 569 bp, Homo sapiens
  source 1..569: mol_type = unassigned DNA; mol_type = unassigned DNA
agttggctactcgccatggacgaagcggatcggcggctcctgcggcggtgccggctgcggctggtggaagagctgcaggtggaccagctctgggacgccctgctgagccgcgagctgttcaggccccatatgatcgaggacatccagcgggcaggctctggatctcggcgggatcaggccaggcagctgatcatagatctggagactcgagggagtcaggctcttcctttgttcatctcctgcttagaggacacaggccaggacatgctggcttcgtttctgcgaactaacaggcaagcagcaaagttgtcgaagccaaccctagaaaaccttaccccagtggtgctcagaccagagattcgcaaaccagaggttctcagaccggaaacacccagaccagtggacattggttctggaggatttggtgatgtcggtgctcttgagagtttgaggggaaatgcagatttggtgagtctccatgaaatttgggccagtagctcgggctctgggcccttccctccccacccctcaggtccttccctgcaggtgtgtcaggagcccagggaacc

SEQ ID NO: 3229 - DNA, 725 bp, Homo sapiens
  source 1..725: mol_type = unassigned DNA; mol_type = unassigned DNA
agcaacagttgctaggatggggacgcactctctggtccctattctctttaaccctattcgtagaaccttagagcgtcagattggaagtgaccttagggattctttaactctccaactcctgcaatattgatagggagaccgaggtccagagaggggcagagatttgcccaaggcctagaatccagcattccttttatttttgtttacttatcttttttttttttgagagaatccaggacttttaatcccgtttaccgaaaaccgagctccacccaagaatgtaccagtctgtgccttaagcacggggaaagggcggtgggggtggagagagggataaggcacagggtcttgctctgtcacccaggctgaagtgcagtggtgctatcacagctcactgcagccttatctcctgggctcgagccatcctcttgggagcctcagcctcctgagtagctgggactacagcgggcaggctctggatctcggcgggatcaggccaggcagctgatcatagatctggagactcgagggagtcaggctcttcctttgttcatctcctgcttagaggacacaggccaggacatgctggcttcgtttctgcgaactaacaggcaagcagcaaagttgtcgaagccaaccctagaaaaccttaccccagtggtgctcagaccagagattcgcaaaccagaggttctcagaccggaaacacccagaccagtggacat

SEQ ID NO: 3230 - DNA, 2674 bp, Homo sapiens
  source 1..2674: mol_type = unassigned DNA; mol_type = unassigned DNA
tgcgtgcgtgcgtgcgtgcgtgtgtgtgtgtgtgtgcctctgctctttgtcctgagcccacgattccagagctggctggacccaaggaggtgaagagtcacttttcagccccaggaagggcaaagaagagagaaaatcagcctgtctgctctctccttggctcaacaaggcctctaacagtcttctgtcctctattctgcacacagcatatttgggaacgagaaacaaaagttttcccaaatgaagagaactcacttgtttattgtggggatttattttctgtcctcttgcagggcagaagaggggcttaatttccccacatatgatgggaaggaccgagtggtaagtctttccgagaagaacttcaagcaggttttaaagaaatatgacttgctttgcctctactaccatgagccggtgtcttcagataaggtcacgcaaaaacagttccaactgaaagaaatcgtgcttgagcttgtggcccaggtccttgaacataaagctataggctttgtgatggtggatgccaagaaagaagccaagcttgccaagaaactgggttttgatgaagaaggaagcctgtatattcttaagggtgatcgcacaatagagtttgatggcgagtttgcagctgatgtcttggtggagttcctcttggatctaattgaagacccagtggagatcatcagcagcaaactggaagtccaagccttcgaacgcattgaagactacatcaaactcattggctttttcaagagtgaggactcagaatactacaaggcttttgaagaagcagctgaacacttccagccttacatcaaattctttgccacctttgacaaaggggttgcaaagaaattatctttgaagatgaatgaggttgacttctatgagccatttatggatgagcccattgccatccccaacaaaccttacacagaagaggagctggtggagtttgtgaaggaacaccaaagacccactctacgtcgcctgcgcccagaagaaatgtttgaaacatgggaagatgatttgaatgggatccacattgtggcctttgcagagaagagtgatccagatggctacgaattcctggagatcctgaaacaggttgcccgggacaatactgacaaccccgatctgagcatcctgtggatcgacccggacgactttcctctgctcgttgcctactgggagaagactttcaagattgacctattcaggccacagattggggtggtgaatgtcacagatgctgacagtgtctggatggagattccagatgatgacgatcttccaactgctgaggagctggaggactggattgaggatgtgctttctggaaagataaacactgaagatgatgatgaagatgatgatgatgatgataattctgatgaagaggataatgatgacagtgatgacgatgatgatgaatagcccaactccaaacaattctgatgaaaacaaaatcacagcacccactaccatacagacagcacaaggtggcagcaagcaattctgccccacacccagccagctcctttcccttttccatcatctcttttcccactccctttgcgtcaggagcagcatcattcagcaaatgccttttcaaatgcagcaatcccacttagcagggacaggagaaaaattattcccatgttgactgtcttgactgtcacggaacagatcttgttctttgctggaccatcaagggtcatggcagtgcctgaacatggcagtctagggtgaacaatcccctaacacaagtttacttgtctttgattatgacagtaacaaaattgacagctttctaactcacaggcatagagtgaccttttaatcagagcccagggaagacacatgattaatgatttagctccctccatacctcgaacatcagttgggatccctcctccagccaagatgatccttcttagagaaggctcagccttggaagcaaacttataaatcatattctcatggctttgttaaacttatttcaagtgatggtcattcatatcactatgaacttggatattcaagcctttggatggctatggagagggcttgaaatgtgtacaggtgtcaccatcatttctagtatattaggaaactgggatgggaggttgatttgctctctaaacttccctctagttggcaagtctcacatattcatcagcaggagtggagggtgggggaaaactagaaagatgaaaacttttacatttttctgatgggttcatgtctctgattgggtcagctggcttcctagcctaagctgggatctgaataccccttctctgtagctgctagtgagccttcccatttagattaaagattgctttatccagcagtcaattaactctccagttatcagtactcccacaattggccagggcaacaataattggagttcatactgatgccctgaggcactgaaaaaaaaaaaaatcccaaagtgccttctgagctgtctaaaagttacattgtgcttggtagatttagtgttaagtgtgcagtataattttctaatttattttctcaatcttttagcacatgtgtaagacactgtgcaaattttttgaaaatagagcaatactttttgtggaatactagctaactaattctgtcattaaactcatattttgaaaatattcagacaatgttg

SEQ ID NO: 3231 - DNA, 220 bp, Homo sapiens
  source 1..220: mol_type = unassigned DNA; mol_type = unassigned DNA
aaattctttgccacctttgacaaaggggtgctgtggctcacacctgtaatcccaacactttgggaggctgacgggggtggattgcatgagccttggagttggagaccagcctgggcaacatggttgcaaagaaattatctttgaagatgaatgaggttgacttctatgagccatttatggatgagcccattgccatccccaacaaaccttacacagaaga

SEQ ID NO: 3232 - DNA, 3626 bp, Homo sapiens
  source 1..3626: mol_type = unassigned DNA; mol_type = unassigned DNA
gaagtcggctgtggaagtgtgggcggccattttgagaccgggcaagaggggcgggactggtgcggccgagtgacagttgaccggttttaaccaagtgactggttctagccacgttatgtgcggcccagccatgttccctgccggtcctccgtggcccagagtccgagtcgtgcaggtgctgtgggccctgctggcagtgctcctggcgtcgtggaggctgtgggcgatcaaggatttccaggaatgcacctggcaggttgtcctgaacgagtttaagagggtaggcgagagtggtgtgagcgacagcttctttgagcaagagcccgtggacacagtgagcagcttgtttcacatgctggtggactcacccatcgacccgagcgagaaatacctgggcttcccttactacctgaagatcaactactcctgcgaggaaaagccctctgaggacctggtgcgcatgggccacctgacggggctaaagcccctggtgctggtcaccttccagtccccagtcaacttctaccgctggaagatagagcagctgcagatccagatggaggctgcccccttccgcagcaaagagccatgcatggcagaagaagtgtgtagcatgagctggtacacgcccatgcccatcaagaaaggcagtgtggtcatgcgtgtggacatcagcagcaatggcctggggaccttcattccagataaaaggttccagatgaatatcaacggcttcctgaagagagaccgggacaataacatccaattcactgtgggagaggagctcttcaacctgatgccccagtactttgtgggtgtctcatcgaggcccttgtggcacactgtggaccagtcacctgtgcttatcctgggaggcattcccaatgagaagtacgtcctgatgactgacaccagcttcaaggacttctctctcgtggagctgagcattgacagttgctgggtgggctccttctactgcccccattctggcttcacagccaccatctatgacactattgccaccgagagcaccctcttcattcggcagaaccagctggtctactattttacaggcacctataccacactctatgagagaaaccgcggcagtggcagttggattcgtgtcctggccagcgagtgcatcaagaagctgtgccctgtgtatttccatagcaatggctctgagtacataatggccctcaccacgggcaagcatgagggttatgtacacttcgggaccatcagagatggccaggtgtcctttgagatgctgcccaggcagtggtctgtgtgcgagcagataggagctagtgatgacctggaacttctctaccacatcccagaattcatccctgaagctcgaggattggagttcctgatgatcctagggacagagtcctacaccagcactgcaatggcccccaagggcatcttctgtaacccgtacaacaatctgatcttcatctggggcaacttcctcctgcagagctctaacaaggaaaacttcatctacctggcagacttccccaaggaactgtccatcaaatacatggccagatcgttccgtggggctgtggctattgtcacagagacggaggagatctggtacctcctggagggcagctaccgggtctaccagctgttcccttccaagggctggcaggtgcacatcagcttaaagctgatgcaacagtcctctctctacgcatccaatgagaccatgctgaccctcttctacgaagacagcaaactgtaccagctggtgtaccttatgaacaaccagaagggccagctggtcaagaggctcgtgcccgtggagcagcttctgatgtatcaacagcacaccagccactatgacttggagcggaaagggggctacttgatgctctccttcatcgacttctgccccttctcggtgatgcgcctgcggagcctgcccagtccgcagagatacacgcgccaggagcgctaccgggcgcggccgccgcgcgtcctggagcgctcgggcttccacaacgagaactcgctcgccatctaccagggcctggtctactacctgctgtggctgcactccgtgtacgacaagccgtacgcggacccggtgcacgaccccacctggcgctggtgggcgaacaacaaacaagaccaggattactacttcttcttggcgagcaattggcgaagcgcgggcggcgtgtccatagaaatggacagctacgaaaagatctacaacctcgagtccgcgtacgagctgccggagcgcattttcctggacaagggcactgagtacagcttcgccatcttcctgtcggcgcagggccactcgttccggacgcagtcagaactcggcaccgccttccagctgcatagccaggtggacgtgggcgtggtgctggccgaccccggctgcatcgaggcctcggtgaagcaggaggtcctgattaatcgcaactcggtgctattttcgattacgctcaaggataaaaagctttgctatgaccaaggcattagtggacatcaccttatggagacttccatgacggtcaatgtggtgggttcatccgggctctgcttccaggaaacacacctggggccccatatgcaaggcaacctgatggtgccagtgttcattggctgccccccaggcaagcgcctggccttcgacatcacctacacgctggaatacagccgcctgaagaacaaacactactttgactgcgttaacgtgaacccggagatgccctgctttctcttccgggacattttctaccccttcttcttgattcaagatttggtgacaggagactccggcagtttccagggcagctatgttctgctggtggtgggtggcgggcccacactggacagcctcaaggactacagtgaggacgaaatctaccgcttcaacagccccctggacaagaccaacagccttatctggaccacgaggaccacaaggaccaccaaagactcagcctttcacatcatgtcccacgagagcccaggcatcgagtggctctgtctggagaatgccccatgctatgacaatgttccccaaggcatctttgcccctgaattcttcttcaaggtgttggtgagcaatagaggagtggacacgagcacctactgcaactaccagctcaccttcctgctgcacatccacgggctgccactcagtcccaagcgggcccttttcatcatcatggtgtcagctagcgtgtttgtgggcctggtgatcttctacatcgccttctgcctcctgtggcccctcgtggtgaagggctgcacgatgatccggtggaagataaacaacctcattgcctcagaatcctactacacctacgcctccatttccggaatctcgagcatgccgtctctgagacattccaggatgggctccatgttcagctccaggatgacagaggacagggctgaacccaaggaagccgtggagagacagttgatgacctgagtgtcccacctgccccagcccccagttactgtcacgcctctcttatgaggcccatcttgaagatgcaacctgtcacccagcccaggcctctctttctgttttgcttgatgtttacttctcgttcagactcaaataaagccttttttcagga

SEQ ID NO: 3233 - DNA, 3746 bp, Homo sapiens
  source 1..3746: mol_type = unassigned DNA; mol_type = unassigned DNA
gaagtcggctgtggaagtgtgggcggccattttgagaccgggcaagaggggcgggactggtgcggccgagtgacagttgaccggttttaaccaagtgactggttctagccacgttatgtgcggcccagccatgttccctgccggtcctccgtggcccagagtccgagtcgtgcaggtgctgtgggccctgctggcagtgctcctggcgtcgtggaggctgtgggcgatcaaggatttccaggaatgcacctggcaggttgtcctgaacgagtttaagagggtaggcgagagtggtgtgagcgacagcttctttgagcaagagcccgtggacacagtgagcagcttgtttcacatgctggtggactcacccatcgacccgagcgagaaatacctgggcttcccttactacctgaagatcaactactcctgcgaggaaaagccctctgaggacctggtgcgcatgggccacctgacggggctaaagcccctggtgctggtcaccttccagtccccagtcaacttctaccgctggaagatagagcagctgcagatccagatggaggctgcccccttccgcagcaaagagccatgcatggcagaagaagtgtgtagcatgagctggtacacgcccatgcccatcaagaaaggcagtgtggtcatgcgtgtggacatcagcagcaatggcctggggaccttcattccagataaaaggttccagatgaatatcaacggcttcctgaagagagaccgggacaataacatccaattcactgtgggagaggagctcttcaacctgatgccccagtactttgtgggtgtctcatcgaggcccttgtggcacactgtggaccagtcacctgtgcttatcctgggaggcattcccaatgagaagtacgtcctgatgactgacaccagcttcaaggacttctctctcgtggagctgagcattgacagttgctgggtgggctccttctactgcccccattctggcttcacagccaccatctatgacactattgccaccgagagcaccctcttcattcggcagaaccagctggtctactattttacaggcacctataccacactctatgagagaaaccgcggcagtggcagttggattcgtgtcctggccagcgagtgcatcaagaagctgtgccctgtgtatttccatagcaatggctctgagtacataatggccctcaccacgggcaagcatgagggttatgtacacttcgggaccatcagagatggccaggtgtcctttgagatgctgcccaggcagtggtctgtgtgcgagcagataggagttaccacctgctccataatttggtctgaatacatcgcgggtgagtatactctactgctgctggtggagagtggatatggtaatgcaagtaaacgtttccaggtggtcagctacaacacagctagtgatgacctggaacttctctaccacatcccagaattcatccctgaagctcgaggattggagttcctgatgatcctagggacagagtcctacaccagcactgcaatggcccccaagggcatcttctgtaacccgtacaacaatctgatcttcatctggggcaacttcctcctgcagagctctaacaaggaaaacttcatctacctggcagacttccccaaggaactgtccatcaaatacatggccagatcgttccgtggggctgtggctattgtcacagagacggaggagatctggtacctcctggagggcagctaccgggtctaccagctgttcccttccaagggctggcaggtgcacatcagcttaaagctgatgcaacagtcctctctctacgcatccaatgagaccatgctgaccctcttctacgaagacagcaaactgtaccagctggtgtaccttatgaacaaccagaagggccagctggtcaagaggctcgtgcccgtggagcagcttctgatgtatcaacagcacaccagccactatgacttggagcggaaagggggctacttgatgctctccttcatcgacttctgccccttctcggtgatgcgcctgcggagcctgcccagtccgcagagatacacgcgccaggagcgctaccgggcgcggccgccgcgcgtcctggagcgctcgggcttccacaacgagaactcgctcgccatctaccagggcctggtctactacctgctgtggctgcactccgtgtacgacaagccgtacgcggacccggtgcacgaccccacctggcgctggtgggcgaacaacaaacaagaccaggattactacttcttcttggcgagcaattggcgaagcgcgggcggcgtgtccatagaaatggacagctacgaaaagatctacaacctcgagtccgcgtacgagctgccggagcgcattttcctggacaagggcactgagtacagcttcgccatcttcctgtcggcgcagggccactcgttccggacgcagtcagaactcggcaccgccttccagctgcatagccaggtggacgtgggcgtggtgctggccgaccccggctgcatcgaggcctcggtgaagcaggaggtcctgattaatcgcaactcggtgctattttcgattacgctcaaggataaaaagctttgctatgaccaaggcattagtggacatcaccttatggagacttccatgacggtcaatgtggtgggttcatccgggctctgcttccaggaaacacacctggggccccatatgcaaggcaacctgatggtgccagtgttcattggctgccccccaggcaagcgcctggccttcgacatcacctacacgctggaatacagccgcctgaagaacaaacactactttgactgcgttaacgtgaacccggagatgccctgctttctcttccgggacattttctaccccttcttcttgattcaagatttggtgacaggagactccggcagtttccagggcagctatgttctgctggtggtgggtggcgggcccacactggacagcctcaaggactacagtgaggacgaaatctaccgcttcaacagccccctggacaagaccaacagccttatctggaccacgaggaccacaaggaccaccaaagactcagcctttcacatcatgtcccacgagagcccaggcatcgagtggctctgtctggagaatgccccatgctatgacaatgttccccaaggcatctttgcccctgaattcttcttcaaggtgttggtgagcaatagaggagtggacacgagcacctactgcaactaccagctcaccttcctgctgcacatccacgggctgccactcagtcccaagcgggcccttttcatcatcatggtgtcagctagcgtgtttgtgggcctggtgatcttctacatcgccttctgcctcctgtggcccctcgtggtgaagggctgcacgatgatccggtggaagataaacaacctcattgcctcagaatcctactacacctacgcctccatttccggaatctcgagcatgccgtctctgagacattccaggatgggctccatgttcagctccaggatgacagaggacagggctgaacccaaggaagccgtggagagacagttgatgacctgagtgtcccacctgccccagcccccagttactgtcacgcctctcttatgaggcccatcttgaagatgcaacctgtcacccagcccaggcctctctttctgttttgcttgatgtttacttctcgttcagactcaaataaagccttttttcagga

SEQ ID NO: 3234 - DNA, 3501 bp, Homo sapiens
  source 1..3501: mol_type = unassigned DNA; mol_type = unassigned DNA
aagaggggcgggactggtgcggccgagtgacagttgaccggttttaaccaagtgactggttctagccacgttatgtgcggcccagccatgttccctgccggtcctccgtggcccagagtccgagtcgtgcaggtgctgtgggccctgctggcagtgctcctggcgtcgtggaggctgtgggcgatcaaggatttccaggaatgcacctggcaggttgtcctgaacgagtttaagagggtaggcgagagtggtgtgagcgacagcttctttgagcaagagcccgtggacacagtgagcagcttgtttcacatgctggtggactcacccatcgacccgagcgagaaatacctgggcttcccttactacctgaagatcaactactcctgcgaggaaaagtccccagtcaacttctaccgctggaagatagagcagctgcagatccagatggaggctgcccccttccgcagcaaagagccatgcatggcagaagaagtgtgtagcatgagctggtacacgcccatgcccatcaagaaaggcagtgtggtcatgcgtgtggacatcagcagcaatggcctggggaccttcattccagataaaaggttccagatgaatatcaacggcttcctgaagagagaccgggacaataacatccaattcactgtgggagaggagctcttcaacctgatgccccagtactttgtgggtgtctcatcgaggcccttgtggcacactgtggaccagtcacctgtgcttatcctgggaggcattcccaatgagaagtacgtcctgatgactgacaccagcttcaaggacttctctctcgtggaggcacctataccacactctatgagagaaaccgcggcagtggcagttggattcgtgtcctggccagcgagtgcatcaagaagctgtgccctgtgtatttccatagcaatggctctgagtacataatggccctcaccacgggcaagcatgagggttatgtacacttcgggaccatcagagatggccaggtgtcctttgagatgctgcccaggcagtggtctgtgtgcgagcagataggagttaccacctgctccataatttggtctgaatacatcgcgggtgagtatactctactgctgctggtggagagtggatatggtaatgcaagtaaacgtttccaggtggtcagctacaacacagctagtgatgacctggaacttctctaccacatcccagaattcatccctgaagctcgaggattggagttcctgatgatcctagggacagagtcctacaccagcactgcaatggcccccaagggcatcttctgtaacccgtacaacaatctgatcttcatctggggcaacttcctcctgcagagctctaacaaggaaaacttcatctacctggcagacttccccaaggaactgtccatcaaatacatggccagatcgttccgtggggctgtggctattgtcacagagacggaggagatctggtacctcctggagggcagctaccgggtctaccagctgttcccttccaagggctggcaggtgcacatcagcttaaagctgatgcaacagtcctctctctacgcatccaatgagaccatgctgaccctcttctacgaagacagcaaactgtaccagctggtgtaccttatgaacaaccagaagggccagctggtcaagaggctcgtgcccgtggagcagcttctgatgtatcaacagcacaccagccactatgacttggagcggaaagggggctacttgatgctctccttcatcgacttctgccccttctcggtgatgcgcctgcggagcctgcccagtccgcagagatacacgcgccaggagcgctaccgggcgcggccgccgcgcgtcctggagcgctcgggcttccacaacgagaactcgctcgccatctaccagggcctggtctactacctgctgtggctgcactccgtgtacgacaagccgtacgcggacccggtgcacgaccccacctggcgctggtgggcgaacaacaaacaagaccaggattactacttcttcttggcgagcaattggcgaagcgcgggcggcgtgtccatagaaatggacagctacgaaaagatctacaacctcgagtccgcgtacgagctgccggagcgcattttcctggacaagggcactgagtacagcttcgccatcttcctgtcggcgcagggccactcgttccggacgcagtcagaactcggcaccgccttccagctgcatagccaggtggacgtgggcgtggtgctggccgaccccggctgcatcgaggcctcggtgaagcaggaggtcctgattaatcgcaactcggtgctattttcgattacgctcaaggataaaaagctttgctatgaccaaggcattagtggacatcaccttatggagacttccatgacggtcaatgtggtgggttcatccgggctctgcttccaggaaacacacctggggccccatatgcaaggcaacctgatggtgccagtgttcattggctgccccccaggcaagcgcctggccttcgacatcacctacacgctggaatacagccgcctgaagaacaaacactactttgactgcgttaacgtgaacccggagatgccctgctttctcttccgggacattttctaccccttcttcttgattcaagatttggtgacaggagactccggcagtttccagggcagctatgttctgctggtggtgggtggcgggcccacactggacagcctcaaggactacagtgaggacgaaatctaccgcttcaacagccccctggacaagaccaacagccttatctggaccacgaggaccacaaggaccaccaaagactcagcctttcacatcatgtcccacgagagcccaggcatcgagtggctctgtctggagaatgccccatgctatgacaatgttccccaaggcatctttgcccctgaattcttcttcaaggtgttggtgagcaatagaggagtggacacgagcacctactgcaactaccagctcaccttcctgctgcacatccacgggctgccactcagtcccaagcgggcccttttcatcatcatggtgtcagctagcgtgtttgtgggcctggtgatcttctacatcgccttctgcctcctgtggcccctcgtggtgaagggctgcacgatgatccggtggaagataaacaacctcattgcctcagaatcctactacacctacgcctccatttccggaatctcgagcatgccgtctctgagacattccaggatgggctccatgttcagctccaggatgacagaggacagggctgaacccaaggaagccgtggagagacagttgatgacctgagtgtcccacctgccccagcccccagttactgtcacgcctctcttatgaggcccatcttgaagatgcaacctgtcacccagcccaggcctctctttctgttttgcttgatgtttacttctcgttcagactcaaataaagccttttttcagga

SEQ ID NO: 3235 - DNA, 3785 bp, Homo sapiens
  source 1..3785: mol_type = unassigned DNA; mol_type = unassigned DNA
ggtgcggccgagtgacagttgaccggttttaaccaagtgactggttctagccacgttatgtgcggcccagccatgttccctgccggtcctccgtggcccagagtccgagtcgtgcaggtgctgtgggccctgctggcagtgctcctggcgtcgtggaggctgtgggcgatcaaggatttccaggaatgcacctggcaggttgtcctgaacgagtttaagagggtaggcgagagtggtgtgagcgacagcttctttgagcaagagcccgtggacacagtgagcagcttgtttcacatgctggtggactcacccatcgacccgagcgagaaatacctgggcttcccttactacctgaagatcaactactcctgcgaggaaaagacggagtcttgcgctgttgcccagactggagtgcagtggcgcgatctcggctcactgcaacctccgcctcccgtgttcaagcgatgctcctgcctcggcctcccaagtagctggaactacagccctctgaggacctggtgcgcatgggccacctgacggggctaaagcccctggtgctggtcaccttccagtccccagtcaacttctaccgctggaagatagagcagctgcagatccagatggaggctgcccccttccgcagcaaagagccatgcatggcagaagaagtgtgtagcatgagctggtacacgcccatgcccatcaagaaaggcagtgtggtcatgcgtgtggacatcagcagcaatggcctggggaccttcattccagataaaaggttccagatgaatatcaacggcttcctgaagagagaccgggacaataacatccaattcactgtgggagaggagctcttcaacctgatgccccagtactttgtgggtgtctcatcgaggcccttgtggcacactgtggaccagtcacctgtgcttatcctgggaggcattcccaatgagaagtacgtcctgatgactgacaccagcttcaaggacttctctctcgtggaggcagttggattcgtgtcctggccagcgagtgcatcaagaagctgtgccctgtgtatttccatagcaatggctctgagtacataatggccctcaccacgggcaagcatgagggttatgtacacttcgggaccatcagagatggccaggtgtcctttgagatgctgcccaggcagtggtctgtgtgcgagcagataggagttaccacctgctccataatttggtctgaatacatcgcgggtgagtatactctactgctgctggtggagagtggatatggtaatgcaagtaaacgtttccaggtggtcagctacaacacagctagtgatgacctggaacttctctaccacatcccagaattcatccctgaagctcgaggattggagttcctgatgatcctagggacagagtcctacaccagcactgcaatggcccccaagggcatcttctgtaacccgtacaacaatctgatcttcatctggggcaacttcctcctgcagagctctaacaaggaaaacttcatctacctggcagacttccccaaggaactgtccatcaaatacatggccagatcgttccgtggggctgtggctattgtcacagagacggaggagatctggtacctcctggagggcagctaccgggtctaccagctgttcccttccaagggctggcaggtgcacatcagcttaaagctgatgcaacagtcctctctctacgcatccaatgagaccatgctgaccctcttctacgaagacagcaaactgtaccagctggtgtaccttatgaacaaccagaagggccagctggtcaagaggctcgtgcccgtggagcagcttctgatgtatcaacagcacaccagccactatgacttggagcggaaagggggctacttgatgctctccttcatcgacttctgccccttctcggtgatgcgcctgcggagcctgcccagtccgcagagatacacgcgccaggagcgctaccgggcgcggccgccgcgcgtcctggagcgctcgggcttccacaacgagaactcgctcgccatctaccagggcctggtctactacctgctgtggctgcactccgtgtacgacaagccgtacgcggacccggtgcacgaccccacctggcgctggtgggcgaacaacaaacaagaccaggattactacttcttcttggcgagcaattggcgaagcgcgggcggcgtgtccatagaaatggacagctacgaaaagatctacaacctcgagtccgcgtacgagctgccggagcgcattttcctggacaagggcactgagtacagcttcgccatcttcctgtcggcgcagggccactcgttccggacgcagtcagaactcggtctgcgcgggaccagagtggagcccgaagggcggggcgagggctaccagaatctgggagcctggggggcggggacaccatcggaggggcggggcctgtctgtgagggaggccttaaccccgtttactgcccggagcaggcaccgccttccagctgcatagccaggtggacgtgggcgtggtgctggccgaccccggctgcatcgaggcctcggtgaagcaggaggtcctgattaatcgcaactcggtgctattttcgattacgctcaaggataaaaagctttgctatgaccaaggcattagtggacatcaccttatggagacttccatgacggtcaatgtggtgggttcatccgggctctgcttccaggaaacacacctggggccccatatgcaaggcaacctgatggtgccagtgttcattggctgccccccaggcaagcgcctggccttcgacatcacctacacgctggaatacagccgcctgaagaacaaacactactttgactgcgttaacgtgaacccggagatgccctgctttctcttccgggacattttctaccccttcttcttgattcaagatttggtgacaggagactccggcagtttccagggcagctatgttctgctggtggtgggtggcgggcccacactggacagcctcaaggactacagtgaggacgaaatctaccgcttcaacagccccctggacaagaccaacagccttatctggaccacgaggaccacaaggaccaccaaagactcagcctttcacatcatgtcccacgagagcccaggcatcgagtggctctgtctggagaatgccccatgctatgacaatgttccccaaggcatctttgcccctgaattcttcttcaaggtgttggtgagcaataggtgagccagaggagtggacacgagcacctactgcaactaccagctcaccttcctgctgcacatccacgggctgccactcagtcccaagcgggcccttttcatcatcatggtgtcagctagcgtgtttgtgggcctggtgatcttctacatcgccttctgcctcctgtggcccctcgtggtgaagggctgcacgatgatccggtggaagataaacaacctcattgcctcagaatcctactacacctacgcctccatttccggaatctcgagcatgccgtctctgagacattccaggatgggctccatgttcagctccaggatgacagaggacagggctgaacccaaggaagccgtggagagacagttgatgacctgagtgtcccacctgccccagcccccagttactgtcacgcctctcttatgaggcccatcttgaagatgcaacctgtcacccagcccaggcctctctttctgttttgcttgatgtttacttctcgttcagactcaaataaagccttttttcagg

SEQ ID NO: 3236 - DNA, 668 bp, Homo sapiens
  source 1..668: mol_type = unassigned DNA; mol_type = unassigned DNA
agttgaccggttttaaccaagtgactggttctagccacgttatgtgcggcccagccatgttccctgccggtcctccgtggcccagagtccgagtcgtgcaggtgctgtgggccctgctggcagtgctcctggcgtcgtggaggctgtgggcgatcaaggatttccaggaatgcacctggcaggttgtcctgaacgagtttaagagggtaggcgagagtggtgtgagcgacagcttctttgagcaagagcccgtggacacagtgagcagcttgtttcacatgctggtggactcacccatcgacccgagcgagaaatacctgggcttcccttactacctgaagatcaactactcctgcgaggaaaagtccccagtcaacttctaccgctggaagatagagcagctgcagatccagatggaggctgcccccttccgcagcaaaggttccagatgaatatcaacggcttcctgaagagagaccgggacaataacatccaattcactgtgggagaggagctcttcaacctgatgccccagtactttgtgggtgtctcatcgaggcccttgtggcacactgtggaccagtcacctgtgcttatcctgggaggcattcccaatgagaagtacgtcctgatgactgacaccagcttcaaggacttctctctcgtgg

SEQ ID NO: 3237 - DNA, 2634 bp, Homo sapiens
  source 1..2634: mol_type = unassigned DNA; mol_type = unassigned DNA
ggaagagtcgtgggagctgggagaggagggaaagaggggaagagtcgtgggagctggcagaggagggaaagggggagccgaacgtgaagggcgaagggcggggcggggcaggagagtcggggtatagagcaggcaggtgttaatggcatgggaaggaagagtaagaagtggggcaagaaggtgtcgcggtacgaggggaaggtgagactcaagaaggtgccggctaagaagctggtgccggcgtggaaggagaaggtgtggggcgaggaaacaacgaagggcgaggaaagatcccgaggcgaagagacagttttcatcgagaaggggcagggcgaggaggaggggcgttaccagagggcgggacggggcgacgggcccgcgcgggaagaaccaatcgccgagaacccggggaaggaacgggtccataaagaccaagtggaggagtaggggcgcggtcaggagcggaagcagagtgaggagcaagccccgggcgagaaacgggggcccggccgggagcaagagcaggggcggggccgggagcaagagcaggggcggggcccggagacgggcgagaccaggtacagtacccagcccctgggcagaccccgagcgaggagaaagcggcgataccaagagaagttctagccacgttatgtgcggcccagccatgttccctgccggtcctccgtggcccagagtccgagtcgtgcaggtgctgtgggccctgctggcagtgctcctggcgtcgtggaggctgtgggcgatcaaggatttccaggaatgcacctggcaggttgtcctgaacgagtttaagagggtaggcgagagtggtgtgagcgacagcttctttgagcaagagcccgtggacacagtgagcagcttgtttcacatgctggtggactcacccatcgacccgagcgagaaatacctgggcttcccttactacctgaagatcaactactcctgcgaggaaaagccctctgaggacctggtgcgcatgggccacctgacggggctaaagcccctggtgctggtcaccttccagtccccagtcaacttctaccgctggaagatagagcagctgcagatccagatggaggctgcccccttccgcagcaaagagccatgcatggcagaagaagtgtgtagcatgagctggtacacgcccatgcccatcaagaaaggcagtgtggtcatgcgtgtggacatcagcagcaatggcctggggaccttcattccagataaaaggttccagatgaatatcaacggcttcctgaagagagaccgggacaataacatccaattcactgtgggagaggagctcttcaacctgatgccccagtactttgtgggtgtctcatcgaggcccttgtggcacactgtggaccagtcacctgtgcttatcctgggaggcattcccaatgagaagtacgtcctgatgactgacaccagcttcaaggacttctctctcgtggagctgagcattgacagttgctgggtgggctccttctactgcccccattctggcttcacagccaccatctatgacactattgccaccgagagcaccctcttcattcggcagaaccagctggtctactattttacaggcacctataccacactctatgagagaaaccgcggcagtggcagttggattcgtgtcctggccagcgagtgcatcaagaagctgtgccctgtgtatttccatagcaatggctctgagtacataatggccctcaccacgggcaagcatgagggttatgtacacttcgggaccatcagagatggccaggtgtcctttgagatgctgcccaggcagtggtctgtgtgcgagcagataggagttaccacctgctccataatttggtctgaatacatcgcgggtgagtatactctactgctgctggtggagagtggatatggtaatgcaagtaaacgtttccaggtggtcagctacaacacagctagtgatgacctggaacttctctaccacatcccagaattcatccctgaagctcgaggattggagttcctgatgatcctagggacagagtcctacaccagcactgcaatggcccccaagggcatcttctgtaacccgtacaacaatctgatcttcatctggggcaacttcctcctgcagagctctaacaaggaaaacttcatctacctggcagacttccccaaggaactgtccatcaaatacatggccagatcgttccgtggggctgtggctattgtcacagagacggaggagatctggtacctcctggagggcagctaccgggtctaccagctgttcccttccaagggctggcaggtgcacatcagcttaaagctgatgcaacagtcctctctctacgcatccaatgagaccatgctgaccctcttctacgaagacagcaaactgtaccagctggtgtaccttatgaacaaccagaagggccagctggtcaagaggctcgtgcccgtggagcagcttctgatgtatcaacagcacaccagccactatgacttggagcggaaagggggctacttgatgctctccttcatcgacttctgccccttctcggtgatgcgcctgcggagcctgcccagtccgcagagatacacgcgccaggagcgctaccg

SEQ ID NO: 3238 - DNA, 653 bp, Homo sapiens
  source 1..653: mol_type = unassigned DNA; mol_type = unassigned DNA
agtccgtgcgggggcagggccaggagcaagagcaggggcgggaccaagagcaagtgcaggggcggggccaggagcaagagccggggcgtggccaggagcaagtgctgtgagaggcgcagaagcgaggtggaatcttaaaagtgggctccagagagctgtccggcgcgtgggtgttgactcctgcgttctccaggttctagccacgttatgtgcggcccagccatgttccctgccggtcctccgtggcccagagtccgagtcgtgcaggtgctgtgggccctgctggcagtgctcctggcgtcgtggaggctgtgggcgatcaaggatttccaggaatgcacctggcaggttgtcctgaacgagtttaagagggtaggcgagagtggtgtgagcgacagcttctttgagcaagagcccgtggacacagtgagcagcttgtttcacatgctggtggactcacccatcgacccgagcgagaaatacctgggcttcccttactacctgaagatcaactactcctgcgaggaaaagacggagtcttgcgctgttgcccagactggagtgcagtggcgcgatctcggctcactgcaacctccgcctcccgtgttcaagcgatgctcctgcctcggcctcccaagtagctggaactacag

SEQ ID NO: 3239 - DNA, 633 bp, Homo sapiens
  source 1..633: mol_type = unassigned DNA; mol_type = unassigned DNA
ctggtgctggtcaccttccagtccccagtcaacttctaccgctggaagatagagcagctgcagatccagatggaggctgcccccttccgcagcaaagagccatgcatggcagaagaagtgtgtagcatgagctggtacacgcccatgcccatcaagaaaggcagtgtggtcatgcgtgtggacatcagcagcaatggcctggggaccttcattccagataaaaggttccagatgaatatcaacggcttcctgaagagagaccgggacaataacatccaattcactgtgggagaggagctcttcaacctgatgccccagtactttgtgggtgtctcatcgaggcccttgtggcacactgtggaccagtcacctgtgcttatcctgggaggcattcccaatgagaagtacgtcctgatgactgacaccagcttcaaggacttctctctcgtggagctagtgatgacctggaacttctctaccacatcccagaattcatccctgaagctcgaggattggagttcctgatgatcctagggacagagtcctacaccagcactgcaatggcccccaagggcatcttctgtaacccgtacaacaatctgatcttcatctggggcaacttcctcctgcaga

SEQ ID NO: 3240 - DNA, 2899 bp, Homo sapiens
  source 1..2899: mol_type = unassigned DNA; mol_type = unassigned DNA
cgctggaagatagagcagctgcagatccagatggaggctgcccccttccgcagcaaagagccatgcatggcagaagaagtgtgtagcatgagctggtacacgcccatgcccatcaagaaaggcagtgtggtcatgcgtgtggacatcagcagcaatggcctggggaccttcattccagataaaaggttccagatgaatatcaacggcttcctgaagagagaccgggacaataacatccaattcactgtgggagaggagctcttcaacctgatgccccagtactttgtgggtgtctcatcgaggcccttgtggcacactgtggaccagtcacctgtgcttatcctgggaggcattcccaatgagaagtacgtcctgatgactgacaccagcttcaaggacttctctctcgtggaggcagttggattcgtgtcctggccagcgagtgcatcaagaagctgtgccctgtgtatttccatagcaatggctctgagtacataatggccctcaccacgggcaagcatgagggttatgtacacttcgggaccatcagagatggccaggtgtcctttgagatgctgcccaggcagtggtctgtgtgcgagcagataggagttaccacctgctccataatttggtctgaatacatcgcgggtgagtatactctactgctgctggtggagagtggatatggtaatgcaagtaaacgtttccaggtggtcagctacaacacagctagtgatgacctggaacttctctaccacatcccagaattcatccctgaagctcgaggattggagttcctgatgatcctagggacagagtcctacaccagcactgcaatggcccccaagggcatcttctgtaacccgtacaacaatctgatcttcatctggggcaacttcctcctgcagagctctaacaaggaaaacttcatctacctggcagacttccccaaggaactgtccatcaaatacatggccagatcgttccgtggggctgtggctattgtcacagagacggaggagatctggtacctcctggagggcagctaccgggtctaccagctgttcccttccaagggctggcaggtgcacatcagcttaaagctgatgcaacagtcctctctctacgcatccaatgagaccatgctgaccctcttctacgaagacagcaaactgtaccagctggtgtaccttatgaacaaccagaagggccagctggtcaagaggctcgtgcccgtggagcagcttctgatgtatcaacagcacaccagccactatgacttggagcggaaagggggctacttgatgctctccttcatcgacttctgccccttctcggtgatgcgcctgcggagcctgcccagtccgcagagatacacgcgccaggagcgctaccgggcgcggccgccgcgcgtcctggagcgctcgggcttccacaacgagaactcgctcgccatctaccagggcctggtctactacctgctgtggctgcactccgtgtacgacaagccgtacgcggacccggtgcacgaccccacctggcgctggtgggcgaacaacaaacaagaccaggattactacttcttcttggcgagcaattggcgaagcgcgggcggcgtgtccatagaaatggacagctacgaaaagatctacaacctcgagtccgcgtacgagctgccggagcgcattttcctggacaagggcactgagtacagcttcgccatcttcctgtcggcgcagggccactcgttccggacgcagtcagaactcggcaccgccttccagctgcatagccaggtggacgtgggcgtggtgctggccgaccccggctgcatcgaggcctcggtgaagcaggaggtcctgattaatcgcaactcggtgctattttcgattacgctcaaggataaaaagctttgctatgaccaaggcattagtggacatcaccttatggagacttccatgacggtcaatgtggtgggttcatccgggctctgcttccaggaaacacacctggggccccatatgcaaggcaacctgatggtgccagtgttcattggctgccccccaggcaagcgcctggccttcgacatcacctacacgctggaatacagccgcctgaagaacaaacactactttgactgcgttaacgtgaacccggagatgccctgctttctcttccgggacattttctaccccttcttcttgattcaagatttggtgacaggagactccggcagtttccagggcagctatgttctgctggtggtgggtggcgggcccacactggacagcctcaaggactacagtgaggacgaaatctaccgcttcaacagccccctggacaagaccaacagccttatctggaccacgaggaccacaaggaccaccaaagactcagcctttcacatcatgtcccacgagagcccaggcatcgaagacggggtttcaccatattggtcagtctggtcttgaactcctgacctcaagtgatccacctgcctcggcctcccaaagtgctggtattataggtgtgaaccactatgcctggcctaacctgcatttattggataatgaataaagaagggaataaatgaaagatgtgactttgtacctagtggctctgtctggagaatgccccatgctatgacaatgttccccaaggcatctttgcccctgaattcttcttcaaggtgttggtgagcaatagaggagtggacacgagcacctactgcaactaccagctcaccttcctgctgcacatccacgggctgccactcagtcccaagcgggcccttttcatcatcatggtgtcagctagcgtgtttgtgggcctggtgatcttctacatcgccttctgcctcctgtggcccctcgtggtgaagggctgcacgatgatc

SEQ ID NO: 3241 - DNA, 452 bp, Homo sapiens
  source 1..452: mol_type = unassigned DNA; mol_type = unassigned DNA
atcgcaacctggcaggggtgtggggtttgctgggggcctctgtggggccatgatctgaggagggtatgtggggggcgggagctcagcacattccatggcctagaggggccacacagaggccccagtgggacccatggcgtggaggcaggtatggggagttgtggggagatcccagggtggtctggggcctggaaccggccattgggaggccccagcagtttcagtgcccagggcctccctgcagagccatgcatggcagaagaagtgtgtagcatgagctggtacacgcccatgcccatcaagaaaggcagtgtggtcatgcgtgtggacatcagcagcaatggcctggggaccttcattccagataaaaggttccagatgaatatcaacggcttcctgaagagagaccgggacaataacatccaattcactgtgggagaggaggtgaggga

SEQ ID NO: 3242 - DNA, 722 bp, Homo sapiens
  source 1..722: mol_type = unassigned DNA; mol_type = unassigned DNA
gagctcagcacattccatggcctagaggggccacacagaggccccagtgggacccatggcgtggaggcaggtatggggagttgtggggagatcccagggtggtctggggcctggaaccggccattgggaggccccagcagtttcagtgcccagggcctccctgcagagccatgcatggcagaagaagtgtgtagcatgagctggtacacgcccatgcccatcaagaaaggcagtgtggtcatgcgtgtggacatcagcagcaatggcctggggaccttcattccagataaaaggtaccctttcccaagacgggggctggggtggactccgggggaattcctcaccccagggtccccagaggagccagtgggagatccaagggagagaatggggagaggagaggcagctacgagctgtggaacccctgacactgggacctcacctgcgcctattctgcacctgctgctaggttccagatgaatatcaacggcttcctgaagagagaccgggacaataacatccaattcactgtgggagaggagctcttcaacctgatgccccagtactttgtgggtgtctcatcgaggcccttgtggcacactgtggaccagtcacctgtgcttatcctgggaggcattcccaatgagaagtacgtcctgatgactgacaccagcttcaaggacttctctctcgtggaggtgaacggtgtggggcagatggtg

SEQ ID NO: 3243 - DNA, 737 bp, Homo sapiens
  source 1..737: mol_type = unassigned DNA; mol_type = unassigned DNA
tctcatcgaggcccttgtggcacactgtggaccagtcacctgtgcttatcctgggaggcattcccaatgagaagtacgtcctgatgactgacaccagcttcaaggacttctctctcgtggagacaggtaatgggccgacaccataacaaggcttgagggagacacatctcagatgacggtgaaaacccaatcgccacacgtagaaactacaagaagatcctatgatcctgttttagttctttttcttttttttctttttgtcatggtctcactttcttacccaggctggagttcagtgatgcaatcttggctcactgcagcctccatctcctgggttcaagccatcctcctacctgagcctccctagtagctgggactacaggcgcatatcaccatgcctggctaatttttgtatttttggtaaagatggggttttgccatgttgcccagcttggtcttgaactcctgacctcaagccatcctcctgcgttggcctcccaaagtgctgtgattacaggcatgagccaccgtgcccagccttgttcttgttctctaaccaaggagatttctccctgatggcctcatctgtttgtctcctctcttccctgctcctgtctctctccaccactcccttccacactgcccccaggaaacgaatcctcccctggctcatggttggggtccaggtatagatgctgtaacaaagagaccctggaagggaattacttaaacagaga

SEQ ID NO: 3244 - DNA, 541 bp, Homo sapiens
  source 1..541: mol_type = unassigned DNA; mol_type = unassigned DNA
agagaaaccgcggcagtggcagttggattcgtgtcctggccagcgagtgcatcaagaagctgtgccctgtgtatttccatagcaatggctctgagtacataatggccctcaccacgggcaagcatgagggttatgtacacttcgggaccatcagagctagtgatgacctggaacttctctaccacatcccagaattcatccctgaagctcgaggattggagttcctgatgatcctagggacagagtcctacaccagcactgcaatggcccccaagggcatcttctgtaacccgtacaacaatctgatcttcatctggggcaacttcctcctgcagagctctaacaaggaaaacttcatctacctggcagacttccccaaggaactgtccatcaaatacatggccagatcgttccgtggggctgtggctattgtcacagagacggaggagatctggtacctcctggagggcagctaccgggtctaccagctgttcccttccaagggctggcaggtgcacatcagcttaaagctgatgcaaca

SEQ ID NO: 3245 - DNA, 567 bp, Homo sapiens
  source 1..567: mol_type = unassigned DNA; mol_type = unassigned DNA
atcacaccactgcactccagcctgggcgacagggagatcctgtctcaggggggaaataaaagaaaagaaactctaaggactagcaaacccgagtgggaagctctttggagggttttacaggaggctgagaagcaaacaacttgctccagctccaggttttgaaagtgcagggcctcaggagattttgctgtgttctccccacctgtagctagtgatgacctggaacttctctaccacatcccagaattcatccctgaagctcgaggattggagttcctgatgatcctagggacagagtcctacaccagcactgcaatggcccccaagggcatcttctgtaacccgtacaacaatctgatcttcatctggggcaacttcctcctgcagagctctaacaaggaaaacttcatctacctggcagacttccccaaggaactgtccatcaaatacatggccagatcgttccgtggggctgtggctattgtcacagagacggaggaggtgggctgccccgcccctctccccgttccctctctgcccacccccaaaccccaggggcccctcttt

SEQ ID NO: 3246 - DNA, 438 bp, Homo sapiens
  source 1..438: mol_type = unassigned DNA; mol_type = unassigned DNA
aacccgtacaacaatctgatcttcatctggggcaacttcctcctgcagagctctaacaaggaaaacttcatctacctggcagacttccccaaggaactgtccatcaaatacatggccagatcgttccgtggggctgtggctattgtcacagagacggaggaggtgggctgccccgcccctctccccgttccctctctgcccacccccaaaccccaggggcccctctttcccccgtcacagtaaaggagccaagggaagggggcaccctcggggaccctgagaaagggcagtgaagctccatttataactgaaactcctggaactcagggtaagtgtcagctccaaagtcacgcagaccggagctatgatccgatgttcagaggcggccctctttcatcccacagtgtggtcgttcacttcataaatattgagcattta

SEQ ID NO: 3247 - DNA, 3761 bp, Homo sapiens
  source 1..3761: mol_type = unassigned DNA; mol_type = unassigned DNA
attacgctcaaggataaaaagctttgctatgaccaaggcattagtggacatcaccttatggagacttccatgacggtcaatgtggtgggttcatccgggctctgcttccaggaaacacacctggggccccatatgcaagtattggagcttgggatactgggccctgggaggggaaggttggggtcgggtctcaacagggctaatccccctgagaatcccactaatgcattcataatttcctttcttctcattctttctcaacattcatccacccacccactaccacccactaactcctttcattcttttttctttaagacggagtttcactcttgttgcccaggctggagtgcggcggcgcggtcttggctcactttgcctccttggctcaagtgattctcctgcctcagcctcccaagtagctgggattataggcgcccgccaccacggctggctaattttttgtatttttagtggagacagagtttttccatgttggccaggatggtcacaaactcctaaactcaaatgatccacccgcctcagcctcccaaagtgctgggattccaggtgtgagccaccatgcccggcctaactcctttcattcattcacgttttcagaaagggccaccttcccagttgtgcaggttgcacacaaactggtatgttccctctgataacttttcttcagagggagaatagagtgagcaacagggccgttttttttttgttttttgttttttttttaacgatgtctcactcttgtcccccaggctggagtgcaatggtgcaatctcggctcactgcaacctccacctcccgggttcaagcgattctcctgcctcagcctcccaagtagctgggattacagttgcataccaccatgcctagctaattttttatattttaaatagagacggagtttcaccatgttggccaggctggtcttgaactcctaacctcaggtgatctgccggccttggcctcccaaagtgctgggattacaggtgtgagccaccgtgcccgacctagggccactttttgcaattggcacaaaggtggcataagggctggcctggccctgctttcacatctctctcttcttctgcccactcacacattcctcattcagttctttgggtgcttggtgcttcacttgcttatacacgtgatatcgcctttgcccggggcagacactgaggctcagagaggtgcagagtaacccagggagctaataagtggtagaggaggggcgtgccccagagttcttgttctcacccatttccctacccactccctggcatgcagatcctggtgttcctccctcctggcttagaatgaccttgggcagtcaaaaggggttgtaacagcccccacctccttagagtacatgagatttcatgtgctagactgaataaacaaggaggaagtgtgattgcatcagggtgggcaagggggaacgtggtgggatgagctcggagcagtgatggggcagagtaagcggagcccttatgggccatggtatgtgagctggctcctcgggagggctctaagcagaggagggactcgggtgtccccagggcccatctggctgcatggggtggggggacatcaatgaggggactggaagcagggagactctggaagagacaaggttggacaaaacagggtgggggcaaaggagttggaggtttaggggagagaacaggcaggctctcggtctttttttttttttttttgagacagagtcctgctctgtcacccaggctggagtgcagtggtgcagtcttggcctctacctccctggttcaagcgattctccagcctctgcctcccgagtagctgggattacaggcatgcaccaccacacacccagctaattttttgtatttttagtagagacagggttttactgtgctggccaggctagtctcgaactcctggactcaagtgatcagcccgcctcggcctcccgaagttctgggattacaggcatgagccactgcaccaggccgtgttaatgatattaatgaccatattgcccttgggggtgagggagagccaggcagctggtggtggtgtttgtgggagggggactgtccttcctgccccttacccctccaggggcctgaggagaccctggccacccctgtgagccttttttcctcccaccgagggcaacctgatggtgccagtgttcattggctgccccccaggcaagcgcctggccttcgacatcacctacacgctggaatacagccgcctgaagaacaaacactactttgactgcgttaacgtgaacccggagatgccctgctttctcttccgggacagtgtgtgtccagtcccttcccctgcacagttcactgccctcttgcccccactactttgtgctctccctccccattcctctccccgcagactacccaccctttttcctgcggcatctcactttcccccgtctcggtcctcagcttctcgggccaagctaatttcttcttctggtctcaatcccctccaaccccatagttttctaccccttcttcttgattcaagatttggtgacaggagactccggcagtttccagggcaggtaaaggcgtggccagcttgcagctagggcaggtggagggagtggaaggagatgggtgcaggactcgagacccggaggccagtctgtgtgcacttctgtccctggtagctatgttctgctggtggtgggtggcgggcccacactggacagcctcaaggactacagtgaggacgaaatctaccgcttcaacagccccctggacaagtaatccccgtggggtcccacgtgtaatccaccttgcttcccctggaggcctttcccacttccaagccaagcccacctcgcaagcccccacctctgcgtctcaggccctgcccacagtggggctcttaggatctcacaggcaaactcctgcccgcccctaacaccatgtcccctgcacccacctgtggcctccctccacactgaccactgaggtcatacctcccctacaccgccccccaacccctggctgagatgacctgggcctgcacaggaccaacagccttatctggaccacgaggaccacaaggaccaccaaagactcagcctttcacatcatgtcccacgagagcccaggcatcgagtggctctgtctggagaatgccccatgctatgacaatgttccccaaggcatctttgcccctgaattcttcttcaaggtgttggtgagcaataggtgagccagcacctactgcaactaccagctcaccttcctgctgcacatccacgggctgccactcagtcccaagcgggcccttttcatcatcatggtgtcagctagcgtgtttgtgggcctggtgatcttctacatcgccttctgcctcctgtggcccctcgtggtgaagggctgcacgatgatccggtggaagataaacaacctcattgcctcagaatcctactacacctacgcctccatttccggaatctcgagcatgccgtctctgagacattccaggatgggctccatgttcagctccaggatgacagaggacagggctgaacccaaggaagccgtggagagacagttgatgacctgagtgtcccacctgccccagcccccagttactgtcacgcctctcttatgaggcccatcttgaagatgcaacctgtcacccagcccaggcctctctttctgttttgcttgatgtttacttctcgttcagactcaaataaagccttttttcag

SEQ ID NO: 3248 - DNA, 2704 bp, Homo sapiens
  source 1..2704: mol_type = unassigned DNA; mol_type = unassigned DNA
gggagaaacgttctcactcgctctctgctcgctgcgggcgctccccgccctctgctgccagaaccttggggatgtgcctagacccggcgcagcacacgtccgggccaaccgcgagcagaacaaacctttggcgggcggccaggaggctccctcccagccaccgcccccctccagcgcctttttttccccccatacaatacaagatcttccttcctcagttcccttaaagcacagcccagggaaacctcctcacagttttcatccagccacgggccagcatgtctgggggcaaatacgtagactcggagggacatctctacaccgttcccatccgggaacagggcaacatctacaagcccaacaacaaggccatggcagacgagctgagcgagaagcaagtgtacgacgcgcacaccaaggagatcgacctggtcaaccgcgaccctaaacacctcaacgatgacgtggtcaagattgactttgaagatgtgattgcagaaccagaagggacacacagttttgacggcatttggaaggccagcttcaccaccttcactgtgacgaaatactggttttaccgcttgctgtctgccctctttggcatcccgatggcactcatctggggcatttacttcgccattctctctttcctgcacatctgggcagttgtaccatgcattaagagcttcctgattgagattcagtgcatcagccgtgtctattccatctacgtccacaccgtctgtgacccactctttgaagctgttgggaaaatattcagcaatgtccgcatcaacttgcagaaagaaatataaatgacatttcaaggatagaagtatacctgattttttttccttttaattttcctggtgccaatttcaagttccaagttgctaatacagcaacaatttatgaattgaattatcttggttgaaaataaaaagatcactttctcagttttcataagtattatgtctcttctgagctatttcatctatttttggcagtctgaatttttaaaacccatttaaatttttttccttacctttttatttgcatgtggatcaaccatcgctttattggctgagatatgaacatattgttgaaaggtaatttgagagaaatatgaagaactgaggaggaaaaaaaaaaaaaagaaaagaaccaacaacctcaactgcctactccaaaatgttggtcattttatgttaagggaagaattccagggtatggccatggagtgtacaagtatgtgggcagattttcagcaaactcttttcccactgtttaaggagttagtggattactgccattcacttcataatccagtaggatccagtgatccttacaagttagaaaacataatcttctgccttctcatgatccaactaatgccttactcttcttgaaattttaacctatgatattttctgtgcctgaatatttgttatgtagataacaagacctcagtgccttcctgtttttcacattttccttttcaaatagggtctaactcagcaactcgctttaggtcagcagcctccctgaagaccaaaattagaatatccatgacctagttttccatgcgtgtttctgactctgagctacagagtctggtgaagctcacttctgggcttcatctggcaacatctttatccgtagtgggtatggttgacactagcccaatgaaatgaattaaagtggaccaatagggctgagctctctgtgggctggcagtcctggaagccagctttccctgcctctcatcaactgaatgaggtcagcatgtctattcagcttcgtttattttcaagaataatcacgctttcctgaatccaaactaatccatcaccggggtggtttagtggctcaacattgtgttcccatttcagctgatcagtgggcctccaaggaggggctgtaaaatggaggccattgtgtgagcctatcagagttgctgcaaacctgacccctgctcagtaaagcacttgcaaccgtctgttatgctgtgacacatggcccctccccctgccaggagctttggacctaatccaagcatccctttgcccagaaagaagatgggggaggaggcagtaataaaaagattgaagtattttgctggaataagttcaaattcttctgaactcaaactgaggaatttcacctgtaaacctgagtcgtacagaaagctgcctggtatatccaaaagctttttattcctcctgctcatattgtgattctgcctttggggacttttcttaaaccttcagttatgatttttttttcatacacttattggaactctgcttgatttttgcctcttccagtcttcctgacactttaattaccaacctgttacctactttgactttttgcatttaaaacagacactggcatggatatagttttacttttaaactgtgtacataactgaaaatgtgctatactgcatactttttaaatgtaaagatatttttatctttatatgaagaaaatcacttaggaaatggctttgtgattcaatctgtaaactgtgtattccaagacatgtctgttctacatagatgcttagtccctcatgcaaatcaattactggtccaaaagattgctgaaattttatatgcttactgatatattttacaattttttatcatgcatgtcctgtaaaggttacaagcctgcacaataaaaatgtttaacggtt

SEQ ID NO: 3249 - DNA, 598 bp, Homo sapiens
  source 1..598: mol_type = unassigned DNA; mol_type = unassigned DNA
agttcccttaaagcacagcccagggaaacctcctcacagttttcatccagccacgggccagcatgtctgggggcaaatacgtagactcggagggcaacatctacaagcccaacaacaaggccatggcagacgagctgagcgagaagcaagtgtacgacgcgcacaccaaggagatcgacctggtcaaccgcgaccctaaacacctcaacgatgacgtggtcaagattgactttgaagatgtgattgcagaaccagaagggacacacagttttgacggcatttggaaggccagcttcaccaccttcactgtgacgaaatactggttttaccgcttgctgtctgccctctttggcatcccgatggcactcatctggggcatttacttcgccattctctctttcctgcacatctgggcagttgtaccatgcattaagagcttcctgattgagattcagtgcatcagccgtgtctattccatctacgtccacaccgtctgtgacccactctttgaagctgttgggaaaatattcagcaatgtccgcatcaacttgcagaaagaaatataaatgacatttcaaggatagaagtatacctgatt

SEQ ID NO: 3250 - DNA, 1653 bp, Homo sapiens
  source 1..1653: mol_type = unassigned DNA; mol_type = unassigned DNA
taaagcacagcccagggaaacctcctcacagttttcatccagccacgggccagcatgtctgggggcaaatacgtagactcggaggtaggcatccgtgggggggcgccggctcgggcgtgcggggagtgtccgcttctgctatctgcctctccaaatatcccgactgctgccctggccccagccctctctccacttcggagcactcctctggcgttggcaccgctgaggaatgggcctgggcggggaggtgaagagaagccaggaatgttttatgttttcctaatggagagggggcctagggagcccctgagctaggaggacacggaaaaggggattggggtcctgagattgggtctgttgggcccaggacgcgttttctggatgggtctaggatgctcccttgtcgcgggacccccgcggtccggccctgcctgctgggggttcgaagaggtggagtgcagggtggaggtgttatttacccgagtcctggggacagtccccgggactctccgccaggcgcccagaccggcaggtcccgcaggcggcgcgcggtgtgtttgcactttccaaagttcttgaaccatctcaagaactccttctgcatcttggcgtctggcaggggtgttccgagagaggtagacctcccctccccaaactgccaccatcacttccaacgccctccacgcgctggagctctgcccgggtgtggaaacctcgtcttccaacacgtagctgcccttcagccacccgcccgcagcctgggagtgccctgagggtgggtcgggggagctgcgcagggacatctctacaccgttcccatccgggaacagggcaacatctacaagcccaacaacaaggccatggcagacgagctgagcgagaagcaagtgtacgacgcgcacaccaaggagatcgacctggtcaaccgcgaccctaaacacctcaacgatgacgtggtcaagattgactttgaagatgtgattgcagaaccagaagggacacacagttttgacggcatttggaaggccagcttcaccaccttcactgtgacgaaatactggttttaccgcttgctgtctgccctctttggcatcccgatggcactcatctggggcatttacttcgccattctctctttcctgcacatctgggcagttgtaccatgcattaagagcttcctgattgagattcagtgcatcagccgtgtctattccatctacgtccacaccgtctgtgacccactctttgaagctgttgggaaaatattcagcaatgtccgcatcaacttgcagaaagaaatataaatgacatttcaaggatagaagtatacctgattttttttccttttaattttcctggtgccaatttcaagttccaagttgctaatacagcaacaatttatgaattgaattatcttggttgaaaataaaaagatcactttctcagttttcataagtattatgtctcttctgagctatttcatctatttttggcagtctgaatttttaaaacccatttaaatttttttccttacctttttatttgcatgtggatcaaccatcgctttattggctgagatatgaacatattgttgaaaggtaatttgagagaaatatgaagaactgaggaggaaaaaaaaaaaaaagaaaagaa

SEQ ID NO: 3251 - DNA, 575 bp, Homo sapiens
  source 1..575: mol_type = unassigned DNA; mol_type = unassigned DNA
agcacagcccagggaaacctcctcacagttttcatccagccacgggccagcatgtctgggggcaaatacgtagactcggagggacatctctacaccgttcccatccgggaacagggcaacatctacaagcccaacaacaaggccatggcagacgagctgagcgagaagcaagtgtacgacgcgcacaccaaggagatcgacctggtcaaccgcgaccctaaacacctcaacgatgacgtggtcaaggtaagccaaggcgaccaacagggaagggctgggacagctctcctctggcagttagcccgtgcatccttctttagcattgccgtgtacgcacaccccaccccgccccctacacgcgcacacacacacacacacagagttttgtgggtttgatgtgtgggagctcccgcagtcggcagaaacgttacatctcccttcccccatctccccccaatagttagttcagctgaaattcagctaaagtgagttttgtagaagttcctataactacacttttatcctagcaaatgagcctattgacctcagcaacagacggcccatactccttggga

SEQ ID NO: 3252 - DNA, 2443 bp, Homo sapiens
  source 1..2443: mol_type = unassigned DNA; mol_type = unassigned DNA
gctgcccttcagccacccgcccgcagcctgggagtgccctgaggggacatctctacaccgttcccatccgggaacagggcaacatctacaagcccaacaacaaggccatggcagacgagctgagcgagaagcaagtgtacgacgcgcacaccaaggagatcgacctggtcaaccgcgaccctaaacacctcaacgatgacgtggtcaagattgactttgaagatgtgattgcagaaccagaagggacacacagttttgacggcatttggaaggccagcttcaccaccttcactgtgacgaaatactggttttaccgcttgctgtctgccctctttggcatcccgatggcactcatctggggcatttacttcgccattctctctttcctgcacatctgggcagttgtaccatgcattaagagcttcctgattgagattcagtgcatcagccgtgtctattccatctacgtccacaccgtctgtgacccactctttgaagctgttgggaaaatattcagcaatgtccgcatcaacttgcagaaagaaatataaatgacatttcaaggatagaagtatacctgattttttttccttttaattttcctggtgccaatttcaagttccaagttgctaatacagcaacaatttatgaattgaattatcttggttgaaaataaaaagatcactttctcagttttcataagtattatgtctcttctgagctatttcatctatttttggcagtctgaatttttaaaacccatttaaatttttttccttacctttttatttgcatgtggatcaaccatcgctttattggctgagatatgaacatattgttgaaaggtaatttgagagaaatatgaagaactgaggaggaaaaaaaaaaaaaagaaaagaaccaacaacctcaactgcctactccaaaatgttggtcattttatgttaagggaagaattccagggtatggccatggagtgtacaagtatgtgggcagattttcagcaaactcttttcccactgtttaaggagttagtggattactgccattcacttcataatccagtaggatccagtgatccttacaagttagaaaacataatcttctgccttctcatgatccaactaatgccttactcttcttgaaattttaacctatgatattttctgtgcctgaatatttgttatgtagataacaagacctcagtgccttcctgtttttcacattttccttttcaaatagggtctaactcagcaactcgctttaggtcagcagcctccctgaagaccaaaattagaatatccatgacctagttttccatgcgtgtttctgactctgagctacagagtctggtgaagctcacttctgggcttcatctggcaacatctttatccgtagtgggtatggttgacactagcccaatgaaatgaattaaagtggaccaatagggctgagctctctgtgggctggcagtcctggaagccagctttccctgcctctcatcaactgaatgaggtcagcatgtctattcagcttcgtttattttcaagaataatcacgctttcctgaatccaaactaatccatcaccggggtggtttagtggctcaacattgtgttcccatttcagctgatcagtgggcctccaaggaggggctgtaaaatggaggccattgtgtgagcctatcagagttgctgcaaacctgacccctgctcagtaaagcacttgcaaccgtctgttatgctgtgacacatggcccctccccctgccaggagctttggacctaatccaagcatccctttgcccagaaagaagatgggggaggaggcagtaataaaaagattgaagtattttgctggaataagttcaaattcttctgaactcaaactgaggaatttcacctgtaaacctgagtcgtacagaaagctgcctggtatatccaaaagctttttattcctcctgctcatattgtgattctgcctttggggacttttcttaaaccttcagttatgatttttttttcatacacttattggaactctgcttgatttttgcctcttccagtcttcctgacactttaattaccaacctgttacctactttgactttttgcatttaaaacagacactggcatggatatagttttacttttaaactgtgtacataactgaaaatgtgctatactgcatactttttaaatgtaaagatatttttatctttatatgaagaaaatcacttaggaaatggctttgtgattcaatctgtaaactgtgtattccaagacatgtctgttctacatagatgcttagtccctcatgcaaatcaattactggtccaaaagattgctgaaattttatatgcttactgatatattttacaattttttatcatgcatgtcctgtaaaggttacaagcctgcacaataaaaatgtttaacggttaaa

SEQ ID NO: 3253 - DNA, 557 bp, Homo sapiens
  source 1..557: mol_type = unassigned DNA; mol_type = unassigned DNA
agcgataaagggaacattccacgggtcgggcggctgctgttggatcttagataaagctggaagggattaccggggcagggggacatctctacaccgttcccatccgggaacagggcaacatctacaagcccaacaacaaggccatggcagacgagctgagcgagaagcaagtgtacgacgcgcacaccaaggagatcgacctggtcaaccgcgaccctaaacacctcaacgatgacgtggtcaagattgactttgaagatgtgattgcagaaccagaagggacacacagttttgacggcatttggaaggccagcttcaccaccttcactgtgacgaaatactggttttaccgcttgctgtctgccctctttggcatcccgatggcactcatctggggcatttacttcgccattctctctttcctgcacatctgggcagttgtaccatgcattaagagcttcctgattgagattcagtgcatcagccgtgtctattccatctacgtccacaccgtctgtgacccactctttgaagctgttgggaaaatattcagcaat

SEQ ID NO: 3254 - DNA, 845 bp, Homo sapiens
  source 1..845: mol_type = unassigned DNA; mol_type = unassigned DNA
ggcaggcgcgccctgcagagtacagaggggtgtggtgtcctctgcgagatcctcttaaaaagctggctacgcgcaggcggtttctgtgcacggagccgtagctgtcggagcgggacatctctacaccgttcccatccgggaacagggcaacatctacaagcccaacaacaaggccatggcagacgagctgagcgagaagcaagtgtacgacgcgcacaccaaggagatcgacctggtcaaccgcgaccctaaacacctcaacgatgacgtggtcaagattgactttgaagatgtgattgcagaaccagaagggacacacagttttgacggcatttggaaggccagcttcaccaccttcactgtgacgaaatactggttttaccgcttgctgtctgccctctttggcatcccgatggcactcatctggggcatttacttcgccattctctctttcctgcacatctgggcagttgtaccatgcattaagagcttcctgattgagattcagtgcatcagccgtgtctattccatctacgtccacaccgtctgtgacccactctttgaagctgttgggaaaatattcagcaatgtccgcatcaacttgcagaaagaaatataaatgacatttcaaggatagaagtatacctgattttttttccttttaattttcctggtgccaatttcaagttccaagttgctaatacagcaacaatttatgaattgaattatcttggttgaaaataaaaagatcactttctcagttttcataagtattatgtctcttctgagctatttcatctatttttggcagtctgaatttttaaaacccatttaaatttttttcc

SEQ ID NO: 3255 - DNA, 2628 bp, Homo sapiens
  source 1..2628: mol_type = unassigned DNA; mol_type = unassigned DNA
agagtacagaggggtgtggtgtcctctgcgagatcctcttaaaaagctggctacgcgcaggcggtttctgtgcacggagccgtagctgtcggagcggttagttcgatttcgagctcgaggtttcccccgccgccaggctgacttctcatcgcttgtttttctttttgcatttttcctcccaccgccgttgccgccctccccgtcctggccgtccgccctccgccctctgcagggacatctctacaccgttcccatccgggaacagggcaacatctacaagcccaacaacaaggccatggcagacgagctgagcgagaagcaagtgtacgacgcgcacaccaaggagatcgacctggtcaaccgcgaccctaaacacctcaacgatgacgtggtcaagattgactttgaagatgtgattgcagaaccagaagggacacacagttttgacggcatttggaaggccagcttcaccaccttcactgtgacgaaatactggttttaccgcttgctgtctgccctctttggcatcccgatggcactcatctggggcatttacttcgccattctctctttcctgcacatctgggcagttgtaccatgcattaagagcttcctgattgagattcagtgcatcagccgtgtctattccatctacgtccacaccgtctgtgacccactctttgaagctgttgggaaaatattcagcaatgtccgcatcaacttgcagaaagaaatataaatgacatttcaaggatagaagtatacctgattttttttccttttaattttcctggtgccaatttcaagttccaagttgctaatacagcaacaatttatgaattgaattatcttggttgaaaataaaaagatcactttctcagttttcataagtattatgtctcttctgagctatttcatctatttttggcagtctgaatttttaaaacccatttaaatttttttccttacctttttatttgcatgtggatcaaccatcgctttattggctgagatatgaacatattgttgaaaggtaatttgagagaaatatgaagaactgaggaggaaaaaaaaaaaaaagaaaagaaccaacaacctcaactgcctactccaaaatgttggtcattttatgttaagggaagaattccagggtatggccatggagtgtacaagtatgtgggcagattttcagcaaactcttttcccactgtttaaggagttagtggattactgccattcacttcataatccagtaggatccagtgatccttacaagttagaaaacataatcttctgccttctcatgatccaactaatgccttactcttcttgaaattttaacctatgatattttctgtgcctgaatatttgttatgtagataacaagacctcagtgccttcctgtttttcacattttccttttcaaatagggtctaactcagcaactcgctttaggtcagcagcctccctgaagaccaaaattagaatatccatgacctagttttccatgcgtgtttctgactctgagctacagagtctggtgaagctcacttctgggcttcatctggcaacatctttatccgtagtgggtatggttgacactagcccaatgaaatgaattaaagtggaccaatagggctgagctctctgtgggctggcagtcctggaagccagctttccctgcctctcatcaactgaatgaggtcagcatgtctattcagcttcgtttattttcaagaataatcacgctttcctgaatccaaactaatccatcaccggggtggtttagtggctcaacattgtgttcccatttcagctgatcagtgggcctccaaggaggggctgtaaaatggaggccattgtgtgagcctatcagagttgctgcaaacctgacccctgctcagtaaagcacttgcaaccgtctgttatgctgtgacacatggcccctccccctgccaggagctttggacctaatccaagcatccctttgcccagaaagaagatgggggaggaggcagtaataaaaagattgaagtattttgctggaataagttcaaattcttctgaactcaaactgaggaatttcacctgtaaacctgagtcgtacagaaagctgcctggtatatccaaaagctttttattcctcctgctcatattgtgattctgcctttggggacttttcttaaaccttcagttatgatttttttttcatacacttattggaactctgcttgatttttgcctcttccagtcttcctgacactttaattaccaacctgttacctactttgactttttgcatttaaaacagacactggcatggatatagttttacttttaaactgtgtacataactgaaaatgtgctatactgcatactttttaaatgtaaagatatttttatctttatatgaagaaaatcacttaggaaatggctttgtgattcaatctgtaaactgtgtattccaagacatgtctgttctacatagatgcttagtccctcatgcaaatcaattactggtccaaaagattgctgaaattttatatgcttactgatatattttacaattttttatcatgcatgtcctgtaaaggttacaagcctgcacaataaaaatgtttaacggtt

SEQ ID NO: 3256 - DNA, 3201 bp, Homo sapiens
  source 1..3201: mol_type = unassigned DNA; mol_type = unassigned DNA
taaagcacagcccagggaaacctcctcacagttttcatccagccacgggccagcatgtctgggggcaaatacgtagactcggaggtaggcatccgtgggggggcgccggctcgggcgtgcggggagtgtccgcttctgctatctgcctctccaaatatcccgactgctgccctggccccagccctctctccacttcggagcactcctctggcgttggcaccgctgaggaatgggcctgggcggggaggtgaagagaagccaggaatgttttatgttttcctaatggagagggggcctagggagcccctgagctaggaggacacggaaaaggggattggggtcctgagattgggtctgttgggcccaggacgcgttttctggatgggtctaggatgctcccttgtcgcgggacccccgcggtccggccctgcctgctgggggttcgaagaggtggagtgcagggtggaggtgttatttacccgagtcctggggacagtccccgggactctccgccaggcgcccagaccggcaggtcccgcaggcggcgcgcggtgtgtttgcactttccaaagttcttgaaccatctcaagaactccttctgcatcttggcgtctggcaggggtgttccgagagaggtagacctcccctccccaaactgccaccatcacttccaacgccctccacgcgctggagctctgcccgggtgtggaaacctcgtcttccaacacgtagctgcccttcagccacccgcccgcagcctgggagtgccctgagggtgggtcgggggagctgcgcagggacatctctacaccgttcccatccgggaacagggcaacatctacaagcccaacaacaaggccatggcagacgagctgagcgagaagcaagtgtacgacgcgcacaccaaggagatcgacctggtcaaccgcgaccctaaacacctcaacgatgacgtggtcaagattgactttgaagatgtgattgcagaaccagaagggacacacagttttgacggcatttggaaggccagcttcaccaccttcactgtgacgaaatactggttttaccgcttgctgtctgccctctttggcatcccgatggcactcatctggggcatttacttcgccattctctctttcctgcacatctgggcagttgtaccatgcattaagagcttcctgattgagattcagtgcatcagccgtgtctattccatctacgtccacaccgtctgtgacccactctttgaagctgttgggaaaatattcagcaatgtccgcatcaacttgcagaaagaaatataaatgacatttcaaggatagaagtatacctgattttttttccttttaattttcctggtgccaatttcaagttccaagttgctaatacagcaacaatttatgaattgaattatcttggttgaaaataaaaagatcactttctcagttttcataagtattatgtctcttctgagctatttcatctatttttggcagtctgaatttttaaaacccatttaaatttttttccttacctttttatttgcatgtggatcaaccatcgctttattggctgagatatgaacatattgttgaaaggtaatttgagagaaatatgaagaactgaggaggaaaaaaaaaaaaaagaaaagaaccaacaacctcaactgcctactccaaaatgttggtcattttatgttaagggaagaattccagggtatggccatggagtgtacaagtatgtgggcagattttcagcaaactcttttcccactgtttaaggagttagtggattactgccattcacttcataatccagtaggatccagtgatccttacaagttagaaaacataatcttctgccttctcatgatccaactaatgccttactcttcttgaaattttaacctatgatattttctgtgcctgaatatttgttatgtagataacaagacctcagtgccttcctgtttttcacattttccttttcaaatagggtctaactcagcaactcgctttaggtcagcagcctccctgaagaccaaaattagaatatccatgacctagttttccatgcgtgtttctgactctgagctacagagtctggtgaagctcacttctgggcttcatctggcaacatctttatccgtagtgggtatggttgacactagcccaatgaaatgaattaaagtggaccaatagggctgagctctctgtgggctggcagtcctggaagccagctttccctgcctctcatcaactgaatgaggtcagcatgtctattcagcttcgtttattttcaagaataatcacgctttcctgaatccaaactaatccatcaccggggtggtttagtggctcaacattgtgttcccatttcagctgatcagtgggcctccaaggaggggctgtaaaatggaggccattgtgtgagcctatcagagttgctgcaaacctgacccctgctcagtaaagcacttgcaaccgtctgttatgctgtgacacatggcccctccccctgccaggagctttggacctaatccaagcatccctttgcccagaaagaagatgggggaggaggcagtaataaaaagattgaagtattttgctggaataagttcaaattcttctgaactcaaactgaggaatttcacctgtaaacctgagtcgtacagaaagctgcctggtatatccaaaagctttttattcctcctgctcatattgtgattctgcctttggggacttttcttaaaccttcagttatgatttttttttcatacacttattggaactctgcttgatttttgcctcttccagtcttcctgacactttaattaccaacctgttacctactttgactttttgcatttaaaacagacactggcatggatatagttttacttttaaactgtgtacataactgaaaatgtgctatactgcatactttttaaatgtaaagatatttttatctttatatgaagaaaatcacttaggaaatggctttgtgattcaatctgtaaactgtgtattccaagacatgtctgttctacatagatgcttagtccctcatgcaaatcaattactggtccaaaagattgctgaaattttatatgcttactgatatattttacaattttttatcatgcatgtcctgtaaaggttacaagcctgcacaataaaaatgtttaacggttaaacagtc

SEQ ID NO: 3257 - DNA, 714 bp, Homo sapiens
  source 1..714: mol_type = unassigned DNA; mol_type = unassigned DNA
attctaaccatgctggcagctgattagatggtgcccactcagattaaaggtattgggagaaggagaggctgtcaacccatgccactatgctatctctaattctgccatccagaccgagcaaacgtacttaagacctttgtgtaagatcagaaaatcataagacagcattaaaaagtactatacaggaggagatggaacaagatggccaaatagaagcctccagcaatcatctccccgaaaggaattgaacaactatcaaaacaaaattgaacaactatctaaacaaaaaagtaccttcataaaaaacaaaaatcaggacacagtgttctgcctctcctgagtaagcagcaacaacgcaccatcttggaatcaggggacggccctcaccagacaactaaatctgcagacaccttggacttcccagcctccagaactgtctttctggcaactgtctaaacataaaccagagaagggcaaggcagactcaggaaggacaaatagaaggctattttcataaatcgggcatacaatggtggacaaaacagctgcctttcttccccgtatggagcttacagtatagtgaatatttcatgggactagtatctacagaaggtgttttgggaagcacagctttggagagagtaatttgccaacattgcacagaataaaggcaccatgagggcccaaggaaggaaaagatttgcagctgtcttg

SEQ ID NO: 3258 - DNA, 531 bp, Homo sapiens
  source 1..531: mol_type = unassigned DNA; mol_type = unassigned DNA
gacttggactttgaggaaaatgagaaaccattggccagtttggggtattgggagaaggagaggctgtcaacccatgccactatgctatctctaattctgccatccagaccgagcaaacgtacttaagacctttgtgtaagatcagaaaatcataagacagcattaaaaagtactatacaggaggagatggaacaagatggccaaatagaagcctccagcaatcatctccccgaaaggaattgaacaactatcaaaacaaaattgaacaactatctaaacaaaaaagtaccttcataaaaaacaaaaatcaggacaatatcagaacggcacatacaagtgtccccaagtcatatttggaataagatcacttgggaacacaagtcaaagaaggacacagtgttctgcctctcctgagtaagcagcaacaacgcaccatcttggaatcaggggacggccctcaccagacaactaaatctgcagacaccttggacttcccagcctccagaactgtctttctggcaactgtctaaa

SEQ ID NO: 3259 - DNA, 1119 bp, Homo sapiens
  source 1..1119: mol_type = unassigned DNA; mol_type = unassigned DNA
cccatgccactatgctatctctaattctgccatccagaccgagcaaacgtacttaagacctttgtgtaagatcagaaaatcataagacagcattaaaaagtactatacaggaggagatggaacaagatggccaaatagaagcctccagcaatcatctccccgaaaggaattgaacaactatcaaaacaaaattgaacaactatctaaacaaaaaagtaccttcataaaaaacaaaaatcaggacaatatcagaacggcacatacaagtgtccccaagtcatatttggaataagatcacttgggaacacaagtcaaagaaggacacagtgttctgcctctcctgagtaagcagcaacaacgcaccatcttggaatcaggggacggccctcaccagacaactaaatctgcagacaccttggacttcccagcctccagaactgtctttctggcaactgtctaaacataaaccagagaagggcaaggcagactcaggaaggacaaatagaaggctattttcataaatcggaccaccaccacatgtgcagcatccctctgggtctcttccatgacaaccctgtgggaagccagcttggcaggtcaccttgttctagcagatagaaactgaatcaatatgggaagagccagaatttggacaaggttcaccaaacattcacactgatgccagccattccacttccttggcctcagatattgggcacagtaacttccagttgttgggcaacaattctagaagagttccaattctcatcaggagaatggacaaggtggagaagcagagaaaatgcaatgagtagaatgtctaagtcatcactttggaattgactgaacataaataaaaatgagaaagatacgtaaaaaagaagggaatggatgccacagcccccattttgccaacgaggcagctgaggttcccagaggctcaataccagcaccatgagccgcagcacgcaaggcaaacacagccggaggattttaatgccttttgtaaagacctgcctaatggttctgccttcagtgcagacaatatggaagagtgtgacagatgttatcattgctccattgtgtacgagcgtaggacgatgcttctcttctgtcagc

SEQ ID NO: 3260 - DNA, 1200 bp, Homo sapiens
  source 1..1200: mol_type = unassigned DNA; mol_type = unassigned DNA
cccatgccactatgctatctctaattctgccatccagaccgagcaaacgtacttaagacctttgtgtaagatcagaaaatcataagacagcattaaaaagtactatacaggaggagatggaacaagatggccaaatagaagcctccagcaatcatctccccgaaaggaattgaacaactatcaaaacaaaattgaacaactatctaaacaaaaaagtaccttcataaaaaacaaaaatcagactgctttttgccttctgccatgattgtgaggcctccccagccacgtgaaacccttggcaggtcaccttgttctagcagatagaaactgaatcaatatgggaagagccagaatttggacaaggttcaccaaacattcacactgatgccaggtgggccaagaaaaagggaatgtcctgcctctgagacatatgaaggagggtcttttcatattaaattgttttcctggcagcacctgaaccaaaggatcagacttaaaataagtctttttccaatgttatgttgaaattggatacgacatttctcacaaaacttctaagtcaaacagtgatgagaaactactgcctaaaagtgggcctacatcaaatcgttatggtctcgtaccaagatgtcttttgactgaggaagctaagaatacggctccttgttctcaccagtggactcctcctcagcagcaggggctcccttccccactacccatgagggagatggtggcagttcaacaggaaaatgttgatattatggattcccataaggattcatgtcttctattcactttaatgaacagttgttgggcaacaattctagaagagttccaattctcatcaggagaatggacaaggtggagaagcagagaaaatgcaatgagtagaatgtctaagtcatcactttggaattgactgaacataaataaaaatgagaaagatacgtaaaaaagaagggaatggatgccacagcccccattttgccaacgaggcagctgaggttcccagaggctcaataccagcaccatgagccgcagcacgcaaggcaaacacagccggaggattttaatgccttttgtaaagacctgcctaatggttctgccttcagtgcagacaatatggaagagtgtgacagatgttatcattgctccattgtgtacgagcgtaggacgatgcttctcttctgtcagcctgca

SEQ ID NO: 3261 - DNA, 971 bp, Homo sapiens
  source 1..971: mol_type = unassigned DNA; mol_type = unassigned DNA
cccatgccactatgctatctctaattctgccatccagaccgagcaaacgtacttaagacctttgtgtaagatcagaaaatcataagacagcattaaaaagtactatacaggaggagatggaacaagatggccaaatagaagcctccagcaatcatctccccgaaaggaattgaacaactatcaaaacaaaattgaacaactatctaaacaaaaaagtaccttcataaaaaacaaaaatcagttgatattatggattcccataaggattcatgtcttctattcactttaatgaacagttgttgggcaacaattctagaagagttccaattctcatcaggagaatggacaaggtggagaagcagagaaaatgcaatgagtagaatgtctaagtcatcactttggaattgactgaacataaataaaaatgagaaagatacgtaaaaaagaagggaatggatgccacagcccccattttgccaacgaggcagctgaggttcccagaggctcaataccagcaccatgagccgcagcacgcaaggcaaacacagccggagccaccacagcggcctcgagtacgccgaccccgagaagttcgcggactcggaccaggaccgggatccccaccggctcaactcgcatctcaagctgggcttcgaggatgtgatcgcagagccggtgactacgcactcctttgacaaagtgtggatctgcagccatgccctctttgaaatcagcaaatacgtaatgtacaagttcctgacggtgttcctggccattcccctggccttcattgcgggaattctctttgccaccctcagctgtctgcacatctggattttaatgccttttgtaaagacctgcctaatggttctgccttcagtgcagacaatatggaagagtgtgacagatgttatcattgctccattgtgtacgagcgtaggacgatgcttctcttctgtcagcctgcaact

SEQ ID NO: 3262 - DNA, 577 bp, Homo sapiens
  source 1..577: mol_type = unassigned DNA; mol_type = unassigned DNA
cccatgccactatgctatctctaattctgccatccagaccgagcaaacgtacttaagacctttgtgtaagatcagaaaatcataagacagcattaaaaagtactatacaggaggagatggaacaagatggccaaatagaagcctccagcaatcatctccccgaaaggaattgaacaactatcaaaacaaaattgaacaactatctaaacaaaaaagtaccttcataaaaaacaaaaatcaggacaatatcagaacggcacatacaagtgtccccaagtcatatttggaataagatcacttgggaacacaagtcaaagaaggacacagtgttctgcctctcctgagtaagcagcaacaacgcaccatcttggaatcaggggacggccctcaccagacaactaaatctgcagacaccttggacttcccagcctccagaactgattttaatgccttttgtaaagacctgcctaatggttctgccttcagtgcagacaatatggaagagtgtgacagatgttatcattgctccattgtgtacgagcgtaggacgatgcttctcttctgtcagcctgcaact

SEQ ID NO: 3263 - DNA, 857 bp, Homo sapiens
  source 1..857: mol_type = unassigned DNA; mol_type = unassigned DNA
cccatgccactatgctatctctaattctgccatccagaccgagcaaacgtacttaagacctttgtgtaagatcagaaaatcataagacagcattaaaaagtactatacaggaggagatggaacaagatggccaaatagaagcctccagcaatcatctccccgaaaggaattgaacaactatcaaaacaaaattgaacaactatctaaacaaaaaagtaccttcataaaaaacaaaaatcagacatatgaaggagggtcttttcatattaaattgttttcctggcagcacctgaaccaaaggatcagacttaaaataagtctttttccaatgttatgttgaaattggatacgacatttctcacaaaacttctaagtcaaacagtgatgagaaactactgcctaaaagttgatattatggattcccataaggattcatgtcttctattcactttaatgaacagttgttgggcaacaattctagaagagttccaattctcatcaggagaatggacaaggtggagaagcagagaaaatgcaatgagtagaatgtctaagtcatcactttggaattgactgaacataaataaaaatgagaaagatacgtaaaaaagaagggaatggatgccacagcccccattttgccaacgaggcagctgaggttcccagaggctcaataccagcaccatgagccgcagcacgcaaggcaaacacagccggaggattttaatgccttttgtaaagacctgcctaatggttctgccttcagtgcagacaatatggaagagtgtgacagatgttatcattgctccattgtgtacgagcgtaggacgatgcttctcttctgtcagcctgcaact

SEQ ID NO: 3264 - DNA, 1561 bp, Homo sapiens
  source 1..1561: mol_type = unassigned DNA; mol_type = unassigned DNA
aagatcagaaaatcataagacagcattaaaaagtactatacaggaggagatggaacaagatggccaaatagaagcctccagcaatcatctccccgaaaggaattgaacaactatcaaaacaaaattgaacaactatctaaacaaaaaagtaccttcataaaaaacaaaaatcagggaccttttcaaagatattcagtagacagcctgtattttctgcatacgctatacccggccctcaagttacagacagcccaaactaaatgggatcttggaggtcagccaaagacagaggctctcttgaagaggactcctgggactccagaaatggaggagacattaaatgagaaagcacttcctcctctggatactgtgtaatctttatcaggaccacacaatgtgcctttatgtgtgatgatagtggacagatgtgatatttccaatggattctatcttgcttgcttatttatgtattgctcagacttcagcctttagtctgaaacaaaataagttagaacgttcattgcttctaatttataatgaggaactactgatcggctttctgagactgcatattaggtttcatgtcacagatgtttatatgaatgacatcatgtagtatatactcttttccttctggcttctttcactcagcataaatatttaagattcatctgtgttgcaacatatgaaggagggtcttttcatattaaattgttttcctggcagcacctgaaccaaaggatcagacttaaaataagtctttttccaatgttatgttgaaattggatacgacatttctcacaaaacttctaagtcaaacagtgatgagaaactactgcctaaaagttgatattatggattcccataaggattcatgtcttctattcactttaatgaacagttgttgggcaacaattctagaagagttccaattctcatcaggagaatggacaaggtggagaagcagagaaaatgcaatgagtagaatgtctaagtcatcactttggaattgactgaacataaataaaaatgagaaagatacgtaaaaaagaagggaatggatgccacagcccccattttgccaacgaggcagctgaggttcccagaggctcaataccagcaccatgagccgcagcacgcaaggcaaacacagccggagccaccacagcggcctcgagtacgccgaccccgagaagttcgcggactcggaccaggaccgggatccccaccggctcaactcgcatctcaagctgggcttcgaggatgtgatcgcagagccggtgactacgcactcctttgacaaagtgtggatctgcagccatgccctctttgaaatcagcaaatacgtaatgtacaagttcctgacggtgttcctggccattcccctggccttcattgcgggaattctctttgccaccctcagctgtctgcacatctggattttaatgccttttgtaaagacctgcctaatggttctgccttcagtgcagacaatatggaagagtgtgacagatgttatcattgctccattgtgtacgagcgtaggacgatgcttctcttc

SEQ ID NO: 3265 - DNA, 995 bp, Homo sapiens
  source 1..995: mol_type = unassigned DNA; mol_type = unassigned DNA
agatcagaaaatcataagacagcattaaaaagtactatacaggaggagatggaacaagatggccaaatagaagcctccagcaatcatctccccgaaaggaattgaacaactatcaaaacaaaattgaacaactatctaaacaaaaaagtaccttcataaaaaacaaaaatcaggacaatatcagaacggcacatacaagtgtccccaagtcatatttggaataagatcacttgggaacacaagtcaaagaaggacacagtgttctgcctctcctgagtaagcagcaacaacgcaccatcttggaatcaggggacggccctcaccagacaactaaatctgcagacaccttggacttcccagcctccagaactgtctttctggcaactgtctaaacataaaccagagaagggcaaggcagactcaggaaggacaaatagaaggctattttcataaatcggacatatgaaggagggtcttttcatattaaattgttttcctggcagcacctgaaccaaaggatcagacttaaaataagtctttttccaatgttatgttgaaattggatacgacatttctcacaaaacttctaagtcaaacagtgatgagaaactactgcctaaaagttgatattatggattcccataaggattcatgtcttctattcactttaatgaacagttgttgggcaacaattctagaagagttccaattctcatcaggagaatggacaaggtggagaagcagagaaaatgcaatgagtagaatgtctaagtcatcactttggaattgactgaacataaataaaaatgagaaagatacgtaaaaaagaagggaatggatgccacagcccccattttgccaacgaggcagctgaggttcccagaggctcaataccagcaccatgagccgcagcacgcaaggcaaacacagccggaggattttaatgccttttgtaaagacctgcctaatggttctgccttcagtgcagacaatat

SEQ ID NO: 3266 - DNA, 1861 bp, Homo sapiens
  source 1..1861: mol_type = unassigned DNA; mol_type = unassigned DNA
agatcagaaaatcataagacagcattaaaaagtactatacaggaggagatggaacaagatggccaaatagaagcctccagcaatcatctccccgaaaggaattgaacaactatcaaaacaaaattgaacaactatctaaacaaaaaagtaccttcataaaaaacaaaaatcaggacacagtgttctgcctctcctgagtaagcagcaacaacgcaccatcttggaatcaggggacggccctcaccagacaactaaatctgcagacaccttggacttcccagcctccagaactgtctttctggcaactgtctaaacataaaccagagaagggcaaggcagactcaggaaggacaaatagaaggctattttcataaatcggtgatcagaagaacatattccatttcctgagatgaaaaaatccttaggaagagaaagttttaaggaaaccaagagttccattatggacaaaaccaccaccacatgtgcagcatccctctgggtctcttccatgacaaccctgtgggaagccagcttggcaggtcaccttgttctagcagatagaaactgaatcaatatgggaagagccagaatttggacaaggttcaccaaacattcacactgatgccagaactggagtgcaggtcccagcttcccatactgtggagtggccatgcgttgtctggcccgtgaaatgtgagcagagggatctgtgtaacttacaggctcagcatgaaatatcacccatgtgacctccatatactttctcatgaaggtcagccaaagacagaggctctcttgaagaggactcctgggactccagaaatggaggagacattaaatgacatatgaaggagggtcttttcatattaaattgttttcctggcagcacctgaaccaaaggatcagacttaaaataagtctttttccaatgttatgttgaaattggatacgacatttctcacaaaacttctaagtcaaacagtgatgagaaactactgcctaaaagttgatattatggattcccataaggattcatgtcttctattcactttaatgaacagttgttgggcaacaattctagaagagttccaattctcatcaggagaatggacaaggtggagaagcagagaaaatgcaatgagtagaatgtctaagtcatcactttggaattgactgaacataaataaaaatgagaaagatacgtaaaaaagaagggaatggatgccacagcccccattttgccaacgaggcagctgaggttcccagaggctcaataccagcaccatgagccgcagcacgcaaggcaaacacagccggagccaccacagcggcctcgagtacgccgaccccgagaagttcgcggactcggaccaggaccgggatccccaccggctcaactcgcatctcaagctgggcttcgaggatgtgatcgcagagccggtgactacgcactcctttgacaaagtgtggatctgcagccatgccctctttgaaatcagcaaatacgtaatgtacaagttcctgacggtgttcctggccattcccctggccttcattgcgggaattctctttgccaccctcagctgtctgcacatctggccggcgtcaggaggaggaacgcgcatcagttcccaagcagtaggaagaactggaaggccttgaaaggcaatgcgcttcctttagaataacagtttgggcttggagtttcaacaggagaaagaatgattttaatgccttttgtaaagacctgcctaatggttctgccttcagtgcagacaatatggaagagtgtgacagatgttatcattgctccattgtgtacgagcgtaggacgatgcttctcttctgtcagcctgcaact

SEQ ID NO: 3267 - DNA, 466 bp, Homo sapiens
  source 1..466: mol_type = unassigned DNA; mol_type = unassigned DNA
tatacaggaggagatggaacaagatggccaaatagaagcctccagcaatcatctccccgaaaggaattgaacaactatcaaaacaaaattgaacaactatctaaacaaaaaagtaccttcataaaaaacaaaaatcaggacacagtgttctgcctctcctgagtaagcagcaacaacgcaccatcttggaatcaggggacggccctcaccagacaactaaatctgcagacaccttggacttcccagcctccagaactgtctttctggcaactgtctaaacataaaccagagaagggcaaggcagactcaggaaggacaaatagaaggctattttcataaatcggaccaccaccacatgtgcagcatccctctgggtctcttccatgacaaccctgtgggaagccaggcaagtgagaatcaatgtaaacatgaagttcatgctgcttactgtgtcgtgataatgtcc

SEQ ID NO: 3268 - DNA, 3301 bp, Homo sapiens
  source 1..3301: mol_type = unassigned DNA; mol_type = unassigned DNA
ctccctccaggaaggccgttgtcttccctgggacgacttgccagctctgaggcatgacagtacgggcccccagaagggtgaccaggaggccctcctcgtcccagctgccggcgtcgccgcccactgcagggcccgggctgtgactcgtggggacggttccctgcgccccggcgggggaggtgggcggggaggggcggcggggcgccggggcggggctcgggacggccgggctgggagctggagcccacagcgggaagcggccgccgcccgggcctcgcagggctaggcgaggcgagggggggcggggccgggcgctacgggaaggggaggccgcgcggaccgggagccgcaccgcgccagccgggctgcagcggccgcgcaccaaggctgcgatggggctggagacggagaaggcggacgtacagctcttcatggacgacgactcctacagccaccacagcggcctcgagtacgccgaccccgagaagttcgcggactcggaccaggaccgggatccccaccggctcaactcgcatctcaagctgggcttcgaggatgtgatcgcagagccggtgactacgcactcctttgacaaagtgtggatctgcagccatgccctctttgaaatcagcaaatacgtaatgtacaagttcctgacggtgttcctggccattcccctggccttcattgcgggaattctctttgccaccctcagctgtctgcacatctggattttaatgccttttgtaaagacctgcctaatggttctgccttcagtgcagacaatatggaagagtgtgacagatgttatcattgctccattgtgtacgagcgtaggacgatgcttctcttctgtcagcctgcaactgagccaggattgaatacttggaccccaggtctggagattgggatactgtaatacttctttgttattataacataaaagcaccactgttctgttcatttcctagctgttctaattaagaaaactattaagatgagcaaccacatttagaaatgtttattgacaggtcttttcaaataatgcttttctaattaatagccaaagatttcatatctaactttgtaaccagaattatacagtaagttgacaccacttagatttaaaggcagacagttttgctttagtacaatagtatacattttataatgatgaacttataatgattaagggacatttctataaaaatactacaatagttttatgcacaacttcccattaaaaatgagatttcttatttgtttgtctgtttttactctgggagtaatactttttaaattacctttacatatatagtcactggcatactgagaatatacaatgatcctggaaattgcagtaacaaaagcacacaacgattatagtaactataagatacaataaaacaaataaatatgaaagtagattcatgaaaatgtattcctttaaaatattgttttcctacaggcctatttaacaagatgtttcattttactgtatattttgtagttaatataaatgttgctctaatcagattgcttaaaagcatttttattatatttatgttgttgaactaatatatgaaataagtaaatgtagctcccacaaggtaaacttcattggtaagattgcactgttctgattatgtaagcatttgtacatcttctttggaaataaaagataaaagagcgatacacaaagctttcttttctaacttttccaagcaaaatctaaaatgttttatgacatttttctggctgtgatcttaaaataattcatatctaaatagtattttgtctaggagatgctttctctctagtagttagaaattaaatctgtgtcagcattcctattaatgtctcactttactttcaagtaatattggtgctatttaacattttacagtaaatgttacttctgatactttagtacaatttcaactacagtgattcatgtagagagacaggggagttgtcaacttgggctactgaactacatgcataaactaaaaactaacagctacaaacttttaagatttctctaatattggtatgtaacacaggataaagttattcttgtcattttgaactgtagagtcctatttcagtgtgatgaatcactgttgctttgaaaaatctcattatttctgggccgggcatggtggctcacccctgtaatcccagcactttgggaggccaaggcgggtggatcatgaggtcaggagatcaagaccatcctggccaacatggtgataccccgtctctactaaaaatacaaaaaaattagttgggcatggtggcatgcacctgtagtcccagctacctgggaggctgaggcaggagaattgcttgaacctgggaggcagaggttgcagtgagccaaaatcatgccactgcactcccgcctggcaacagagcaagagtctgtctcaaaaaaaaaaagaaaaaaagaaaaaaagaaaaaagaaaaatctcattatttcaaaatgatagacatataccaaaaacaagtctataatgtgagtagttactaaaatttacacatcttaaaagtgtgtaaatgcttaaatttcagaattaccatcagaacctcaattgacattcctttgaatacgctaataagtgacaaataagattaataagatttttcaaaatcgccaggactggtgaatataaatgatgattgaactggaataatattggggaccaaatcaaatgaatgattaaattatgaagctcatatccttttgaaggtagttgcaaagagacatttcaaaactgccctaggccattgcagcatccttagatgggacgcataatcattaccttaaagcatcaccactcattttgaccatatagattttattatgttagtttaaaaggtcaatcagcctcatgactttatagttatgtcttgtatttaaaaacattttttatacatttggttatgttgataaaccaaaaacatttgattaataaaatatctatttgaataaattatgagctatcctttcaaacagctattggcaagttttaaacccaaaatatatacacatagttctgtaataaaactgtttgacttctcaagtaacatgacttccttatttctgaacagtactggttactttcaaaatgaatttttattgagattttccattaactatttttttcaaagactcaaattttgtaccaagtaaatccaggctttatgtacaaacatgttgtttgttttatttggggctgggggaggtatatgatgagcagacttctcggaattcataataaattttctaaaagccta

SEQ ID NO: 3269 - DNA, 776 bp, Homo sapiens
  source 1..776: mol_type = unassigned DNA; mol_type = unassigned DNA
accgcgccagccgggctgcagcggccgcgcaccaaggctgcgatggggctggagacggagaaggcggacgtacagctcttcatggacgacgactcctacagccaccacagcggcctcgagtacgccgaccccgagaagttcgcggactcggaccaggaccgggatccccaccggctcaactcgcatctcaaggattttaatgccttttgtaaagacctgcctaatggttctgccttcagtgcagacaatatggaagagtgtgacagatgttatcattgctccattgtgtacgagcgtaggacgatgcttctcttctgtcagcctgcaactgagccaggattgaatacttggaccccaggtctggagattgggatactgtaatacttctttgttattataacataaaagcaccactgttctgttcatttcctagctgttctaattaagaaaactattaagatgagcaaccacatttagaaatgtttattgacaggtcttttcaaataatgcttttctaattaatagccaaagatttcatatctaactttgtaaccagaattatacagtaagttgacaccacttagatttaaaggcagacagttttgctttagtacaatagtatacattttataatgatgaacttataatgattaagggacatttctataaaaatactacaatagttttatgcacaacttcccattaaaaatgagatttcttatttgtttgtctgtttttactctgggagtaatactttttaaattacctttacatat

SEQ ID NO: 3270 - DNA, 1179 bp, Homo sapiens
  source 1..1179: mol_type = unassigned DNA; mol_type = unassigned DNA
cgatggggctggagacggagaaggcggacgtacagctcttcatggacgacgactcctacagccaccacagcggcctcgagtacgccgaccccgagaagttcgcggactcggaccaggaccgggatccccaccggctcaactcgcatctcaagctgggcttcgaggatgtgatcgcagagccggtgactacgcactcctttgacaaagtgtggatctgcagccatgccctctttgaaatcagcaaatacgtaatgtacaagttcctgacggtgttcctggccattcccctggccttcattgcgggaattctctttgccaccctcagctgtctgcacatctggtgagacggggcacaccgggtggaccggctttctgaaacatgggcatattctccgccacctgccccctactctcctcttatcccaggccggcgtcaggaggaggaacgcgcatcagttcccaagcagtaggaagaactggaaggccttgaaaggcaatgcgcttcctttagaataacagtttgggcttggagtttcaacaggagaaagaatgtcggtctttcctggggtgtgattttccttgcatacataaggctgggctgagtgtggaggcgggtacctggaagccacacttcttaccacaggctgctctcggggccctgttgtgactcgtacctgcggttctgggcaggactcttctttctttcattgccttttattcagtcactgcctgtgcttggggtaaaacaaaagtgatctctgagcagaatgccgctgacagtagaattggatgaggatgtcagacctggttaagcagtagtgtggaggggctgcttcaactttgcccctggcagatggcaaggatgggacccagaggaaagggaggtgtgtgcagttaaggcgagggtcccccccagtacaaacgaatgaaaactccagctgcgggataatgaatgagaaggcctccaaattactttttcactgatgaaacacaaatggaagtggcatataattaaaggggaaagaaatatggaagcccactgtatattgataggatattttgagtaactctattcatactcaaaatgtgtcctaaactgtagagaactttcttaagcatcttttaaattttttatggaaaatgtcatattttaccaataaatgttgttgtgttagaaaa

SEQ ID NO: 3271 - DNA, 787 bp, Homo sapiens
  source 1..787: mol_type = unassigned DNA; mol_type = unassigned DNA
ctgagacccgcacccttccccggtcccacccgtcaccaggccgcccgcgtagccaggaattcttagccaggttcctgtgcgcccaccgtgaccctaagagaagaggcggacgccctggcacgtccttccctcctgcttcccccgcccaaagcgctcccggttcccggggcgtcaggttggctgacagttcggggtccctgcgtcctgtctcctcagctgggcttcgaggatgtgatcgcagagccggtgactacgcactcctttgacaaagtgtggatctgcagccatgccctctttgaaatcagcaaatacgtaatgtacaagttcctgacggtgttcctggccattcccctggccttcattgcgggaattctctttgccaccctcagctgtctgcacatctggattttaatgccttttgtaaagacctgcctaatggttctgccttcagtgcagacaatatggaagagtgtgacagatgttatcattgctccattgtgtacgagcgtaggacgatgcttctcttctgtcagcctgcaactgagccaggattgaatacttggaccccaggtctggagattgggatactgtaatacttctttgttattataacataaaagcaccactgttctgttcatttcctagctgttctaattaagaaaactattaagatgagcaaccacatttagaaatgtttattgacaggtcttttcaaataatgcttttctaattaatagccaaagatttcatatctaactttgtaaccagaattatacagtaagttgac

SEQ ID NO: 3272 - DNA, 4033 bp, Homo sapiens
  source 1..4033: mol_type = unassigned DNA; mol_type = unassigned DNA
ggccgccccgcgcgccccagccccgccgcgcgcctgagcccggtgcggcgccagaagacagcgcgcagccgcccctgagtcgtggaggcggggaccaagctggaaggagcagcgactcccggaccgagtcgcgagtgtgcgccgtccgccgcccgccggatcccccggaccccccgaccccccagtggacaggaaagctaaggcctcagcgatgccggactccccagcggaggtgaagacgcagccccggtccacaccccccagcatgccgcccccaccgcctgccgcatcccagggggccacacgccccccctccttcacgccacacacactgatgaacggcagcagccactcaccaacagccatcaatggtgcaccgtgcacacccaacggcttcagcaatggcccggccacctcgtccacagcctccttgtccacacagcacctgcccccagcctgcggggcccggcagctcagcaagctcaagcgcttcctcaccacactgcagcagtttggcagcgacatctccccagagattggggagcgcgtgcgcacactggtgctgggcctggtgaactcgacattgacgatcgaggagtttcattccaagcttcaggaggccaccaacttccctctgcggccgtttgtcattcccttcctgaaggcaaacctgcccttgctgcagcgggagctcctgcactgtgcacgcctggccaagcagacgcccgcccagtacttggcccagcatgagcagctcctgctggacgccagcgcctcctcccccatcgactcctcagagctgctactggaagtcaacgagaacggcaagaggaggacgcccgacaggaccaaagagaacgggtcagaccgcgacccgctgcaccccgagcacctcagcaaacggccatgcaccctgaaccctgcccagcgctacagccccagcaacgggccaccgcagcccacaccgccgccgcactaccgcctggaggacatagccatggcccaccacttccgagatgcctaccgccacccagacccccgggagctacgagagcgccatcggccgcttgtggtgcctgggtcccggcaggaagaagtgatcgaccacaagctcacagagcgtgagtgggcagaagagtggaagcacctcaacaacctcctgaactgcatcatggacatggtggagaagacgcggcgctcgctcacggtgctgcgcaggtgccaggaggccgaccgcgaggagctcaaccactgggcgcggcgctacagcgacgccgaggacacaaagaagggccccgctcccgccgcggcccggccccgcagcagctccgccggtcccgaagggcctcagctagacgtgcctcgcgagttcctgccgaggaccctcaccggctacgtgcctgaggacatctggaggaaggctgaagaggccgtgaatgaggtgaagcggcaggccatgtcggagctgcagaaagccgtgtcggacgcggagcgcaaagcgcacgagctcatcaccacggagcgtgccaagatggagcgggccctggccgaggcgaagcggcaggcctccgaggacgccctgacggtcatcaaccagcaggaggactccagcgagagctgctggaactgcgggcggaaagccagtgagacgtgcagcggctgcaacgcggcacgctactgcgggtccttctgccagcatcgggactgggagaagcatcaccacgtgtgtggccagagcctgcagggccccacagccgtggtggccgacccggtgcctggaccgcccgaagccgcccacagcctgggcccctccctgcctgtgggtgctgccagccccagcgaagccggctctgcggggccttctcgccccggctcccccagcccacctggcccactggacaccgtgccccgctgaccccactggcccctggcctgccggacacagcaccgtgccaaccccacccagctccaggcccaccggatgctgtgcctggcctccgatgcctggcctgccagacactgcgccccgcctgacctgggggagccgaccaattagtcactgctgctactgcccctctccgaaagaagacacagaaccaacaaaaccgcattcagtgcacctgcctcagctacctaatgattccgcgcggagacctcctgacaacgtctcttcaagcatcctcagaagcctcgactgagctttagacagcagagcagatgccgcaggcgcggcggctctgcccacctctcttttcctctctgtctgtctctccccctctgtcttctctatcctctctctctctatgactatcacacactttctcttcaatgaaaaaatcgaattggtggcttatattttcagcaaagaattttggggggttttgtgtgttggcaaaagagctactcagaaatggacaaagaaaacgggggggttctccccctcctgattaaaaagggagaaagaaaactgcgattttatagctggagatctgaacccagctgtgcccctcccccaggggcgtgaggctgatcagcgaagacgggaggaaagatttcgatttctgactcaagatgcatttttggtttcagatttttttttcctgtaatgttaaactctttggctttaagtaaaaatccaaaaagtttttttaaaaaagcaaaggaagcatacttgtgaactaccttgctagctagccagccaaggataccggacacacctctgctccaaaggaaatccaaaaaagcaaacacaagaaatcaaaatccaaaatttgtttgtcactgccaaagtatttttttcactgtttcacttgctcttgggtttgtttggatgtgggtctttttctcttctgttctgattttgtttgtgggtgtcgggatatttgggtgcagagggtttgtgcccagttagaagcgacttttgttctcttctgcgtaggcgttggtgcgtccgccgcgtgtgcgtggtccgtgtgccgttgctccggcctgcgtctccatatgtgtaggaaaggacacgccgtctgtcctcacgccccctgtgacttttcatatttccgttttccacttgtggaaaaaaagtgctaaagttttcttcccagagagagcataattccgaaacaaaactgtgacaatcttttgggttgattctcgactgcttttcgagcatgcggagccagcaggcctccctgaaacactgcttctcggccagcccgtcctcctctacctctctcctctccgcgccctccgacctctctcggccccctcaccccagctccgacctctctcagccccatcgccccaactccaacctctcggccccatcgccccaccgcagctactcccctttcttccaaacttttgcagaaaaaacaaaaaaactacaaacaaaagcagccctctgcctcctccccagggaagaccctgaccgtgtacatagccctggtgctcctgcccagccacccctcagatgcgttcgcctctggccctggggtgtgtctcggtgacgttttctatcagacgtgctccctcccatcctccagccctgcccaccctccctccactcctctcaactgcctcagcgatttcaagaaggaaataaagggataaagaaattcatgcttgcaccgagtacaaggacagacagcaggcacggcccgcagcctggcatctgtgcgtgtggcgtggcccgtggcttggcatctgtgtgcgtggtgtggcccgtggcctggcatctgtgtgcgtggcgtggcccgtggcctggcatctgtgtgtgtggcgtggcccgtggcctggcatctgtgcgcgtggcgtggcccgtggcctggcatctgtgtgcgtggctatcaggagttctaggaactcagtgcaatacgggagtgacccagctactgaaccagccacgaacagcccgccagaggcctgaagctgagcgtgtacgttaatgtgaatgtatatagtctttgcagaggtccaaatgatattcatgatggtaataaacgagatgtttgccaaataaaaaacagaaaccgca

SEQ ID NO: 3273 - DNA, 4477 bp, Homo sapiens
  source 1..4477: mol_type = unassigned DNA; mol_type = unassigned DNA
ccggaatggcccgagggaaggccgcgcagggcagggccccagatggttcctgtcagggaagtggcgggcgcagctgcaggcctccggccccggcattatcacggggacacagctggctgcctcacccgcaggctgcagggagaccttccccagcctgcagccccaggcccgccccgcgtcacatgagccccagggctcccaccccctccccagggcagaggacacccagttggtggccgggagggcctcggctttccagggacagaggcccaactccaggacgccccagctggcccagcccctcctctttccctcaaggctgcaggaggtcgggaaaggcagtcctggtagaggcctgtcctgggctccaggttggcccctgagggtggccctcctcatgccggcttcaagactgagggacagggcagccagttcagcctcgggatccacctgtggctccatgtcccagacgcaccctgtgctggagagcggcctcctggcatctgccggctgctccgcaccccggggtcccaggaagggcggcccagccccagtggacaggaaagctaaggcctcagcgatgccggactccccagcggaggtgaagacgcagccccggtccacaccccccagcatgccgcccccaccgcctgccgcatcccagggggccacacgccccccctccttcacgccacacacacatcgagaggacgggcctgcgacgctgccccacggccgttttcatggctgcttaaaatggtctatggtctgtctcttgatgaacggcagcagccactcaccaacagccatcaatggtgcaccgtgcacacccaacggcttcagcaatggcccggccacctcgtccacagcctccttgtccacacagcacctgcccccagcctgcggggcccggcagctcagcaagctcaagcgcttcctcaccacactgcagcagtttggcagcgacatctccccagagattggggagcgcgtgcgcacactggtgctgggcctggtgaactcgacattgacgatcgaggagtttcattccaagcttcaggaggccaccaacttccctctgcggccgtttgtcattcccttcctgaaggcaaacctgcccttgctgcagcgggagctcctgcactgtgcacgcctggccaagcagacgcccgcccagtacttggcccagcatgagcagctcctgctggacgccagcgcctcctcccccatcgactcctcagagctgctactggaagtcaacgagaacggcaagaggaggacgcccgacaggaccaaagagaacgggtcagaccgcgacccgctgcaccccgagcacctcagcaaacggccatgcaccctgaaccctgcccagcgctacagccccagcaacgggccaccgcagcccacaccgccgccgcactaccgcctggaggacatagccatggcccaccacttccgagatgcctaccgccacccagacccccgggagctacgagagcgccatcggccgcttgtggtgcctgggtcccggcaggaagaagtgatcgaccacaagctcacagagcgtgagtgggcagaagagtggaagcacctcaacaacctcctgaactgcatcatggacatggtggagaagacgcggcgctcgctcacggtgctgcgcaggtgccaggaggccgaccgcgaggagctcaaccactgggcgcggcgctacagcgacgccgaggacacaaagaagggccccgctcccgccgcggcccggccccgcagcagctccgccggtcccgaagggcctcagctagacgtgcctcgcgagttcctgccgaggaccctcaccggctacgtgcctgaggacatctggaggaaggctgaagaggccgtgaatgaggtgaagcggcaggccatgtcggagctgcagaaagccgtgtcggacgcggagcgcaaagcgcacgagctcatcaccacggagcgtgccaagatggagcgggccctggccgaggcgaagcggcaggcctccgaggacgccctgacggtcatcaaccagcaggaggactccagcgagagctgctggaactgcgggcggaaagccagtgagacgtgcagcggctgcaacgcggcacgctactgcgggtccttctgccagcatcgggactgggagaagcatcaccacgtgtgtggccagagcctgcagggccccacagccgtggtggccgacccggtgcctggaccgcccgaagccgcccacagcctgggcccctccctgcctgtgggtgctgccagccccagcgaagccggctctgcggggccttctcgccccggctcccccagcccacctggcccactggacaccgtgccccgctgaccccactggcccctggcctgccggacacagcaccgtgccaaccccacccagctccaggcccaccggatgctgtgcctggcctccgatgcctggcctgccagacactgcgccccgcctgacctgggggagccgaccaattagtcactgctgctactgcccctctccgaaagaagacacagaaccaacaaaaccgcattcagtgcacctgcctcagctacctaatgattccgcgcggagacctcctgacaacgtctcttcaagcatcctcagaagcctcgactgagctttagacagcagagcagatgccgcaggcgcggcggctctgcccacctctcttttcctctctgtctgtctctccccctctgtcttctctatcctctctctctctatgactatcacacactttctcttcaatgaaaaaatcgaattggtggcttatattttcagcaaagaattttggggggttttgtgtgttggcaaaagagctactcagaaatggacaaagaaaacgggggggttctccccctcctgattaaaaagggagaaagaaaactgcgattttatagctggagatctgaacccagctgtgcccctcccccaggggcgtgaggctgatcagcgaagacgggaggaaagatttcgatttctgactcaagatgcatttttggtttcagatttttttttcctgtaatgttaaactctttggctttaagtaaaaatccaaaaagtttttttaaaaaagcaaaggaagcatacttgtgaactaccttgctagctagccagccaaggataccggacacacctctgctccaaaggaaatccaaaaaagcaaacacaagaaatcaaaatccaaaatttgtttgtcactgccaaagtatttttttcactgtttcacttgctcttgggtttgtttggatgtgggtctttttctcttctgttctgattttgtttgtgggtgtcgggatatttgggtgcagagggtttgtgcccagttagaagcgacttttgttctcttctgcgtaggcgttggtgcgtccgccgcgtgtgcgtggtccgtgtgccgttgctccggcctgcgtctccatatgtgtaggaaaggacacgccgtctgtcctcacgccccctgtgacttttcatatttccgttttccacttgtggaaaaaaagtgctaaagttttcttcccagagagagcataattccgaaacaaaactgtgacaatcttttgggttgattctcgactgcttttcgagcatgcggagccagcaggcctccctgaaacactgcttctcggccagcccgtcctcctctacctctctcctctccgcgccctccgacctctctcggccccctcaccccagctccgacctctctcagccccatcgccccaactccaacctctcggccccatcgccccaccgcagctactcccctttcttccaaacttttgcagaaaaaacaaaaaaactacaaacaaaagcagccctctgcctcctccccagggaagaccctgaccgtgtacatagccctggtgctcctgcccagccacccctcagatgcgttcgcctctggccctggggtgtgtctcggtgacgttttctatcagacgtgctccctcccatcctccagccctgcccaccctccctccactcctctcaactgcctcagcgatttcaagaaggaaataaagggataaagaaattcatgcttgcaccgagtacaaggacagacagcaggcacggcccgcagcctggcatctgtgcgtgtggcgtggcccgtggcttggcatctgtgtgcgtggtgtggcccgtggcctggcatctgtgtgcgtggcgtggcccgtggcctggcatctgtgtgtgtggcgtggcccgtggcctggcatctgtgcgcgtggcgtggcccgtggcctggcatctgtgtgcgtggctatcaggagttctaggaactcagtgcaatacgggagtgacccagctactgaaccagccacgaacagcccgccagaggcctgaagctgagcgtgtacgttaatgtgaatgtatatagtctttgcagaggtccaaatgatattcatgatggtaataaacgagatgtttgccaaataaaaaacagaaaccgca

SEQ ID NO: 3274 - DNA, 2380 bp, Homo sapiens
  source 1..2380: mol_type = unassigned DNA; mol_type = unassigned DNA
actttgtaggaaaacacgggctggtctgccaggaagcctggagctcagagcgtctggtgggccagaggctcggagctgggaggccctgagggtctctgcttctccgcctcagcgacgaatgctgacacaggagaggcccaggacacacacggctcccagccgagtccaaggtccacagctccaatgccccccgtgcccgggcactgccctgggtgcctgagccagaccttgtccgagggcacctgggcctccccccagggacgcacacactcacgccctgcactcagggcccagccagggtggggagggccccagcgtgggaggggcagccgcgtggcccatcctgtgtgacgccggcccctgtttcagacgtgcctcgcgagttcctgccgaggaccctcaccggctacgtgcctgaggacatctggaggaaggctgaagaggccgtgaatgaggtgaagcggcaggccatgtcggagctgcagaaagccgtgtcggacgcggagcgcaaagcgcacgagctcatcaccacggagcgtgccaagatggagcgggccctggccgaggcgaagcggcaggcctccgaggacgccctgacggtcatcaaccagcaggaggactccagcgagagctgctggaactgcgggcggaaagccagtgagacgtgcagcggctgcaacgcggcacgctactgcgggtccttctgccagcatcgggactgggagaagcatcaccacgtgtgtggccagagcctgcagggccccacagccgtggtggccgacccggtgcctggaccgcccgaagccgcccacagcctgggcccctccctgcctgtgggtgctgccagccccagcgaagccggctctgcggggccttctcgccccggctcccccagcccacctggcccactggacaccgtgccccgctgaccccactggcccctggcctgccggacacagcaccgtgccaaccccacccagctccaggcccaccggatgctgtgcctggcctccgatgcctggcctgccagacactgcgccccgcctgacctgggggagccgaccaattagtcactgctgctactgcccctctccgaaagaagacacagaaccaacaaaaccgcattcagtgcacctgcctcagctacctaatgattccgcgcggagacctcctgacaacgtctcttcaagcatcctcagaagcctcgactgagctttagacagcagagcagatgccgcaggcgcggcggctctgcccacctctcttttcctctctgtctgtctctccccctctgtcttctctatcctctctctctctatgactatcacacactttctcttcaatgaaaaaatcgaattggtggcttatattttcagcaaagaattttggggggttttgtgtgttggcaaaagagctactcagaaatggacaaagaaaacgggggggttctccccctcctgattaaaaagggagaaagaaaactgcgattttatagctggagatctgaacccagctgtgcccctcccccaggggcgtgaggctgatcagcgaagacgggaggaaagatttcgatttctgactcaagatgcatttttggtttcagatttttttttcctgtaatgttaaactctttggctttaagtaaaaatccaaaaagtttttttaaaaaagcaaaggaagcatacttgtgaactaccttgctagctagccagccaaggataccggacacacctctgctccaaaggaaatccaaaaaagcaaacacaagaaatcaaaatccaaaatttgtttgtcactgccaaagtatttttttcactgtttcacttgctcttgggtttgtttggatgtgggtctttttctcttctgttctgattttgtttgtgggtgtcgggatatttgggtgcagagggtttgtgcccagttagaagcgacttttgttctcttctgcgtaggcgttggtgcgtccgccgcgtgtgcgtggtccgtgtgccgttgctccggcctgcgtctccatatgtgtaggaaaggacacgccgtctgtcctcacgccccctgtgacttttcatatttccgttttccacttgtggaaaaaaagtgctaaagttttcttcccagagagagcataattccgaaacaaaactgtgacaatcttttgggttgattctcgactgcttttcgagcatgcggagccagcaggcctccctgaaacactgcttctcggccagcccgtcctcctctacctctctcctctccgcgccctccgacctctctcggccccctcaccccagctccgacctctctcagccccatcgccccaactccaacctctcggccccatcgccccaccgcagctactcccctttcttccaaacttttgcag

SEQ ID NO: 3275 - DNA, 1815 bp, Homo sapiens
  source 1..1815: mol_type = unassigned DNA
gttaaaggatggcaagtgcggtgaggataacagcagggtctggggtgacagcacagagccctggacgagggggcttcctgggctgcgtctgggtggggccagaggtgaaggcggaacggcagagttatccaagtgcttcaggtcagcagcagctcccccggctcgcgttaggaatgcagattccgggtgcgcccctggctgaccaggccctggggtgggcctcgcccttgccctgcaggggtgcagtgcctggggagccgctgcggtagagtgcaagctttgacttgtgacaccacgtgacccagctttgcacacacatgcctgggatgcctgtgtttatttgcatgcacttgtctgcacaggcatgagggccatcaacgtgtgtctgtgtgtgcacagatgctacgtgtgttcagctgcctacagccccatcaacatgtgcctttgtgtgcacagatggtacgtgtgttcagctgcacacagcccctgtccccaggttgtggccacgcgtaggaagtccagagacccatctgggatggcccatgtgaccgccagccctgcccatgtcctttgcagaagaggccgtgaatgaggtgaagcggcaggccatgtcggagctgcagaaagccgtgtcggacgcggagcgcaaagcgcacgagctcatcaccacggagcgtgccaagatggagcgggccctggccgaggcgaagcggcaggcctccgaggacgccctgacggtcatcaaccagcaggaggactccagcgagagctgctggaactgcgggcggaaagccagtgagacgtgcagcggctgcaacgcggcacgctactgcgggtccttctgccagcatcgggactgggagaagcatcaccacgtgtgtggccagagcctgcagggccccacagccgtggtggccgacccggtgcctggaccgcccgaagccgcccacagcctgggcccctccctgcctgtgggtgctgccagccccagcgaagccggctctgcggggccttctcgccccggctcccccagcccacctggcccactggacaccgtgccccgctgaccccactggcccctggcctgccggacacagcaccgtgccaaccccacccagctccaggcccaccggatgctgtgcctggcctccgatgcctggcctgccagacactgcgccccgcctgacctgggggagccgaccaattagtcactgctgctactgcccctctccgaaagaagacacagaaccaacaaaaccgcattcagtgcacctgcctcagctacctaatgattccgcgcggagacctcctgacaacgtctcttcaagcatcctcagaagcctcgactgagctttagacagcagagcagatgccgcaggcgcggcggctctgcccacctctcttttcctctctgtctgtctctccccctctgtcttctctatcctctctctctctatgactatcacacactttctcttcaatgaaaaaatcgaattggtggcttatattttcagcaaagaattttggggggttttgtgtgttggcaaaagagctactcagaaatggacaaagaaaacgggggggttctccccctcctgattaaaaagggagaaagaaaactgcgattttatagctggagatctgaacccagctgtgcccctcccccaggggcgtgaggctgatcagcgaagacgggaggaaagatttcgatttctgactcaagatgcatttttggtttcagatttttttttcctgtaatgttaaactctttggctttaagtaaaaatccaaaaagtttttttaaaaaagcaaagg

SEQ ID NO: 3276 - DNA, 284 bp, Homo sapiens
  source 1..284: mol_type = unassigned DNA; mol_type = unassigned DNA
cggtcccgaagggcctcagctaggaaaacacgggctggtctgccaggaagcctggagctcagagcgtctggtgggccagaggctcggagctgggaggccctgagggtctctgcttctccgcctcagcgacgaatgctgacacaggagaggcccaggacacacacggctcccagccgagtccaagacgtgcctcgcgagttcctgccgaggaccctcaccggctacgtgcctgaggacatctggaggaaggctgaagaggccgtgaatgaggtgaagcggcaggc

SEQ ID NO: 3277 - DNA, 1327 bp, Homo sapiens
  source 1..1327: mol_type = unassigned DNA; mol_type = unassigned DNA
tctaaagctgcgaggcccgcggccgccgactgctgcgagccccagtggacaggaaagctaaggcctcagcgatgccggactccccagcggaggtgaagacgcagccccggtccacaccccccagcatgccgcccccaccgcctgccgcatcccagggggccacacgccccccctccttcacgccacacacacatcgagaggacgggcctgcgacgctgccccacggccgttttcatggctgcttaaaatggtctatggtctgtctcttgatgaacggcagcagccactcaccaacagccatcaatggtgcaccgtgcacacccaacggcttcagcaatggcccggccacctcgtccacagcctccttgtccacacagcacctgcccccagcctgcggggcccggcagctcagcaagctcaagcgcttcctcaccacactgcagcagtttggcagcgacatctccccagagattggggagcgcgtgcgcacactggtgctgggcctggtgaactcgacattgacgatcgaggagtttcattccaagcttcaggaggccaccaacttccctctgcggccgtttgtcattcccttcctgaaggcaaacctgcccttgctgcagcgggagctcctgcactgtgcacgcctggccaagcagacgcccgcccagtacttggcccagcatgagcagctcctgctggacgccagcgcctcctcccccatcgactcctcagagctgctactggaagtcaacgagaacggcaagaggaggacgcccgacaggaccaaagagaacgggtcagaccgcgacccgctgcaccccgagcacctcagcaaacggccatgcaccctgaaccctgcccagcgctacagccccagcaacgggccaccgcagcccacaccgccgccgcactaccgcctggaggacatagccatggcccaccacttccgagatgcctaccgccacccagacccccgggagctacgagagcgccatcggccgcttgtggtgcctgggtcccggcaggaagaagtgatcgaccacaagctcacagagcgtgagtgggcagaagagtggaagcacctcaacaacctcctgaactgcatcatggacatggtggagaagacgcggcgctcgctcacggtgctgcgcaggtgccaggaggccgaccgcgaggagctcaaccactgggcgcggcgctacagcgacgccgaggacacaaagaagggccccgctcccgccgcggcccggccccgcagcagctccgccggtcccgaagggcctcagctaggaaaacacgggctggtctgccaggaagcctggagctc

SEQ ID NO: 3278 - DNA, 469 bp, Homo sapiens
  source 1..469: mol_type = unassigned DNA; mol_type = unassigned DNA
gttcagcctcccgcgcggccgccagaagccgcggttctaaagctgcgaggcccgcggccgccgactgctgcgagccccagtggacaggaaagctaaggcctcagcgatgccggactccccagcggaggtgaagacgcagccccggtccacaccccccagcatgccgcccccaccgcctgccgcatcccagggggccacacgccccccctccttcacgccacacacactgatgaacggcagcagccactcaccaacagccatcaatggtgcaccgtgcacacccaacggcttcagcaatggcccggccacctcgtccacagcctccttgtccacacagcacctgcccccagcctgcggggcccggcagctcagcaagctcaagcgcttcctcaccacactgcagcagtttggcagcgacatctccccagagattggggagcgcgtgcgcacactggtgctgggcctggtg

SEQ ID NO: 3279 - DNA, 539 bp, Homo sapiens
  source 1..539: mol_type = unassigned DNA; mol_type = unassigned DNA
caccagcgccttgagcgttttcctgccgtctccggacacagctggccctgggtggagcttctcagacttcagggagcctcagaccacgagggaatcttgttcagctgcagccccagtggacaggaaagctaaggcctcagcgatgccggactccccagcggaggtgaagacgcagccccggtccacaccccccagcatgccgcccccaccgcctgccgcatcccagggggccacacgccccccctccttcacgccacacacacatcgagaggacgggcctgcgacgctgccccacggccgttttcatggctgcttaaaatggtctatggtctgtctcttgatgaacggcagcagccactcaccaacagccatcaatggtgcaccgtgcacacccaacggcttcagcaatggcccggccacctcgtccacagcctccttgtccacacagcacctgcccccagcctgcggggcccggcagctcagcaagctcaagcgcttcctcaccacactgcagcagtttggcagcgacatctccccag

SEQ ID NO: 3280 - DNA, 664 bp, Homo sapiens
  source 1..664: mol_type = unassigned DNA; mol_type = unassigned DNA
cccgcaggctgcagggagaccttccccagcctgcagccccaggcccgccccgcgtcacatgagccccagggctcccaccccctccccagggcagaggacacccagttggtggccgggagggcctcggctttccagggacagaggcccaactccaggacgccccagctggcccagcccctcctctttccctcaaggctgcaggaggtcgggaaaggcagtcctggtagaggcctgtcctgggctccaggttggcccctgagggtggccctcctcatgccggcttcaagactgagggacagggcagccagttcagcctcgggatccacctgtggctccatgtcccagacgcaccctgtgctggagagcggcctcctggcatctgccggctgctccgcaccccggggtcccaggaagggcggcccagccccagtggacaggaaagctaaggcctcagcgatgccggactccccagcggaggtgaagacgcagccccggtccacaccccccagcatgccgcccccaccgcctgccgcatcccagggggccacacgccccccctccttcacgccacacacactgatgaacggcagcagccactcaccaacagccatcaatggtgcaccgtgcacacccaacggcttcagcaatggcccggccacctcgt

SEQ ID NO: 3281 - DNA, 399 bp, Homo sapiens
  source 1..399: mol_type = unassigned DNA; mol_type = unassigned DNA
gcggccgccccgcgcgccccagccccgccgcgcgcctgagcccggtgcggcgccagaagacagcgcgcagccgcccctgagtcgtggaggcggggaccaagctggaaggagcagcgactcccggaccgagtcgcgagtgtgcgccgtccgccgcccgccggatcccccggaccccccgaccccccagtggacaggaaagctaaggcctcagcgatgccggactccccagcggaggtgaagacgcagccccggtccacaccccccagcatgccgcccccaccgcctgccgcatcccagggggccacacgccccccctccttcacgccacacacacatcgagaggacgggcctgcgacgctgccccacggccgttttcatggctgcttaaaatggtctatg

SEQ ID NO: 3282 - DNA, 284 bp, Homo sapiens
  source 1..284: mol_type = unassigned DNA; mol_type = unassigned DNA
gcgggatcctgtgtccagctcttccactcgcccgtgttttctgggtccatccccactggagcgtgtgtcggacctgccttccttcttatgtctgaataagtgtgcactgcatctgcttttgagtttatctgtgctcggctgacagtctatggagaaccttgtctcaccacagctgtgtgtctcagccccagtggacaggaaagctaaggcctcagcgatgccggactccccagcggaggtgaagacgcagccccggtccacaccccccagcatgccgcccccac

SEQ ID NO: 3283 - DNA, 584 bp, Homo sapiens
  source 1..584: mol_type = unassigned DNA; mol_type = unassigned DNA
gtggcggcggcggcggcggcggcggccgggggcgattaagtacacgggcttcagggaccggccccacgaggaacgccaggcacgcttccagaacgcctgccgcgacggccgctcggaaatcgcttttgtggccacaggaaccaatctgtctctccagttttttccggccagctggcagggagaacagcgacaaacacctagccgagagtatgtcgacttagaaagagaagcaggcaaggtatatttgaaggctcccatgattctgaatggagtctgtgttatctggaaaggctggattgatctccaaagactggatggtatgggctgtctggagtttgatgaggagcgagcccagcaggaggatgcattagcacaacaggcctttgaagaggctcggagaaggacacgcgaatttgaagatagagacaggtctcatcgggaggaaatggaggtgagagtttcacagctgctggcagtaactggcaagaagacaacaagaccctagtcctggttccaatttaggtggtggtgatgacctcaaacttcgttaattaatagcacagcagatgtgtgctgcccatctt

SEQ ID NO: 3284 - DNA, 3136 bp, Homo sapiens
  source 1..3136: mol_type = unassigned DNA; mol_type = unassigned DNA
gcggtgagcgctggggctgcgcgggcggcaggcaacggctgaggcggcggcggcggcggcggcggcgtgggttgggctcgagcgggcggcggcgcctcagactccccggaacgggagcccacgcgggcgggcgcctgaaacaaagggaagcgggcgtccgggcgccgcgggtgggcggtcagtcggtcagcgcggagccagccagcgggtgcccgcgcaagccccgagcgcggccggccggcgcggcctcagggcgggaagatgccgcgcgtcgtgcccgaccagagaagcaagttcgagaacgaggagttttttaggaagctgagccgcgagtgtgagattaagtacacgggcttcagggaccggccccacgaggaacgccaggcacgcttccagaacgcctgccgcgacggccgctcggaaatcgcttttgtggccacaggaaccaatctgtctctccagttttttccggccagctggcagggagaacagcgacaaacacctagccgagagtatgtcgacttagaaagagaagcaggcaaggtatatttgaaggctcccatgattctgaatggagtctgtgttatctggaaaggctggattgatctccaaagactggatggtatgggctgtctggagtttgatgaggagcgagcccagcaggaggatgcattagcacaacaggcctttgaagaggctcggagaaggacacgcgaatttgaagatagagacaggtctcatcgggaggaaatggaggtgagagtttcacagctgctggcagtaactggcaagaagacaacaagaccctagtcctggttccaatttaggtggtggtgatgacctcaaacttcgttaattaatagcacagcagatgtgtgctgcccatctttacatacacattgcttctagttggcagaaataattgattaaaagaccagaaactgtgataactggaggtactacggtctatttctcaaccttaggcagtaatagacatcacaaactgccatggttttgcactatgattataatacctgcatttctaattttttaagcatgtagccagtaataatttgaagttttttttctatgcaagcttaccttgttggcattattttagggagttgaaactatcaactgtaaagctccttttcttccactttaatttaaaagttcatgtcatttaaaaacaagtcaagaaattaaaattgtatcagagggttttctctaatcattttttctatttttttttttgtacttctagatgttttggttatacagcttcattttagatgagcattcttattttttgttttgtttgccccatttccttttgtgtttttatagtctatagcattttaaaactgctgatgttgtttgcattatttacaggctaaaaacttagtagcatagagctgtctgccacagccttctgacaaagtttacagttattaaagttgcagtatccttttaaatgctagtaatcagcactctttcttttttttttttttaatagagacagggtctcgcagtgttgcccaggctggtctcgaactcctggcatcaagcgatcctcctgccttagcctcccagagtactgggattacaggctctttctttttaaacataaaagttttaaattggtattaactctgtactctgccctagattgttttagcttctgttctgtaatcatgagtttggttggagatattctccatagatgatcttctactgaaatgcctaaagaagtcacaggctggcttctgttttattcagggatttttttaaaaagtcaatcagaaaagggatactggagcttcttcatgtatgtaacagcatattaaactggagacagtgatgaatcagctacaaaggtaatattgtattaaaatcatgtttaagatagctgcttttatgtgtattttatattgcatgcttttgtaaaaacatgctgggtgatgaaagattagttttagagagaaaatgttcatctgtgcagaggatgcattttcttccattaattctggaaaaaacgttcacagttatatatatggtattttgcaaaaggactattaatagaaccttttgagatgaattaatgtaagaatattttttaaataggcttactgtcaaattgcaactttttttttagatacagagtggaaaacagtgctaagtcatttggcacctccttacaaatatttttcatggtcacatttattaaatgttactacatttctgaatttttgaaaaatgtattttatcattaaatggcattattttaaagggtgaaaaactgacacagtcaattcagaaaatggactgaagtctgaataaggtcattgcatttaaaaagcatataactgtacttgactgatgagggaggtgttactttcattgtatataggtcttatttcataaacagatatcctgtatcaaataaaagtatttgttatatatttgaagttatgcatggaaaggagtgtgtttaaattgttacaaacaataatgcgtcattaaaggccatgctgatcttgcataactataagtactatgaatgaatttggttggttttggtgttgtacagctcacatgtttacacactcagtgccctaatttcccctgagggaatcgctttttaagtgatccttacagtggtgttttatgttactttattacagagctccttggttttttacttctgcacttaaatttttttaaataacatgatgatggtacattttcctctattgtctagctaagggctttcggtccaccagtaaataagatcaaatgctcttaaatgttcctgttaccatcctaatgtaaatactggatttttctgtcatttagcaccatgctgcttctgtctgtcttaatgctggcattaagatcatgagccctttttctccagtagtacaggctttgaaaactacttctattaagttattgatgcaatttgatattttttcataatctatatttaaacaaaattacatcattgcatcatcttttctaaattcatctccattaaaacttgccttaagctaccagattgcttttgccaccattggccatactgtgtgtttgtttgtttaatttactttcacaataaacttctgtgtagtaaaaa

SEQ ID NO: 3285 - DNA, 509 bp, Homo sapiens
  source 1..509: mol_type = unassigned DNA; mol_type = unassigned DNA
caacggctgaggcggcggcggcggcggcggcggcgtgggttgggctcgagcgggcggcggcgcctcagactccccggaacgggagcccacgcgggcgggcgcctgaaacaaagggaagcgggcgtccgggcgccgcgggtgggcggtcagtcggtcagcgcggagccagccagcgggtgcccgcgcaagccccgagcgcggccggccggcgcggcctcagggcgggaagatgccgcgcgtcgtgcccgaccagagaagcaagttcgagaacgaggagttttttaggaagctgagccgcgagtgtgagattaagtacacgggcttcagggaccggccccacgaggaacgccaggcacgcttccagaacgcctgccgcgacggccgctcggaaatcgtatatttgaaggctcccatgattctgaatggagtctgtgttatctggaaaggctggattgatctccaaagactggatggtatgggctgtctggagtttgatgaggagcgagccc

SEQ ID NO: 3286 - DNA, 2971 bp, Homo sapiens
  source 1..2971: mol_type = unassigned DNA; mol_type = unassigned DNA
agactccccggaacgggagcccacgcgggcgggcgcctgaaacaaagggaagcgggcgtccgggcgccgcgggtgggcggtcagtcggtcagcgcggagccagccagcgggtgcccgcgcaagccccgagcgcggccggccggcgcggcctcagggcgggaagatgccgcgcgtcgtgcccgaccagagaagcaagttcgagaacgaggagttttttaggaagctgagccgcgagtgtgagattaagtacacgggcttcagggaccggccccacgaggaacgccaggcacgcttccagaacgcctgccgcgacggccgctcggaaatcgcttttgtggccacaggaaccaatctgtctctccagttttttccggccagctggcagggagaacagcgacaaacacctagccgagagtatgtcgacttagaaagagaagcaggcaaggtatatttgaaggctcccatgattctgaatggagtctgtgttatctggaaaggctggattgatctccaaagactggatggtatgggctgtctggagtttgatgaggagcgagcccagcaggaggatgcattagcacaacaggcctttgaagaggctcggagaaggacacgcgaatttgaagatagagacaggtctcatcgggaggaaatggaggcaagaagacaacaagaccctagtcctggttccaatttaggtggtggtgatgacctcaaacttcgttaattaatagcacagcagatgtgtgctgcccatctttacatacacattgcttctagttggcagaaataattgattaaaagaccagaaactgtgataactggaggtactacggtctatttctcaaccttaggcagtaatagacatcacaaactgccatggttttgcactatgattataatacctgcatttctaattttttaagcatgtagccagtaataatttgaagttttttttctatgcaagcttaccttgttggcattattttagggagttgaaactatcaactgtaaagctccttttcttccactttaatttaaaagttcatgtcatttaaaaacaagtcaagaaattaaaattgtatcagagggttttctctaatcattttttctatttttttttttgtacttctagatgttttggttatacagcttcattttagatgagcattcttattttttgttttgtttgccccatttccttttgtgtttttatagtctatagcattttaaaactgctgatgttgtttgcattatttacaggctaaaaacttagtagcatagagctgtctgccacagccttctgacaaagtttacagttattaaagttgcagtatccttttaaatgctagtaatcagcactctttcttttttttttttttaatagagacagggtctcgcagtgttgcccaggctggtctcgaactcctggcatcaagcgatcctcctgccttagcctcccagagtactgggattacaggctctttctttttaaacataaaagttttaaattggtattaactctgtactctgccctagattgttttagcttctgttctgtaatcatgagtttggttggagatattctccatagatgatcttctactgaaatgcctaaagaagtcacaggctggcttctgttttattcagggatttttttaaaaagtcaatcagaaaagggatactggagcttcttcatgtatgtaacagcatattaaactggagacagtgatgaatcagctacaaaggtaatattgtattaaaatcatgtttaagatagctgcttttatgtgtattttatattgcatgcttttgtaaaaacatgctgggtgatgaaagattagttttagagagaaaatgttcatctgtgcagaggatgcattttcttccattaattctggaaaaaacgttcacagttatatatatggtattttgcaaaaggactattaatagaaccttttgagatgaattaatgtaagaatattttttaaataggcttactgtcaaattgcaactttttttttagatacagagtggaaaacagtgctaagtcatttggcacctccttacaaatatttttcatggtcacatttattaaatgttactacatttctgaatttttgaaaaatgtattttatcattaaatggcattattttaaagggtgaaaaactgacacagtcaattcagaaaatggactgaagtctgaataaggtcattgcatttaaaaagcatataactgtacttgactgatgagggaggtgttactttcattgtatataggtcttatttcataaacagatatcctgtatcaaataaaagtatttgttatatatttgaagttatgcatggaaaggagtgtgtttaaattgttacaaacaataatgcgtcattaaaggccatgctgatcttgcataactataagtactatgaatgaatttggttggttttggtgttgtacagctcacatgtttacacactcagtgccctaatttcccctgagggaatcgctttttaagtgatccttacagtggtgttttatgttactttattacagagctccttggttttttacttctgcacttaaatttttttaaataacatgatgatggtacattttcctctattgtctagctaagggctttcggtccaccagtaaataagatcaaatgctcttaaatgttcctgttaccatcctaatgtaaatactggatttttctgtcatttagcaccatgctgcttctgtctgtcttaatgctggcattaagatcatgagccctttttctccagtagtacaggctttgaaaactacttctattaagttattgatgcaatttgatattttttcataatctatatttaaacaaaattacatcattgcatcatcttttctaaattcatctccattaaaacttgccttaagctaccagattgcttttgccaccattggccatactgtgtgtttgtttgttt

SEQ ID NO: 3287 - DNA, 846 bp, Homo sapiens
  source 1..846: mol_type = unassigned DNA; mol_type = unassigned DNA
taggaagctgagccgcgagtgtgagattaagtacacgggcttcagggaccggccccacgaggaacgccaggcacgcttccagaacgcctgccgcgacggccgctcggaaatcgcaagaagacaacaagaccctagtcctggttccaatttaggtggtggtgatgacctcaaacttcgttaattaatagcacagcagatgtgtgctgcccatctttacatacacattgcttctagttggcagaaataattgattaaaagaccagaaactgtgataactggaggtactacggtctatttctcaaccttaggcagtaatagacatcacaaactgccatggttttgcactatgattataatacctgcatttctaattttttaagcatgtagccagtaataatttgaagttttttttctatgcaagcttaccttgttggcattattttagggagttgaaactatcaactgtaaagctccttttcttccactttaatttaaaagttcatgtcatttaaaaacaagtcaagaaattaaaattgtatcagagggttttctctaatcattttttctatttttttttttgtacttctagatgttttggttatacagcttcattttagatgagcattcttattttttgttttgtttgccccatttccttttgtgtttttatagtctatagcattttaaaactgctgatgttgtttgcattatttacaggctaaaaacttagtagcatagagctgtctgccacagccttctgacaaagtttacagttattaaagttgcagtatccttttaaatgctagtaatcagcactctttcttttttttttttttaatagagaca

SEQ ID NO: 3288 - DNA, 545 bp, Homo sapiens
  source 1..545: mol_type = unassigned DNA; mol_type = unassigned DNA
aaaatgcgaaaccagatgccgcgggccggtactcgcggggagacgcttttcctggggctcgccgcggtggcgcgtgtcggccaacggagcaccgcgagtggagctcgaacccgagccagactaaacaagcgaagggcattgtttaggcggcgacaccgaagaagggttcagggtatttgtagcaagcaaacccccattcggaaaaagaagtggagcttcattcaaggcttttgtggccacaggaaccaatctgtctctccagttttttccggccagctggcagggagaacagcgacaaacacctagccgagagtatgtcgacttagaaagagaagcaggcaaggtatatttgaaggctcccatgattctgaatggagtctgtgttatctggaaaggctggattgatctccaaagactggatggtatgggctgtctggagtttgatgaggagcgagcccagcaggaggatgcattagcacaacaggcctttgaagaggctcggagaaggacacgcgaatttgaagatagagacaggtctcatcggg

SEQ ID NO: 3289 - DNA, 610 bp, Homo sapiens
  source 1..610: mol_type = unassigned DNA
cttaagcagccaatggcaaatgtcctcaaaatggaatcagatgtttgtaacttaatacttaagaaaaatgatgagtgcatgtttttttttacttttaagtattctctgtgctgcctggcttaagacataaactgatgtaaaaataaatgactgcttgcataatttatgtaatgtcctgctcctgatcctgtttgtattgatttttctaaaaggcttttgtggccacaggaaccaatctgtctctccagttttttccggccagctggcagggagaacagcgacaaacacctagccgagagtatgtcgacttagaaagagaagcaggcaaggtatatttgaaggctcccatgattctgaatggagtctgtgttatctggaaaggctggattgatctccaaagactggatggtatgggctgtctggagtttgatgaggagcgagcccaggtagggtaacatcaggctttattgagcatggtccctttagtccctaatcttgcctttgcctggggacctattttacccaatttttaagagtaagtatagaaagtattgtgttgaagcaatattgaggaatcctgaaaatgttgatactcaaattctgatcctga

SEQ ID NO: 3290 - DNA, 484 bp, Homo sapiens
  source 1..484: mol_type = unassigned DNA
ctgagattacaggcgtgagccactgcgcccggccactgtttcaggaaaaaaaaaaaaaaaacaaaacccaaatattgtattttttttataaatcaaaattaaaataggtatttcatgtattctgacagcaggaggatgcattagcacaacaggcctttgaagaggctcggagaaggacacgcgaatttgaagatagagacaggtctcatcgggaggaaatggaggcaagaagacaacaagaccctagtcctggttccaatttaggtggtggtgatgacctcaaacttcgttaattaatagcacagcagatgtgtgctgcccatctttacatacacattgcttctagttggcagaaataattgattaaaagaccagaaactgtgataactggaggtactacggtctatttctcaaccttaggcagtaatagacatcacaaactgccatggttttgcactatgattataatacctgcatttctaat

SEQ ID NO: 3291 - DNA, 914 bp, Homo sapiens
  source 1..914: mol_type = unassigned DNA
ctctcaatattaaaagaatggagatcaaccaggaaattttcttcattctggataccccctcctcgtggctgtttctgcatagctctgaccagtagggaaaactcaagctgctggtgtgtgttctttcgtctcatttggagtcatctcatgactgcctcctagcaactctatttgccttgttcctgggagatgatatactgagagaaaacaggagagcaactggtagtaagaggcaagaagacaacaagaccctagtcctggttccaatttaggtggtggtgatgacctcaaacttcgttaattaatagcacagcagatgtgtgctgcccatctttacatacacattgcttctagttggcagaaataattgattaaaagaccagaaactgtgataactggaggtactacggtctatttctcaaccttaggcagtaatagacatcacaaactgccatggttttgcactatgattataatacctgcatttctaattttttaagcatgtagccagtaataatttgaagttttttttctatgcaagcttaccttgttggcattattttagggagttgaaactatcaactgtaaagctccttttcttccactttaatttaaaagttcatgtcatttaaaaacaagtcaagaaattaaaattgtatcagagggttttctctaatcattttttctatttttttttttgtacttctagatgttttggttatacagcttcattttagatgagcattcttattttttgttttgtttgccccatttccttttgtgtttttatagtctatagcattttaaaactgctgatgttgtttgcattatttacaggctaaaaacttagtagcatagagctgtctgccacagccttctgacaaagtttacagttattaaagttgcagtatcct

SEQ ID NO: 3292 - DNA, 4475 bp, Homo sapiens
  source 1..4475: mol_type = unassigned DNA; mol_type = unassigned DNA
ggaatcacagcgagttcaaatgtcaatggaaggcacagtagagtgggctctgacccagtgcttatgcggaaacacagacgccatgatttgcctttagaaggagctaaggtcttttccaatggtcaccttggaagtgaagaatatgatgttcctccccggctttctcctcctcctccagttaccaccctcctccctagcataaagtgtactggtccgttagcaaattctctttcagagaaaacaagagacccagtagaggaagatgatgatgaatacaagattccttcatcccaccctgtttccctgaattcacaaccatctcattgtcataatgtaaaacctcctgttcggtcttgtgataatggtcactgtatgctgaatggaacacatggtccatcttcagagaagaaatcaaacatccctgacttaagcatatatttaaagggtgaagatgcttttgatgccctccctccatctctcccacctcccccacctcctgcaaggcatagtctcattgaacattcaaaacctcctggctccagtagccggccatcctcaggacaggatctttttcttcttccttcagatccctttgttgatctagcaagtggccaagttcctttgcctcctgctagaaggttaccaggtgaaaatgtcaaaactaacagaacatcacaggactatgatcagcttccttcatgttcagatggttcacaggcaccagccagaccccctaaaccacgaccgcgcaggactgcaccagaaattcaccacagaaaaccccatgggcctgaggcggcattggaaaatgtcgatgcaaaaattgcaaaactcatgggagagggttatgcctttgaagaggtgaagagagccttagagatagcccagaataatgtcgaagttgcccggagcatcctccgagaatttgccttccctcctccagtatccccacgtctaaatctatagcagccagaactgtagacaccaaaatggaaagcaatcgatgtattccaagagtgtggaaataaagagaactgagatggaattcaagagagaagtgtctcctcctcgtgtagcagcttgagaagaggcttgggagtgcagcttctcaaaggagaccgatgcttgctcaggatgtcgacagctgtggcttccttgtttttgctagccatatttttaaatcagggttgaactgacaaaaataatttaaagacgtttacttcccttgaactttgaacctgtgaaatgctttaccttgtttacagtttggcaaagttgcagtttgttcttgtttttagtttagttttgttttggtgttttgatacctgtactgtgttcttcacagaccctttgtagcgtggtcaggtctgctgtaacatttcccaccaactctcttgctgtccacatcaacagctaaatcatttattcatatggatctctaccatccccatgccttgcccaggtccagttccatttctctcattcacaagatgctttgaaggttctgattttcaactgatcaaactaatgcaaaaaaaaaaaagtatgtattcttcactactgagtttcttctttggaaaccatcactattgagagatgggaaaaacctgaatgtataaagcatttatttgtcaataaactgccttttgtaaggggttttcacataacatagaggagcttcccttttttgtttaagttttgtaacctttaatcctccatattctcatgtctgtcatcccaggggtgtcacaactgtaaaaatctacaatattagaaagcagctactacagatgtggaagagagaacacttgtataagacaatgctgtactgaagttatataacaaggtcccctgatacttatgcctgcattactttgagggatgctgaatgagaggaccatctccctgaaatatattaataattttcagataaaattatgaacataacataccttttctcaagtggaattagagttcatttcccatttaagtgattacactctatctcctaagagctgtgggaaccagttcatattgcagtggaaacattaactcttcgttgcactgttgagtgtcaaggctactgtggcaatgttttttgcaaagttctcagtaattttctctctgcaatcaaattagagttcatatttaatttgcagattctctcattcattgctccacactgctttatcaaatcaggtgaaagaaattaatgtagttttgcctattttacaaaatggtggttggttctttaaacaccatgttattactcttaataaatctacaaatatttattgagcatctatgatatgcttggtgctgttaggcactgtgtttttaaagcacaaactctcaaaagctgattccagcgtaatgttttatttttgtttttctgtgttttttatgacaaagtctgtctgatagacaaagcctggaaggtttcccccagggctttagaatttagaattagctggttttcatttcaaatgggaaattaatggagaaatgagataaaatcatctctgtgtaaatgcttgaacccacagaaagttttctaaatatggactaattgtgggtttgtgcatatttctgtgtctcctcttttcacttcacacccaccatgatataaaaagatgcatcagagagtgagcctgccttcaggacctgaaaggacatgactgaacatctagtagatctggtggaaattaatgttatacaaaagacacgtagactaagttgaccctgggagaggagttaatacattcctttgcaaagtgacatgtgccctttttttgacagtctggctttcatggtatgagatgaggactcacaggccttgggtaatttctgcttttgtatgaattttttcagatggttctgagctggttatgtccctggaggggaatttttcatttgccttagatgttcttcccatgagtaggtacatgagtgaagtttcttacacttttaaaattgcattggcaaattttcttttgctttatgaacccctgttttgtcattatgatttttcacttgttttaacagtttcagatgtcaccttggaatagcactgtttattttggcctttttatgattgctgatgataggtacagtctaaaggccaaaagttgccacttcattgtgataacattgttgcaacattcctaatatattagagaatgatgtaaaataagaatgttagagaacatagcacattctcattcagtttataaacaatatttgaaaatttccagtgagaattaaaaaaggactagtgatgatatagcaaacctggacctgaaatttgggggtggggggtggggggatatctgttttgcagagaaaatttaccagcctccagcaaaatctctgcatcttgtactcaatagcaaccattagtattgtcatttaaaaagaatgaatcaaaaattcatacgtaatggaatgaaaagaggaaaactttctattaaacactgtcaagaaagacccattgctatctatcacctatgaaattaaacctaaaaaaatttttttttattgtaaaagcgactgctcgttgatgtctggaagtgatccagactttgtttcactgtgatccaaaaagttagacattccttccatttctcaagatttggtaacaatttttttttaagtcagcatttcatataatacataaaattaagacaaattaacttactgatatgtggccaatatcaacccttctcacccaacccaaacatgttctggagatagaaggacttatcctcaattatattccagtaaatttatctccataatctgttttatcccctaatgtatgatatatctcaccaaatttttctagaattgaataaaagcagtttttgcttaacttgaatttccttccacaaatacaaccttcagctcttccctctctgtttcccttttgcccacattgcaaatagtcttcataatagaaccctcactgcaacttaaaagggtcccatttcttaactcagcatttcatataccaagaacacttgcaaagatttcttcataatgtgattttttaatttttcagttccagaagcatttcctacagttcgaacgttattttttctctcagattttcaacttgaagctttgatttgcactgaattaacttggataaaattttagtttctctcttcagctaacagatttggaagcaaattacagtatacttgaataattcaggtactacctgttgacctggaattttagtgattctgggaaagttttccagacaaagacaccaatagagtgaagggttttttccccaattactattttattgttttttaaaatgcctttttaaaacttgtgtgatgtggcaaaatagtcatatgttcaattaatttatattttattcattccttttcaattctggttattatgtaacctcaagtactttatctgttcttttaaagtattttataaaatgaacgttaactaaa

SEQ ID NO: 3293 - DNA, 6780 bp, Homo sapiens
  source 1..6780: mol_type = unassigned DNA; mol_type = unassigned DNA
ctgggtcctgtgtgtgccacaggggtggggtgtccagcgagcggtctcctcctcctgctagtgctgctgcggcgtcccgcggcctccccgagtcgggcgggaggggagagcgggtgtggatttgtcttgacggtaattgttgcgtttccacgtctcggaggcctgcgcgctgggttgctccttcttcgggagcgagctgttctcagcgatcccactcccagccggggctccccacacacactgggctgcgtgcgtgtggagtgggacccgcgcacacgcgtgtctctggacagctacggcgccgaaagaactaaaattccagatggcaaactcaatgaatggcagaaaccctggtggtcgaggaggaaatccccgaaaaggtcgaattttgggtattattgatgctattcaggatgcagttggaccccctaagcaagctgccgcagatcgcaggaccgtggagaagacttggaagctcatggacaaagtggtaagactgtgccaaaatcccaaacttcagttgaaaaatagcccaccatatatacttgatattttgcctgatacatatcagcatttacgacttatattgagtaaatatgatgacaaccagaaacttgcccaactcagtgagaatgagtactttaaaatctacattgatagccttatgaaaaagtcaaaacgggcaataagactctttaaagaaggcaaggagagaatgtatgaagaacagtcacaggacagacgaaatctcacaaaactgtcccttatcttcagtcacatgctggcagaaatcaaagcaatctttcccaatggtcaattccagggagataactttcgtatcacaaaagcagatgctgctgaattctggagaaagttttttggagacaaaactatcgtaccatggaaagtattcagacagtgccttcatgaggtccaccagattagctctggcctggaagcaatggctctaaaatcaacaattgatttaacttgcaatgattacatttcagtttttgaatttgatatttttaccaggctgtttcagccttggggctctattttgcggaattggaatttcttagctgtgacacatccaggttacatggcatttctcacatatgatgaagttaaagcacgactacagaaatatagcaccaaacccggaagctatattttccggttaagttgcactcgattgggacagtgggccattggctatgtgactggggatgggaatatcttacagaccatacctcataacaagcccttatttcaagccctgattgatggcagcagggaaggattttatctttatcctgatgggaggagttataatcctgatttaactggattatgtgaacctacacctcatgaccatataaaagttacacaggaacaatatgaattatattgtgaaatgggctccacttttcagctctgtaagatttgtgcagagaatgacaaagatgtcaagattgagccttgtgggcatttgatgtgcacctcttgccttacggcatggcaggagtcggatggtcagggctgccctttctgtcgttgtgaaataaaaggaactgagcccataatcgtggacccctttgatccaagagatgaaggctccaggtgttgcagcatcattgacccctttggcatgccgatgctagacttggacgacgatgatgatcgtgaggagtccttgatgatgaatcggttggcaaacgtccgaaagtgcactgacaggcagaactcaccagtcacatcaccaggatcctctccccttgcccagagaagaaagccacagcctgacccactccagatcccacatctaagcctgccacccgtgcctcctcgcctggatctaattcagaaaggcatagttagatctccctgtggcagcccaacgggttcaccaaagtcttctccttgcatggtgagaaaacaagataaaccactcccagcaccacctcctcccttaagagatcctcctccaccgccacctgaaagacctccaccaatcccaccagacaatagactgagtagacacatccatcatgtggaaagcgtgccttccagagacccgccaatgcctcttgaagcatggtgccctcgggatgtgtttgggactaatcagcttgtgggatgtcgactcctaggggagggctctccaaaacctggaatcacagcgagttcaaatgtcaatggaaggcacagtagagtgggctctgacccagtgcttatgcggaaacacagacgccatgatttgcctttagaaggagctaaggtcttttccaatggtcaccttggaagtgaagaatatgatgttcctccccggctttctcctcctcctccagttaccaccctcctccctagcataaagtgtactggtccgttagcaaattctctttcagagaaaacaagagacccagtagaggaagatgatgatgaatacaagattccttcatcccaccctgtttccctgaattcacaaccatctcattgtcataatgtaaaacctcctgttcggtcttgtgataatggtcactgtatgctgaatggaacacatggtccatcttcagagaagaaatcaaacatccctgacttaagcatatatttaaagggagatgtttttgattcagcctctgatcccgtgccattaccacctgccaggcctccaactcgggacaatccaaagcatggttcttcactcaacaggacgccctctgattatgatcttctcatccctccattaggtgaagatgcttttgatgccctccctccatctctcccacctcccccacctcctgcaaggcatagtctcattgaacattcaaaacctcctggctccagtagccggccatcctcaggacaggatctttttcttcttccttcagatccctttgttgatctagcaagtggccaagttcctttgcctcctgctagaaggttaccaggtgaaaatgtcaaaactaacagaacatcacaggactatgatcagcttccttcatgttcagatggttcacaggcaccagccagaccccctaaaccacgaccgcgcaggactgcaccagaaattcaccacagaaaaccccatgggcctgaggcggcattggaaaatgtcgatgcaaaaattgcaaaactcatgggagagggttatgcctttgaagaggtgaagagagccttagagatagcccagaataatgtcgaagttgcccggagcatcctccgagaatttgccttccctcctccagtatccccacgtctaaatctatagcagccagaactgtagacaccaaaatggaaagcaatcgatgtattccaagagtgtggaaataaagagaactgagatggaattcaagagagaagtgtctcctcctcgtgtagcagcttgagaagaggcttgggagtgcagcttctcaaaggagaccgatgcttgctcaggatgtcgacagctgtggcttccttgtttttgctagccatatttttaaatcagggttgaactgacaaaaataatttaaagacgtttacttcccttgaactttgaacctgtgaaatgctttaccttgtttacagtttggcaaagttgcagtttgttcttgtttttagtttagttttgttttggtgttttgatacctgtactgtgttcttcacagaccctttgtagcgtggtcaggtctgctgtaacatttcccaccaactctcttgctgtccacatcaacagctaaatcatttattcatatggatctctaccatccccatgccttgcccaggtccagttccatttctctcattcacaagatgctttgaaggttctgattttcaactgatcaaactaatgcaaaaaaaaaaaagtatgtattcttcactactgagtttcttctttggaaaccatcactattgagagatgggaaaaacctgaatgtataaagcatttatttgtcaataaactgccttttgtaaggggttttcacataacatagaggagcttcccttttttgtttaagttttgtaacctttaatcctccatattctcatgtctgtcatcccaggggtgtcacaactgtaaaaatctacaatattagaaagcagctactacagatgtggaagagagaacacttgtataagacaatgctgtactgaagttatataacaaggtcccctgatacttatgcctgcattactttgagggatgctgaatgagaggaccatctccctgaaatatattaataattttcagataaaattatgaacataacataccttttctcaagtggaattagagttcatttcccatttaagtgattacactctatctcctaagagctgtgggaaccagttcatattgcagtggaaacattaactcttcgttgcactgttgagtgtcaaggctactgtggcaatgttttttgcaaagttctcagtaattttctctctgcaatcaaattagagttcatatttaatttgcagattctctcattcattgctccacactgctttatcaaatcaggtgaaagaaattaatgtagttttgcctattttacaaaatggtggttggttctttaaacaccatgttattactcttaataaatctacaaatatttattgagcatctatgatatgcttggtgctgttaggcactgtgtttttaaagcacaaactctcaaaagctgattccagcgtaatgttttatttttgtttttctgtgttttttatgacaaagtctgtctgatagacaaagcctggaaggtttcccccagggctttagaatttagaattagctggttttcatttcaaatgggaaattaatggagaaatgagataaaatcatctctgtgtaaatgcttgaacccacagaaagttttctaaatatggactaattgtgggtttgtgcatatttctgtgtctcctcttttcacttcacacccaccatgatataaaaagatgcatcagagagtgagcctgccttcaggacctgaaaggacatgactgaacatctagtagatctggtggaaattaatgttatacaaaagacacgtagactaagttgaccctgggagaggagttaatacattcctttgcaaagtgacatgtgccctttttttgacagtctggctttcatggtatgagatgaggactcacaggccttgggtaatttctgcttttgtatgaattttttcagatggttctgagctggttatgtccctggaggggaatttttcatttgccttagatgttcttcccatgagtaggtacatgagtgaagtttcttacacttttaaaattgcattggcaaattttcttttgctttatgaacccctgttttgtcattatgatttttcacttgttttaacagtttcagatgtcaccttggaatagcactgtttattttggcctttttatgattgctgatgataggtacagtctaaaggccaaaagttgccacttcattgtgataacattgttgcaacattcctaatatattagagaatgatgtaaaataagaatgttagagaacatagcacattctcattcagtttataaacaatatttgaaaatttccagtgagaattaaaaaaggactagtgatgatatagcaaacctggacctgaaatttgggggtggggggtggggggatatctgttttgcagagaaaatttaccagcctccagcaaaatctctgcatcttgtactcaatagcaaccattagtattgtcatttaaaaagaatgaatcaaaaattcatacgtaatggaatgaaaagaggaaaactttctattaaacactgtcaagaaagacccattgctatctatcacctatgaaattaaacctaaaaaaatttttttttattgtaaaagcgactgctcgttgatgtctggaagtgatccagactttgtttcactgtgatccaaaaagttagacattccttccatttctcaagatttggtaacaatttttttttaagtcagcatttcatataatacataaaattaagacaaattaacttactgatatgtggccaatatcaacccttctcacccaacccaaacatgttctggagatagaaggacttatcctcaattatattccagtaaatttatctccataatctgttttatcccctaatgtatgatatatctcaccaaatttttctagaattgaataaaagcagtttttgcttaacttgaatttccttccacaaatacaaccttcagctcttccctctctgtttcccttttgcccacattgcaaatagtcttcataatagaaccctcactgcaacttaaaagggtcccatttcttaactcagcatttcatataccaagaacacttgcaaagatttcttcataatgtgattttttaatttttcagttccagaagcatttcctacagttcgaacgttattttttctctcagattttcaacttgaagctttgatttgcactgaattaacttggataaaattttagtttctctcttcagctaacagatttggaagcaaattacagtatacttgaataattcaggtactacctgttgacctggaattttagtgattctgggaaagttttccagacaaagacaccaatagagtgaagggttttttccccaattactattttattgttttttaaaatgcctttttaaaacttgtgtgatgtggcaaaatagtcatatgttcaattaatttatattttattcattccttttcaattctggttattatgtaacctcaagtactttatctgttcttttaaagtattttataaaatgaacgttaactaaa

SEQ ID NO: 3294 - DNA, 4722 bp, Homo sapiens
  source 1..4722: mol_type = unassigned DNA; mol_type = unassigned DNA
gttcaagtttgaaatatactgggctggggtattctcaaaaaagtgcaaccaggatgataaagtaaactagagtggattaaaggaactgagaattggctcagagaagagaagaccttggatgtagacgagagttgtcttcagttacagtatttgggaaagaaggattatattttttccatgtcacttcagaaggtaggagtaagatcaatgggaaatgttaagaatgaaaattgcattcatcctacaaagaagtttcctaaatcattacgaattgttctaccttgagtgtagtgagttatctgacactggaggatttaaaccaatggtagatcattacatagtagagatatgaacatgagctaaagcatgagggcagcaaagaggggagaactttgtttcacctaaatggctcttcaaaccttttttagcattagtttctgctttgatatactctattaaaatttgggggataattgataaatcttccaggtggtttatggatggccagggaggaaatttgccattgttttaattatttaattttatttgcctctgtttttacacttggtaaaaatttggaagtgtttcagatagtgaagaaaaaaaagaattaagaaaaacattccaggccaggtacaggctcatgcctgtaatcccagcactttgggaggctgaggcaggcatatttcttgagctcaggaatttgacaccagcctggccaacatggtgaaactccagctctacaaaaatacaaaaattagccgggtgttggtggctcgcgcctgtagtctcagctacttgggaggccaaggcaagagaatggcttgtgcccgggaggcagaggttgcagtgagtcaagattgaaccactccactccagcctgggtgacagaacaagacgctctctcaaaaaaaaaaaaaaaaaaatccatacttcctcctcctaatcattgataggtatccttcctttttttttgttgtttttttgtttagttttgttttgttttttgcctacgagtatgtaagttcacatttatgtaaaatttatttctcatagtatatgctatttataaccattttccagttaatatgtcatgagcaatgtatatagttgttaaatatttgtacacaatataatttttattgatgtatatttcctcatttcttttttaagtagcaaaccatttcctcccagtcttcccttagttttttataatctctcaaataagtactaaattttcagttttgcagtgctgtactataaatcacaggcagtagtactttgctttttacaacagattagtctctgtatgtgtatccatttatttctcaaacacttatataagtgataaattggctgtgatcatttcagtttgttttaatcctgtggatataatatttttctttagtttttgaagaatttattttagaaaagctttattactttacaaagttttcttatcaggggacaattggtaattattatactctgtgtagcaattgtgttatatctaatctctttccctttaaagcctgaatgcttccaactttataatttgctttagagagcccagtttaccctatggctgacaaatagcaaacttaggatatgatgcaagatagaacatgataatgattcaaaacagaaccataagcaggtatttttgctatttataataatattttgagtgtatctagtaccttttaaataatatagtttaatggaagaatatagtacagtggtatattttatagtctatgtatggctctgaagtgtatccagagtttactttttaaccttaaataaatagatgattagaaatagcattaagtgtatttgacaaacctataaatttcccgtaaagaaataagcaagtgtatgtattgtaaaagacagtctttcctctgacttaatgttgtatcaggggcatttagagtctacaagaacctaaagtaaattttatgaaatatctagtgcaaaatctttgggaaatttcaaaatttatgctgaaatcaccatatttgtttcctttggtttctctaacaaaccaaaagatcaacattgtctcatgcgatttatcttctcattccttcctaaaaatatttctggaaaattaatggagctggaccaccaattcttcaaatattgaaaactcaaaatctaagagttattttaatcttgaaattaatgaaaacaagttaaagagccttgtctaagtcaaaaagtcctcagcaaagctggtgataattattatactccaaaaaaggtgaaaagataatggcttcaaatcctgccttacattatccagtcaaaaactaatataaaaatagtcaatatttaagcctatgttttcatcgtaagtaatcaaatacttacatattattaatgtctaagggagtggaagttaaaacaatgaaattcaatcgggtcttctttaatatttacaatttttgctttacattagcaattcaggtttcactgattttaaaattgtgaacaatctgaatttgtgtggatttatttgtggtagttaaaagtaaatattaagtgcaagctatttgccaagagtgttctaggtgctatgtttgatttaggaggtataattcaaacatgagaagtaggaaaagatccctcagatccctgtcctcagaagaattgacggtactttcagagatatcgacaacataaaagtactatgagaggaaagcagcggtgcctgaggtgggagtgatagctagataaattattagtgaaccaaggttttcagatgtaatgtttgtctactcaaaaagggaatcaattctctaagaatttaaacccatataatactatgaatgttaaaccagttgggtttatggtattaatgatttaatacagcaacactgacaaaatctctttttctccctttagttccagttagtaaatatcatattttttactatttcagatgccccgtctctgactgccaaggtggtaaattatcacattttactgtatattcaaatgttaattactaaatggcataattttaacaattaaatttactattttgtgagccaactaacaacaatgatgttaagcataggatgcccaatataataataagcaccttgtatgtacagaagattttacatgcacaaattcatttaatccacacaaatccgaagtttcaggtctgttttacaaattttgtatgcccaatgcttagagagatcaagtaatttgataatactcttatagggaggatccaaacccatggttttatgtatatttgtttgtttgttttttgcttttactttagaacagtttctatacattgtacaggttggattgggacagaaaataaaatttagaagctgtttttattgtcaacaatcttataattaaatatatctgcaaaatataaatataaaacaagtagtctttattatctggaaataaatgtgaagagcatatttaagcaagtgatgaataaattagaaaatatgcaggcagtaaaaaatggttaatatcagtcatgaatttaattttctaatttatttttgaaagccataatcttcataaaataattctagaatttttttcttcagccaatcaacagagatcatccttttaatttgaaacttgtttttatttttaagatccctttgttgatctagcaagtggccaagttcctttgcctcctgctagaaggttaccaggtgaaaatgtcaaaactaacagaacatcacaggactatgatcagcttccttcatgttcagatggttcacaggcaccagccagaccccctaaaccacgaccgcgcaggactgcaccagaaattcaccacagaaaaccccatgggcctgaggcggcattggaaaatgtcgatgcaaaaattgcaaaactcatgggagagggttatgcctttgaagaggtgaagagagccttagagatagcccagaataatgtcgaagttgcccggagcatcctccgagaatttgccttccctcctccagtatccccacgtctaaatctatagcagccagaactgtagacaccaaaatggaaagcaatcgatgtattccaagagtgtggaaataaagagaactgagatggaattcaagagagaagtgtctcctcctcgtgtagcagcttgagaagaggcttgggagtgcagcttctcaaaggagaccgatgcttgctcaggatgtcgacagctgtggcttccttgtttttgctagccatatttttaaatcagggttgaactgacaaaaataatttaaagacgtttacttcccttgaactttgaacctgtgaaatgctttaccttgtttacagtttggcaaagttgcagtttgttcttgtttttagtttagttttgttttggtgttttgatacctgtactgtgttcttcacagaccctttgtagcgtggtcaggtctgctgtaacatttcccaccaactctcttgctgtccacatcaacagctaaatcatttattcatatggatctctaccatccccatgccttgcccaggtccagttccatttctctcattcacaagatgctttgaaggttctgattttcaactgatcaaactaatgcaaaaaaaaaaaagtatgtattcttcactactgagtttcttctttggaaaccatcactattgagagatgggaaaaacctgaatgtataaagcatttatttgtcaataaactgccttttgtaaggggttttcacataa

SEQ ID NO: 3295 - DNA, 1493 bp, Homo sapiens
  source 1..1493: mol_type = unassigned DNA; mol_type = unassigned DNA
caggttctattgaattcttccacagagataagttaattttacatagtgtttaggatatcaacaatttttgtggcccttgtaattcttggttatagtttaaaaaaagagagactgtgttacttgagatatttacttctacattttaaaataagggatgagtatcttgatgttattactggtaattttgagaaaagaaaaatatatgttcaaactttattaaataaacaggaatactagttccctctacctctcaagttacttttaattggaaagtattctccttatataattttactctgaactgtcctttaggtcttgtgataatggtcactgtatgctgaatggaacacatggtccatcttcagagaagaaatcaaacatccctgacttaagcatatatttaaagggtgaagatgcttttgatgccctccctccatctctcccacctcccccacctcctgcaaggcatagtctcattgaacattcaaaacctcctggctccagtagccggccatcctcaggacaggatctttttcttcttccttcagatccctttgttgatctagcaagtggccaagttcctttgcctcctgctagaaggttaccaggtgaaaatgtcaaaactaacagaacatcacaggactatgatcagcttccttcatgttcagatggttcacaggcaccagccagaccccctaaaccacgaccgcgcaggactgcaccagaaattcaccacagaaaaccccatgggcctgaggcggcattggaaaatgtcgatgcaaaaattgcaaaactcatgggagagggttatgcctttgaagaggtgaagagagccttagagatagcccagaataatgtcgaagttgcccggagcatcctccgagaatttgccttccctcctccagtatccccacgtctaaatctatagcagccagaactgtagacaccaaaatggaaagcaatcgatgtattccaagagtgtggaaataaagagaactgagatggaattcaagagagaagtgtctcctcctcgtgtagcagcttgagaagaggcttgggagtgcagcttctcaaaggagaccgatgcttgctcaggatgtcgacagctgtggcttccttgtttttgctagccatatttttaaatcagggttgaactgacaaaaataatttaaagacgtttacttcccttgaactttgaacctgtgaaatgctttaccttgtttacagtttggcaaagttgcagtttgttcttgtttttagtttagttttgttttggtgttttgatacctgtactgtgttcttcacagaccctttgtagcgtggtcaggtctgctgtaacatttcccaccaactctcttgctgtccacatcaacagctaaatcatttattcatatggatctctaccatccccatgccttgcccaggtccagttccatttctctcattcacaagatgctttgaaggttctgattttcaactgatcaaactaatgc

SEQ ID NO: 3296 - DNA, 3350 bp, Homo sapiens
  source 1..3350: mol_type = unassigned DNA
ctgggtcctgtgtgtgccacaggggtggggtgtccagcgagcggtctcctcctcctgctagtgctgctgcggcgtcccgcggcctccccgagtcgggcgggaggggagagcgggtgtggatttgtcttgacggtaattgttgcgtttccacgtctcggaggcctgcgcgctgggttgctccttcttcgggagcgagctgttctcagcgatcccactcccagccggggctccccacacacactgggctgcgtgcgtgtggagtgggacccgcgcacacgcgtgtctctggacagctacggcgccgaaagaactaaaattccagatggcaaactcaatgaatggcagaaaccctggtggtcgaggaggaaatccccgaaaaggtcgaattttgggtattattgatgctattcaggatgcagttggaccccctaagcaagctgccgcagatcgcaggaccgtggagaagacttggaagctcatggacaaagtggtaagactgtgccaaaatcccaaacttcagttgaaaaatagcccaccatatatacttgatattttgcctgatacatatcagcatttacgacttatattgagtaaatatgatgacaaccagaaacttgcccaactcagtgagaatgagtactttaaaatctacattgatagccttatgaaaaagtcaaaacgggcaataagactctttaaagaaggcaaggagagaatgtatgaagaacagtcacaggacagacgaaatctcacaaaactgtcccttatcttcagtcacatgctggcagaaatcaaagcaatctttcccaatggtcaattccagggagataactttcgtatcacaaaagcagatgctgctgaattctggagaaagttttttggagacaaaactatcgtaccatggaaagtattcagacagtgccttcatgaggtccaccagattagctctggcctggaagcaatggctctaaaatcaacaattgatttaacttgcaatgattacatttcagtttttgaatttgatatttttaccaggctgtttcagccttggggctctattttgcggaattggaatttcttagctgtgacacatccaggttacatggcatttctcacatatgatgaagttaaagcacgactacagaaatatagcaccaaacccggaagctatattttccggttaagttgcactcgattgggacagtgggccattggctatgtgactggggatgggaatatcttacagaccatacctcataacaagcccttatttcaagccctgattgatggcagcagggaaggattttatctttatcctgatgggaggagttataatcctgatttaactggattatgtgaacctacacctcatgaccatataaaagttacacaggaacaatatgaattatattgtgaaatgggctccacttttcagctctgtaagatttgtgcagagaatgacaaagatgtcaagattgagccttgtgggcatttgatgtgcacctcttgccttacggcatggcaggagtcggatggtcagggctgccctttctgtcgttgtgaaataaaaggaactgagcccataatcgtggacccctttgatccaagagatgaaggctccaggtgttgcagcatcattgacccctttggcatgccgatgctagacttggacgacgatgatgatcgtgaggagtccttgatgatgaatcggttggcaaacgtccgaaagtgcactgacaggcagaactcaccagtcacatcaccaggatcctctccccttgcccagagaagaaagccacagcctgacccactccagatcccacatctaagcctgccacccgtgcctcctcgcctggatctaattcagaaaggcatagttagatctccctgtggcagcccaacgggttcaccaaagtcttctccttgcatggtgagaaaacaagataaaccactcccagcaccacctcctcccttaagagatcctcctccaccgccacctgaaagacctccaccaatcccaccagacaatagactgagtagacacatccatcatgtggaaagcgtgccttccagagacccgccaatgcctcttgaagcatggtgccctcgggatgtgtttgggactaatcagcttgtgggatgtcgactcctaggggagggctctccaaaacctggaatcacagcgagttcaaatgtcaatggaaggcacagtagagtgggctctgacccagtgcttatgcggaaacacagacgccatgatttgcctttagaaggagctaaggtcttttccaatggtcaccttggaagtgaagaatatgatgttcctccccggctttctcctcctcctccagttaccaccctcctccctagcataaagtgtactggtccgttagcaaattctctttcagagaaaacaagagacccagtagaggaagatgatgatgaatacaagattccttcatcccaccctgtttccctgaattcacaaccatctcattgtcataatgtaaaacctcctgttcggtcttgtgataatggtcactgtatgctgaatggaacacatggtccatcttcagagaagaaatcaaacatccctgacttaagcatatatttaaagggtacgtatagaatataatttcctttgtgatgtacatcttaatggtcagaatttaaaggcaaaatttcatgccattgtactgaaaatacattaaggttttgtgttatcctctaggagatgtttttgattcagcctctgatcccgtgccattaccacctgccaggcctccaactcgggacaatccaaagcatggttcttcactcaacaggacgccctctgattatgatcttctcatccctccattaggttgaaacctttaaaaaagttttgaacaacccacccctccttcttttaatttcagaattttcagaattcagagttcagtataacacagactcactgggttgtgaatttgcctgaaatttgaatgggttctccaggtgccggtgactcccaagttcacgagaccattactccatgtagatgattaaggtagtagtgtagtagttgggcatcagtcaggttttaagcaagttgttttgtccatactaaatgtagtctaaaaacacatgagagctttgtgctctagtagttttgaagtgatgacttgaagtgttgagattttctttaagtataataattcttaataaatatgaacttgcttttcttgcagcatgagcaccagttccacttacgctaattaaattatgcaaaattaaatagttgtatgtagagaactgataataaattctgttttattctaatcattacaactgtaacacattcaaaaaaa

SEQ ID NO: 3297 - DNA, 3237 bp, Homo sapiens
  source 1..3237: mol_type = unassigned DNA
ctgggtcctgtgtgtgccacaggggtggggtgtccagcgagcggtctcctcctcctgctagtgctgctgcggcgtcccgcggcctccccgagtcgggcgggaggggagagcgggtgtggatttgtcttgacggtaattgttgcgtttccacgtctcggaggcctgcgcgctgggttgctccttcttcgggagcgagctgttctcagcgatcccactcccagccggggctccccacacacactgggctgcgtgcgtgtggagtgggacccgcgcacacgcgtgtctctggacagctacggcgccgaaagaactaaaattccagatggcaaactcaatgaatggcagaaaccctggtggtcgaggaggaaatccccgaaaaggtcgaattttgggtattattgatgctattcaggatgcagttggaccccctaagcaagctgccgcagatcgcaggaccgtggagaagacttggaagctcatggacaaagtggtaagactgtgccaaaatcccaaacttcagttgaaaaatagcccaccatatatacttgatattttgcctgatacatatcagcatttacgacttatattgagtaaatatgatgacaaccagaaacttgcccaactcagtgagaatgagtactttaaaatctacattgatagccttatgaaaaagtcaaaacgggcaataagactctttaaagaaggcaaggagagaatgtatgaagaacagtcacaggacagacgaaatctcacaaaactgtcccttatcttcagtcacatgctggcagaaatcaaagcaatctttcccaatggtcaattccagggagataactttcgtatcacaaaagcagatgctgctgaattctggagaaagttttttggagacaaaactatcgtaccatggaaagtattcagacagtgccttcatgaggtccaccagattagctctggcctggaagcaatggctctaaaatcaacaattgatttaacttgcaatgattacatttcagtttttgaatttgatatttttaccaggctgtttcagccttggggctctattttgcggaattggaatttcttagctgtgacacatccaggttacatggcatttctcacatatgatgaagttaaagcacgactacagaaatatagcaccaaacccggaagctatattttccggttaagttgcactcgattgggacagtgggccattggctatgtgactggggatgggaatatcttacagaccatacctcataacaagcccttatttcaagccctgattgatggcagcagggaaggattttatctttatcctgatgggaggagttataatcctgatttaactggattatgtgaacctacacctcatgaccatataaaagttacacaggaacaatatgaattatattgtgaaatgggctccacttttcagctctgtaagatttgtgcagagaatgacaaagatgtcaagattgagccttgtgggcatttgatgtgcacctcttgccttacggcatggcaggagtcggatggtcagggctgccctttctgtcgttgtgaaataaaaggaactgagcccataatcgtggacccctttgatccaagagatgaaggctccaggtgttgcagcatcattgacccctttggcatgccgatgctagacttggacgacgatgatgatcgtgaggagtccttgatgatgaatcggttggcaaacgtccgaaagtgcactgacaggcagaactcaccagtcacatcaccaggatcctctccccttgcccagagaagaaagccacagcctgacccactccagatcccacatctaagcctgccacccgtgcctcctcgcctggatctaattcagaaaggcatagttagatctccctgtggcagcccaacgggttcaccaaagtcttctccttgcatggtgagaaaacaagataaaccactcccagcaccacctcctcccttaagagatcctcctccaccgccacctgaaagacctccaccaatcccaccagacaatagactgagtagacacatccatcatgtggaaagcgtgccttccagagacccgccaatgcctcttgaagcatggtgccctcgggatgtgtttgggactaatcagcttgtgggatgtcgactcctaggggagggctctccaaaacctggaatcacagcgagttcaaatgtcaatggaaggcacagtagagtgggctctgacccagtgcttatgcggaaacacagacgccatgatttgcctttagaaggagctaaggtcttttccaatggtcaccttggaagtgaagaatatgatgttcctccccggctttctcctcctcctccagttaccaccctcctccctagcataaagtgtactggtccgttagcaaattctctttcagagaaaacaagagacccagtagaggaagatgatgatgaatacaagattccttcatcccaccctgtttccctgaattcacaaccatctcattgtcataatgtaaaacctcctgttcggtcttgtgataatggtcactgtatgctgaatggaacacatggtccatcttcagagaagaaatcaaacatccctgacttaagcatatatttaaagggagatgtttttgattcagcctctgatcccgtgccattaccacctgccaggcctccaactcgggacaatccaaagcatggttcttcactcaacaggacgccctctgattatgatcttctcatccctccattaggttgaaacctttaaaaaagttttgaacaacccacccctccttcttttaatttcagaattttcagaattcagagttcagtataacacagactcactgggttgtgaatttgcctgaaatttgaatgggttctccaggtgccggtgactcccaagttcacgagaccattactccatgtagatgattaaggtagtagtgtagtagttgggcatcagtcaggttttaagcaagttgttttgtccatactaaatgtagtctaaaaacacatgagagctttgtgctctagtagttttgaagtgatgacttgaagtgttgagattttctttaagtataataattcttaataaatatgaacttgcttttcttgcagcatgagcaccagttccacttacgctaattaaattatgcaaaattaaatagttgtatgtagagaactgataataaattctgttttattctaatcattacaactgtaacacattcaaaaaaa

SEQ ID NO: 3298 - DNA, 519 bp, Homo sapiens
  source 1..519: mol_type = unassigned DNA; mol_type = unassigned DNA
aagcgaagcaggaagtcccgcctttcagccccagatggctttggctcccggtcccgacgctcacgcccacctgccaccccttattgaactaaaattccagatggcaaactcaatgaatggcagaaaccctggtggtcgaggaggaaatccccgaaaaggtcgaattttgggtattattgatgctattcaggatgcagttggaccccctaagcaagctgccgcagatcgcaggaccgtggagaagacttggaagctcatggacaaagtggtaagactgtgccaaaatcccaaacttcagttgaaaaatagcccaccatatatacttgatattttgcctgatacatatcagcatttacgacttatattgagtaaatatgatgacaaccagaaacttgcccaactcagtgagaatgagtactttaaaatctacattgatagccttatgaaaaagtcaaaacgggcaataagactctttaaagaaggcaaggagagaatgtatgaagaacagtcacaggacag

SEQ ID NO: 3299 - DNA, 944 bp, Homo sapiens
  source 1..944: mol_type = unassigned DNA; mol_type = unassigned DNA
aagcgaagcaggaagtcccgcctttcagccccagatggctttggctcccggtcccgacgctcacgcccacctgccaccccttattggttagctccttcgtgccttgcatcccttcgtccatttcctttcccgtttccactttcgttcccgggagagtccaggcccctcatttctctccgagtccaattcctttctgacgtgctgcgagcgggccttcctctggggccattgtgtactgtggaggacgtggacggggcggcagcgcgaggaggacgggcgcctcccgtccattggctgcacccgctgtcgggcagtgcgcggttgcgcggcattggctcagcggcgcccggccccgcccccgccccgccccgccccgagcctgggtcctgtgtgtgccacaggggtggggtgtccagcgagcggtctcctcctcctgctagtgctgctgcggcgtcccgcggcctccccgagtcgggcgggaggggagagcgggtgtggatttgtcttgacgaactaaaattccagatggcaaactcaatgaatggcagaaaccctggtggtcgaggaggaaatccccgaaaaggtcgaattttgggtattattgatgctattcaggatgcagttggaccccctaagcaagctgccgcagatcgcaggaccgtggagaagacttggaagctcatggacaaagtggtaagactgtgccaaaatcccaaacttcagttgaaaaatagcccaccatatatacttgatattttgcctgatacatatcagcatttacgacttatattgagtaaatatgatgacaaccagaaacttgcccaactcagtgagaatgagtactttaaaatctacattgatagccttatgaaaaagtcaaaacgggcaataagactctttaaagaaggcaaggagagaatgtatgaagaacagtcacaggacag

SEQ ID NO: 3300 - DNA, 561 bp, Homo sapiens
  source 1..561: mol_type = unassigned DNA; mol_type = unassigned DNA
gctgtcctgggtagaagggtttggcagccctagggagatgaatttctccagcgttggacccgcccagagcggagaagcaacacccttccagccactactctgttgctatgaaacaaaagactaggaagaactaaaattccagatggcaaactcaatgaatggcagaaaccctggtggtcgaggaggaaatccccgaaaaggtcgaattttgggtattattgatgctattcaggatgcagttggaccccctaagcaagctgccgcagatcgcaggaccgtggagaagacttggaagctcatggacaaagtggtaagactgtgccaaaatcccaaacttcagttgaaaaatagcccaccatatatacttgatattttgcctgatacatatcagcatttacgacttatattgagtaaatatgatgacaaccagaaacttgcccaactcagtgagaatgagtactttaaaatctacattgatagccttatgaaaaagtcaaaacgggcaataagactctttaaagaaggcaaggagagaatgtatgaagaacagtcacaggacag

SEQ ID NO: 3301 - DNA, 2435 bp, Homo sapiens
  source 1..2435: mol_type = unassigned DNA; mol_type = unassigned DNA
cgctccggctgcagcgccggctgcatcaataattcagagcggcggcggcggcggcagcggcgggtgcgggcaggaggcggcggcagcagcgggaccgagcagcagcggctatgcatccaagtgcggctgggcagccgcggcacccctgaggcccgggaggggctccgggaacacagcgcggaggggacgctagtcgcggaggggacgctagtcccggagtgcgaggaagaggtgtagtgtccagagcggcggcggcggagctgcgcacggagctgaggagggggcttcggagcgggactgggacggggggggcggctggcgcgagcagccctgggggtggggggcggggtgggcgccggcggcgcgatgctgggcgtcctggagctgctgctgctgggggctgcgtggctggcgggcccggcccgcgggcagaatgagacggagcccatcgtgctggagggcaagtgcctggtggtgtgcgactccaaccccacgtccgaccccacgggcactgccctgggcatctctgtgcgctctggcagcgccaaggtggctttctctgccatcaggagcaccaaccacgagccgtccgagatgagtaatcgcaccatgatcatctacttcgaccaggtactagtgaacattgggaacaactttgattcagaacgcagcactttcatcgccccgcgcaaagggatctacagttttaacttccacgtggtaaaagtctacaacagacaaaccatacaggtgagcctcatgctaaacgggtggccggtgatttcagccttcgctggtgaccaggacgtgacccgggaggccgccagcaacggagtcctaatccaaatggagaaaggcgaccgagcatacctcaagctggagcggggaaacttgatggggggctggaagtactcgaccttctccggattcctggtgtttcctctctgactggctcgtagccggaagggaggcagggagagggcgaaggcaggaaggggagtgagaaagaggctgaaattaagagggcgagaaagcagcacgacttgaaacttcctacatgttctctaactgtatctgggtaaaaaggtgcgcgccagctgtgggacaactttgtccatttccttattaggagaaataaatttcgcttagctctgcgcactcccatttccaaaaataaactcgcctcccccattccagttgcagtaatcaagaaagagactgccttgtcattgtttcttatcccccaacttcatgttccctgcaatttatttaaagaaactttgtatttcactacataatctgaaatctttctccctagccccctctgaatccttctgcctactgaaatctgatatattacacacccccaaccttttttttttcagtttggaaaggggtaaagttttgttgttgttgttgttttgttttggatggggaaggtagttttaatttggcaagtgttgctcttcttaaaacactgctcaaattaattagctgaagatacttagtatcctcggctgcttgttagcagagaaaggactcaccttagtggtgactggtttaaaaaatataaatatatatcatttgtatacgaagaactcttcccagtggaaactggctgtgtttccgtatttctatgttctattcggagtgatcgtgaaatctaaggctgcttgatgttctgatgcttgtcaatgccgtcgtgctctgtgactccacgaaacgccaaggagcttcttccggacgcctcctcttcctctgtaacatacgtgtgaatagtcaaggtttaattttgctttaatctaataaagtcgaagtgggacttttatttttctgaaacagctttctaaaatccgcatcttccccagctgcgaggttgggggtctggggtgccaaagggcgaggttccgaaaggcaggagacttgggggaacgcaaccatagaaaggcctgggcgcgagggcttccttgcaaagccggccttgcgctccttcctgcgccaggccggggaccagcactgcattcgcctgtgttcacagctttggcggaaacgtaagaaatgtggccgaaatcttgctaggccaggcgcggccgccggcccaggagcgaagtttgatttttttctttgcattccaaatgcatcaggaatagtcccagtttgaggacccaaacgaccctgcctggagcggcagactcctcaggccttctgtccccggatgtctcccaccgcgtccccctcgcagttcccgaagcagcgtatgttttatacaccgcctctgaatccggagtccacccgccgcatactcgggcgcccaggacctatgattccgctcattcacaggactttattcaagaggttcgtccaggagttttgattgtatcggaacataatgtgaaagcaaaaatgaaataaacgacttcgttttaagtctgaaa

SEQ ID NO: 3302 - DNA, 872 bp, Homo sapiens
  source 1..872: mol_type = unassigned DNA; mol_type = unassigned DNA
tgggcgccggcggcgcgatgctgggcgtcctggagctgctgctgctgggggctgcgtggctggcgggcccggcccgcgggcagaatgagacggagcccatcgtgctggagggcaagtgcctggtggtgtgcgactccaaccccacgtccgaccccacgggcactgccctgggcatctctgtgcgctctggcagcgccaaggtggctttctctgccatcaggagcaccaaccacgagccgtccgagatgagtaatcgcaccatgatcatctacttcgaccaggtgagtgttccttcctcccgcggcgtgcagattgggctggtgaaggagggatggatggaagaccgatgcccggtcctctccaagggctctgcggaggcgcggggacgacagtccgggaccgattcctgcccactccccttcgttcccgtctcgttataggtactagtgaacattgggaacaactttgattcagaacgcagcactttcatcgccccgcgcaaagggatctacagttttaacttccacgtggtaaaagtctacaacagacaaaccatacaggtgagcctcatgctaaacgggtggccggtgatttcagccttcgctggtgaccaggacgtgacccgggaggccgccagcaacggagtcctaatccaaatggagaaaggcgaccgagcatacctcaagctggagcggggaaacttgatggggggctggaagtactcgaccttctccggattcctggtgtttcctctctgactggctcgtagccggaagggaggcagggagagggcgaaggcaggaaggggagtgagaaagaggctgaaattaagagggcgagaaagcagcacgacttgaaacttcctacatgtt

SEQ ID NO: 3303 - DNA, 718 bp, Homo sapiens
  source 1..718: mol_type = unassigned DNA; mol_type = unassigned DNA
gagctgaggagggggcttcggagcgggactgggacggcggcgcgatgctgggcgtcctggagctgctgctgctgggggctgcgtggctggcgggcccggcccgcgggcagaatgagacggagcccatcgtgctggagggcaagtgcctggtggtgtgcgactccaaccccacgtccgaccccacgggcactgccctgggcatctctgtgcgctctggcagcgccaaggtggctttctctgccatcaggagcaccaaccacgagccgtccgagatgagtaatcgcaccatgatcatctacttcgaccaggtactagtgaacattgggaacaactttgattcagaacgcagcactttcatcgccccgcgcaaagggatctacagttttaacttccacgtggtaaaagtctacaacagacaaaccatacaggtgagcctcatgctaaacgggtggccggtgatttcagccttcgctggtgaccaggacgtgacccgggaggccgccagcaacggagtcctaatccaaatggagaaaggcgaccgagcatacctcaagctggagcggggaaacttgatggggggctggaagtactcgaccttctccggattcctggtgtttcctctctgactggctcgtagccggaagggaggcagggagagggcgaaggcaggaaggggagtgagaaagaggctgaaattaagagggcgagaaagcagcac

SEQ ID NO: 3304 - DNA, 2406 bp, Homo sapiens
  source 1..2406: mol_type = unassigned DNA; mol_type = unassigned DNA
actcgcctcattttctctaagcagagcaacttcgcggacagcggagctcgcccagcatggatgttccaggttcacaggcgcctttcttctgagaacgaccctggccttgaacgtcagagccggggacgaaggcccccggaggctgctgcgagctccgcgcgttccttcgcgcccttccgcgccgctcgcgccggcgccggcctccacccccgcgcgccgcctcccaccagtcccgatgcaggcgcccggccgggggccactcgggctgcggctgatgatgcccgggcgccggggggcgctgcgcgagccgggcggctgcggatcctgcctgggggtggcgctggccctgctgttgctgctactgcccgcctgctgccccgtgcgggcgcagaacgacacggagcccatcgtgctggagggcaagtgcctggtggtgtgcgactccagcccgtcggcggacggcgccgtcacctcctccctaggcatctccgtgcgctccggcagcgccaaggtggccttctccgccacgcggagcaccaaccacgagccgtccgagatgagcaaccgcaccatgaccatctatttcgaccaggtattagtaaatattggcaaccactttgatcttgcttccagtatatttgtagcaccgagaaaagggatttatagcttcagcttccacgtggtcaaagtgtataacagacaaaccatccaggtcagtttaatgcagaatggctacccagtgatctcggcctttgcaggagaccaggatgtcaccagagaagctgctagcaatggcgtgctgctgctcatggaaagggaagacaaagtgcatctcaaacttgagagaggcaacctcatggggggctggaaatactccacattctcgggcttcttggtgtttcctctataaacacagagccccctagatggtgggggaatggcaaactggacccaggactccgccctttaaaacaccctgaacttactggaattggacaccttgtttccaacctccgtcagactgttgcagtagaagaatgatttcctttgaaacctccagtacttttgtttttgttttttggaatactgacaattcctcgggaacctggcctctaattagttttagatgacaaggtcttaaggagaaatgaaattatcgatttgagcaatttgtacctgtgattgtaaagtcaatatcggattttattgttgggaccatggacctcttttgtttgtatgttgtattgtcgtcccaacggaaggagagctcctgactccaggatgggctgcaggttgcagtcagggcttgaagtaggagcccagcaaagaaccacctgctggacagtccttgacatgtgttctgtgtgtgtctgtatagccttaagaaaaagaatggcttcactttcattctgtattcttccccccaccatgtggctgggaggacttgggagggggatggggacattgggaacctgtcaagaagtgctttatccagagaagcaaattttgcacgattggactgcaatttttgttttgtattgtttgtgttttttcttgaaaagctttacttttctttccacactcagctctccctcctcaaccccacttttatttttcttgctggggttgaggagagaaaatatagaattcctggataagaccaaacaaaacaaaacattaaaatacctgtatgttttgttttagacgagaccaaactaaacaaaaagtatctgtttatcaaagtaaaagtaacacaatggacaattctgcttattctctcaaagagattctaagatgcacctttagaactattaatagcaacctgcatttttttttaatttatacttcagaatcctttaagaacctggtgttcctgagtggtcctgaatcatataagttggtaatggaagctgtaatgaccaagtcccctaaacatactatgtctttgccacgtgtgctgtgacttctctgtgggtgatttaatttatttggatccacctctgagtgagcgcacagtgatcaggtgcttcaaagccaacagaccagctcctcttcctccggatcctcttttgatctgcccaggaaagggatgcattgacactctcctgcatgcacctggcgagaagccacctgaaagtcactgtggttaaagatattggtggaggtaccccaggagcactgttacaaatccttcttgttttggcatctcgtacaacattattaagacacagctgagagttgatgggtgtgtaatgcatatgccaaggaaatgtcactaatcccaaagcaatcaaaaaggagacctcaaaccagatgttaatttgttctttgtgtaacaatgtaaccaaaatattgatgataaaagtcataatttaagattcagaataaatgggtttgatgtctggc

SEQ ID NO: 3305 - DNA, 2945 bp, Homo sapiens
  source 1..2945: mol_type = unassigned DNA; mol_type = unassigned DNA
gtcttctgtcggagtccgccggtccgcagcctgcggcagggaggcccgggcacccgcaggtggcgccccacgtccgtgtttgcgccctcagccgagctccaggcgcagctgggaaacccagcgcgtctccccgggtcctttgagcgagcgcggacaccgcaatttaataaataagcgcaagcgccagccgctccaccagtccgaggtccagaggagcagacacacagacccgggccggaggcccctcttctagccctgcgggaaccggacagttccccaactgggactctggaaccacagctcctaaatcatcaaattctcaagctttttttttccctctcttcgtcccagccatcccagtcttcttcttcttttttttttttttaacttattgtttttttcgctcctgtcattatgaaagtggtcacgccattcaatattaagacttggagggaattggggaaagaaaagaaagaatctaaaagaagagaagcgaccggtgcttttaagggtgtctaattttcaaaagagacgtctgggagtattttgctctgggcgtttggagcaacttcgcggacagcggagctcgcccagcatggatgttccaggttcacaggcgcctttcttctgagaacgaccctggccttgaacgtcagagccggggacgaaggcccccggaggctgctgcgagctccgcgcgttccttcgcgcccttccgcgccgctcgcgccggcgccggcctccacccccgcgcgccgcctcccaccagtcccgatgcaggcgcccggccgggggccactcgggctgcggctgatgatgcccgggcgccggggggcgctgcgcgagccgggcggctgcggatcctgcctgggggtggcgctggccctgctgttgctgctactgcccgcctgctgccccgtgcgggcgcagaacgacacggagcccatcgtgctggagggcaagtgcctggtggtgtgcgactccagcccgtcggcggacggcgccgtcacctcctccctaggcatctccgtgcgctccggcagcgccaaggtggccttctccgccacgcggagcaccaaccacgagccgtccgagatgagcaaccgcaccatgaccatctatttcgaccaggtattagtaaatattggcaaccactttgatcttgcttccagtatatttgtagcaccgagaaaagggatttatagcttcagcttccacgtggtcaaagtgtataacagacaaaccatccaggtcagtttaatgcagaatggctacccagtgatctcggcctttgcaggagaccaggatgtcaccagagaagctgctagcaatggcgtgctgctgctcatggaaagggaagacaaagtgcatctcaaacttgagagaggcaacctcatggggggctggaaatactccacattctcgggcttcttggtgtttcctctataaacacagagccccctagatggtgggggaatggcaaactggacccaggactccgccctttaaaacaccctgaacttactggaattggacaccttgtttccaacctccgtcagactgttgcagtagaagaatgatttcctttgaaacctccagtacttttgtttttgttttttggaatactgacaattcctcgggaacctggcctctaattagttttagatgacaaggtcttaaggagaaatgaaattatcgatttgagcaatttgtacctgtgattgtaaagtcaatatcggattttattgttgggaccatggacctcttttgtttgtatgttgtattgtcgtcccaacggaaggagagctcctgactccaggatgggctgcaggttgcagtcagggcttgaagtaggagcccagcaaagaaccacctgctggacagtccttgacatgtgttctgtgtgtgtctgtatagccttaagaaaaagaatggcttcactttcattctgtattcttccccccaccatgtggctgggaggacttgggagggggatggggacattgggaacctgtcaagaagtgctttatccagagaagcaaattttgcacgattggactgcaatttttgttttgtattgtttgtgttttttcttgaaaagctttacttttctttccacactcagctctccctcctcaaccccacttttatttttcttgctggggttgaggagagaaaatatagaattcctggataagaccaaacaaaacaaaacattaaaatacctgtatgttttgttttagacgagaccaaactaaacaaaaagtatctgtttatcaaagtaaaagtaacacaatggacaattctgcttattctctcaaagagattctaagatgcacctttagaactattaatagcaacctgcatttttttttaatttatacttcagaatcctttaagaacctggtgttcctgagtggtcctgaatcatataagttggtaatggaagctgtaatgaccaagtcccctaaacatactatgtctttgccacgtgtgctgtgacttctctgtgggtgatttaatttatttggatccacctctgagtgagcgcacagtgatcaggtgcttcaaagccaacagaccagctcctcttcctccggatcctcttttgatctgcccaggaaagggatgcattgacactctcctgcatgcacctggcgagaagccacctgaaagtcactgtggttaaagatattggtggaggtaccccaggagcactgttacaaatccttcttgttttggcatctcgtacaacattattaagacacagctgagagttgatgggtgtgtaatgcatatgccaaggaaatgtcactaatcccaaagcaatcaaaaaggagacctcaaaccagatgttaatttgttctttgtgtaacaatgtaaccaaaatattgatgataaaagtcataatttaagattcagaataaatgggtttgatgtctggc

SEQ ID NO: 3306 - DNA, 3336 bp, Homo sapiens
  source 1..3336: mol_type = unassigned DNA; mol_type = unassigned DNA
tcatctacagcagggctaaattctacctgaatttatcagtttccagaatgtaaaattgaggtgaaggagttgaggtgaaaggaagaagcagctccagaggcttaaatggagaatgctttattcttttctaaaagctttgtaaggaagacagcgagcatagccttgtgagactgagaataggcatcccgaggtgtttgtcttaacaatggaacccagagtgtctgtctcagtcctgcccttgagtggagctgaagtggtgctcacagctgggttgaagaagctgaaacaggcatatttcacaagtcatttcggcgattgtcattggcagcatttcacattgcgctgggaactgcatgttattcatctataatgagtgtgtaagaaataacagcaaaggtattccagttgaagtttgtattcccattaggtaacaaaatcttaaacccaggattttgatgttgttgttggctgtttgttttaaaaggcaggccatcttattataaagcagttgtgcatttatggatgaggaggatggagacagcatccagacaaagtggccagagtctgtgttgagcatctgaaagaaattgggtcatcacgggggtcccgccactcttgaaattctgcttatgaaacactcacccctgcccttttatctgaggaaagccatctgcagggtcatgcgcacattccaggtggctaattttgtcattgttttgcatgttgtagagttcccattagcttaagctaaggatgtccaagctgccggttctctatttattcaagctcatttacagggcaccatggctcaggcaagggagcagcacattgctcagggaaaattaaggaaaaacaggagtagcaaatgtttttctacaaaggtctttcattcaccacccatcatcaaccacctactgtgtgagtccagagtgtgccaggaactgagaaacactggagatccaaacctcacagagaccattgtctctgggagcacgtgaagttaggtcccaagcttgaacttacagaagtgatctcctttaattggcctcttgccccatagccgcttctctacccattcagaatggaacttttttgtttgtttgtttgtttgtttgttcgtttttttgtcaaacaaggcatcatgctgatgcccccatattcccacagacctccctggactcaatttaggatttgtttaacaagcttaccatcttcgattcctttctctctgccctgcccctcaacttacaaaattcacagccagtttttgaatgcataattaaaatatgctttagaaatcttgattagttacaatttattaaaatacctttgagattacttcctgctataggatcttttaacttcagcactgcctccttcctggggaagccagaatgctgaggatgctgaatttgtgttcccagccgctgatgaaggaggcagtgttgctggttatccaaggatgatgaaaacatacaccgaggaggggcttgccattgtgtgctgtgttccctcttctttttcaggtattagtaaatattggcaaccactttgatcttgcttccagtatatttgtagcaccgagaaaagggatttatagcttcagcttccacgtggtcaaagtgtataacagacaaaccatccaggtcagtttaatgcagaatggctacccagtgatctcggcctttgcaggagaccaggatgtcaccagagaagctgctagcaatggcgtgctgctgctcatggaaagggaagacaaagtgcatctcaaacttgagagaggcaacctcatggggggctggaaatactccacattctcgggcttcttggtgtttcctctataaacacagagccccctagatggtgggggaatggcaaactggacccaggactccgccctttaaaacaccctgaacttactggaattggacaccttgtttccaacctccgtcagactgttgcagtagaagaatgatttcctttgaaacctccagtacttttgtttttgttttttggaatactgacaattcctcgggaacctggcctctaattagttttagatgacaaggtcttaaggagaaatgaaattatcgatttgagcaatttgtacctgtgattgtaaagtcaatatcggattttattgttgggaccatggacctcttttgtttgtatgttgtattgtcgtcccaacggaaggagagctcctgactccaggatgggctgcaggttgcagtcagggcttgaagtaggagcccagcaaagaaccacctgctggacagtccttgacatgtgttctgtgtgtgtctgtatagccttaagaaaaagaatggcttcactttcattctgtattcttccccccaccatgtggctgggaggacttgggagggggatggggacattgggaacctgtcaagaagtgctttatccagagaagcaaattttgcacgattggactgcaatttttgttttgtattgtttgtgttttttcttgaaaagctttacttttctttccacactcagctctccctcctcaaccccacttttatttttcttgctggggttgaggagagaaaatatagaattcctggataagaccaaacaaaacaaaacattaaaatacctgtatgttttgttttagacgagaccaaactaaacaaaaagtatctgtttatcaaagtaaaagtaacacaatggacaattctgcttattctctcaaagagattctaagatgcacctttagaactattaatagcaacctgcatttttttttaatttatacttcagaatcctttaagaacctggtgttcctgagtggtcctgaatcatataagttggtaatggaagctgtaatgaccaagtcccctaaacatactatgtctttgccacgtgtgctgtgacttctctgtgggtgatttaatttatttggatccacctctgagtgagcgcacagtgatcaggtgcttcaaagccaacagaccagctcctcttcctccggatcctcttttgatctgcccaggaaagggatgcattgacactctcctgcatgcacctggcgagaagccacctgaaagtcactgtggttaaagatattggtggaggtaccccaggagcactgttacaaatccttcttgttttggcatctcgtacaacattattaagacacagctgagagttgatgggtgtgtaatgcatatgccaaggaaatgtcactaatcccaaagcaatcaaaaaggagacctcaaaccagatgttaatttgttctttgtgtaacaatgtaaccaaaatattgatgataaaagtcataatttaagattcagaataaatgggtttgatgtc

SEQ ID NO: 3307 - DNA, 543 bp, Homo sapiens
  source 1..543: mol_type = unassigned DNA; mol_type = unassigned DNA
actcgcctcattttctctaagcagagcaacttcgcggacagcggagctcgcccagcatggatgttccaggtattagtaaatattggcaaccactttgatcttgcttccagtatatttgtagcaccgagaaaagggatttatagcttcagcttccacgtggtcaaagtgtataacagacaaaccatccaggtcagtttaatgcagaatggctacccagtgatctcggcctttgcaggagaccaggatgtcaccagagaagctgctagcaatggcgtgctgctgctcatggaaagggaagacaaagtgcatctcaaacttgagagaggcaacctcatggggggctggaaatactccacattctcgggcttcttggtgtttcctctataaacacagagccccctagatggtgggggaatggcaaactggacccaggactccgccctttaaaacaccctgaacttactggaattggacaccttgtttccaacctccgtcagactgttgcagtagaagaatgatttcctttgaaacctccagtacttt

SEQ ID NO: 3308 - DNA, 631 bp, Homo sapiens
  source 1..631: mol_type = unassigned DNA; mol_type = unassigned DNA
gaaatggcctgtctgctttcctgggaggagcggggacggggcaaaagtgcagacgggcgcgtaagttcgcagaaacctgcaggggctgccgccccgctgagaaagagagaatccccgtggtctggaaaccagagctggagaataacccaagcctgggattccgtcgttggaatcggtccttcgcctaagagaggaatcccaggggtttcacccaagggggctcgctagtggctgcagggaccttggaagtattagtaaatattggcaaccactttgatcttgcttccagtatatttgtagcaccgagaaaagggatttatagcttcagcttccacgtggtcaaagtgtataacagacaaaccatccaggtcagtttaatgcagaatggctacccagtgatctcggcctttgcaggagaccaggatgtcaccagagaagctgctagcaatggcgtgctgctgctcatggaaagggaagacaaagtgcatctcaaacttgagagaggcaacctcatggggggctggaaatactccacattctcgggcttcttggtgtttcctctataaacacagagccccctagatggtgggggaatggcaaactggacccaggactccgccctttaaaacac

SEQ ID NO: 3309 - DNA, 537 bp, Homo sapiens
  source 1..537: mol_type = unassigned DNA; mol_type = unassigned DNA
ataagcataaatgttctaagagtgtacaacaggactttgcgtccgtcagtgaggataacaagtctgtcattggatagatcctaagtgaaattagatataaaagagaaatgaattgaatttactggacaacattcttcagatctgctgggacatattttcattttctgtgagtactggaatggattgggacaaggtattagtaaatattggcaaccactttgatcttgcttccagtatatttgtagcaccgagaaaagggatttatagcttcagcttccacgtggtcaaagtgtataacagacaaaccatccaggtcagtttaatgcagaatggctacccagtgatctcggcctttgcaggagaccaggatgtcaccagagaagctgctagcaatggcgtgctgctgctcatggaaagggaagacaaagtgcatctcaaacttgagagaggcaacctcatggggggctggaaatactccacattctcgggcttcttggtgtttcctctataaacacagagccccctagatggtggggg

SEQ ID NO: 3310 - DNA, 326 bp, Homo sapiens
  source 1..326: mol_type = unassigned DNA; mol_type = unassigned DNA
tctgtcattggatagatcctaagtgaaattagatataaaagagaaatgaattgaatttactggacaacattcttcagatctgctgggacatattttcattttcttgagcatctcaacatcttttgtgaaaaaggagaacgtggatgtcactggctttcacttcatgttttaggtcagcgctgcttttggggtgaaagaagaccatcagcaaacctcagccttgcggccaggactcccccgtcttctgtcggagtccgccggtccgcagcctgcggcagggaggcccgggcacccgcaggtggcgccccacgtccgtgtttgcgccc

SEQ ID NO: 3311 - DNA, 576 bp, Homo sapiens
  source 1..576: mol_type = unassigned DNA; mol_type = unassigned DNA
agtcataagcataaatgttctaagagtgtacaacaggactttgcgtccgtcagtgaggataacaagtctgtcattggatagatcctaagtgaaattagatataaaagagaaatgaattgaatttactggacaacattcttcagatctgctgggacatattttcattttctgtgagtactggaatggattgggacaagcccactctgcccctcatcctgtgcctatgaagaccccagactcagtcagagagaaagggagaagcagctggacttctgaaagaagaaacttgacttcagagggaagacttgatggcttgatttcaaagaagagtcctgccagagatggccagacttgaggggaagattacctgcccatcccatttcctttccagctccccttcctgctgagagccactttttcatcgttcaatgaaattgtctacattcaccatccttcaatttgttcctgctacctcatttttcctggatgacagacaagagctcgggagccacaagtgcagatactcaaaaaaaaaggctgtcacactggccctttgccctcagtagtggaaggcag

SEQ ID NO: 3312 - DNA, 262 bp, Homo sapiens
  source 1..262: mol_type = unassigned DNA; mol_type = unassigned DNA
gtcctccacagcaaagtgtattccacccattttcttagagagagagaggcaagcatcctattattagacagattctcaatgtgcctctcacccctctgacattcagactcctggctgttattttccagaagattttgagcccactctgcccctcatcctgtgcctatgaagaccccagactcagtcagagagaaagggagaagcagctggacttctgaaagaagaaacttgacttcagagggaagacttgatggcttgattt

SEQ ID NO: 3313 - DNA, 2346 bp, Homo sapiens
  source 1..2346: mol_type = unassigned DNA; mol_type = unassigned DNA
gggctgttgatttgtgggggattttgaagagaggaagagtaggaggaaggggttgaggggctgcctctggcatatgcacacactcacacattctgtcacacccgtcacacacacataccatgttctccatccccccaggtccagccctcagtgctgtcccatccagcagggctgccctgaagctctggctgcagccctcccgtccagtgggcaggcggcttcatccctcctttctctcccaaagcccaactgctgtcactgcatgctctgccaaggaggagggaactgcagtgacagcaggagtaagagtgggaggcaggacagagctgggacacaggtatggagagggggttcagcgagcctagagagggcagacgatcagggtgccggcggtgagaatccagggagaggagcggaaacagaagaggggcagaagaccggggcacttgtgggttgcagagcccctcagccatgttgggagccaagccacactggctaccaggtcccctacacagtcccgggctgcccttggttctggtgcttctggccctgggggccgggtgggcccaggaggggtcagagcccgtcctgctggagggggagtgcctggtggtctgtgagcctggccgagctgctgcaggggggcccgggggagcagccctgggagaggcaccccctgggcgagtggcatttgctgcggtccgaagccaccaccatgagccagcaggggaaaccggcaatggcaccagtggggccatctacttcgaccaggtcctggtgaacgagggcggtggctttgaccgggcctctggctccttcgtagcccctgtccggggtgtctacagcttccggttccatgtggtgaaggtgtacaaccgccaaactgtccaggtgagcctgatgctgaacacgtggcctgtcatctcagcctttgccaatgatcctgacgtgacccgggaggcagccaccagctctgtgctactgcccttggaccctggggaccgagtgtctctgcgcctgcgtcgggggaatctactgggtggttggaaatactcaagtttctctggcttcctcatcttccctctctgaggacccaagtctttcaagcacaagaatccagcccctgacaactttcttctgccctctcttgccccagaaacagcagaggcaggagagagactccctctggctcctatcccacctctttgcatgggaccctgtgccaaacacccaagtttaagagaagagtagagctgtggcatctccagaccaggcctttccacccacccacccccagttaccctcccagccacctgctgcatctgttcctgcctgcagccctaggatcagggcaaggtttggcaagaaggaagatctgcactactttgcggcctctgctcctccggttcccccaccccagcttcctgctcaatgctgatcagggacaggtggcgcaggtgagcctgacaggcccccacaggagcccagatggacaagcctcagcgtaccctgcaggcttcttcctgtgaggaaagccagcatcacggatctcagccagcaccgtcagaagctgaaccagcaccgtatgggctagggtgggaggctcagccacaggcagaagggtgggaagggcctggagtctgtggctggtgaggaaggaaggagggtgtattgtctagactgaacatggtacacattctgcatgtatagcagagcagccagcaggtagcaatcctggctgtccttctatgctggatcccagatggactctggcccttacctccccacctgagattagggtgagtgtgtttgctctggctgagagcagagctgagagcaggtatacagagctggaagtggaccatggaaaacatcgataaccatgcatcctcttgcttggccacctcctgaaactgctccacctttgaagtttgaactttagtccctccacactctgactgctgcctccttcctcccagctctctcactgagttatcttcactgtacctgttccagcatatccccactatctctctttctcctgatctgtgctgtcttattctcctccttaggcttcctattacctgggattccatgattcattccttcagaccctctcctgccagtatgctaaaccctccctctctctttcttatcccgctgtcccattggcccagcctggatgaatctatcaataaaacaactagagaatggtggtcagtgagacactatagaattactaaggagaagatgcctctggagtttggatcgggtgttacaggtacaagtaggtatgttgcagaggaaaataaatatcaaactgtatactaaaattacattttaaaa

SEQ ID NO: 3314 - DNA, 718 bp, Homo sapiens
  source 1..718: mol_type = unassigned DNA; mol_type = unassigned DNA
gatgggggagagaaggcgttcaccttggctctgctggcgttttccttggggccctccagctgcagccagatgtgggggttgtccggacagtccttcggaaggacgctcacccccacgctgaagatgcgctccacatggggctgctgttcccgaaccttgttctcagcctccgcagacaccgcaaagcgatctggggacgcggggcgggccccccaggtcctggtgaacgagggcggtggctttgaccgggcctctggctccttcgtagcccctgtccggggtgtctacagcttccggttccatgtggtgaaggtgtacaaccgccaaactgtccaggtgagcctgatgctgaacacgtggcctgtcatctcagcctttgccaatgatcctgacgtgacccgggaggcagccaccagctctgtgctactgcccttggaccctggggaccgagtgtctctgcgcctgcgtcgggggaatctactgggtggttggaaatactcaagtttctctggcttcctcatcttccctctctgaggacccaagtctttcaagcacaagaatccagcccctgacaactttcttctgccctctcttgccccagaaacagcagaggcaggagagagactccctctggctcctatcccacctctttgcatgggaccctgtgccaaacacccaagtttaagagaagagtagagctgtggcatctccagaccag

SEQ ID NO: 3315 - DNA, 2656 bp, Homo sapiens
  source 1..2656: mol_type = unassigned DNA; mol_type = unassigned DNA
gggatcagaaaactcgctggttaatgagtggccaagaacatatcagcttaagtttgggaaaaacacacaacagggcattgtgtcagagggtgaccaaagtgactccccagcagatggaccagggaacgaacaggtgacctttgaactgaggccggagtggaagcagcgagggtgtgaagggccgggtgagggtcaaaggcagaagcaagcaggtggggagggttagcgtcatgcctgctaaggagcagtggacgggtcctagcacgtgctgtgagccacccgctgtccagggagcggttacctctgtcttgccagcttcgtggggacagatagttcagctcatcatttatgagacagagaatgggaatttggagggtctgtggctggcctcgtcctgggtgcgcagggggtcacctgaggtgtggtctgaggcctccggggaagggcatttctttgcaggacgcagtttccaggctcaagaacgtggagggaattcctaagggtcgctcttcaccaagagcgcagagccctggtagacctcagcatcgtcacagagaaagctgtgggtgcagaggccttggggacaaggcggggacggaatttcgtatttcagatgaccaaggccaatggccaagtgtgagttcttcaacgcgggcgggagcgtgaaggaccgcatcagcctgcggatgattgaggatgctgagcgcgacgggacgctgaagcccggggacacgattatcgagccgacatccgggaacaccgggatcgggctggccctggctgcggcagtgaggggctatcgctgcatcatcgtgatgccagagaagatgagctccgagaaggtggacgtgctgcgggcactgggggctgagattgtgaggacgcccaccaatgccaggttcgactccccggagtcacacgtgggggtggcctggcggctgaagaacgaaatccccaattctcacatcctagaccagtaccgcaacgccagcaaccccctggctcactacgacaccaccgctgatgagatcctgcagcagtgtgatgggaagctggacatgctggtggcttcagtgggcacgggcggcaccatcacgggcattgccaggaagctgaaggagaagtgtcctggatgcaggatcattggggtggatcccgaagggtccatcctcgcagagccggaggagctgaaccagacggagcagacaacctacgaggtggaagggatcggctacgacttcatccccacggtgctggacaggacggtggtggacaagtggttcaagagcaacgatgaggaggcgttcacctttgcccgcatgctgatcgcgcaagaggggctgctgtgcggtggcagtgctggcagcacggtggcggtggccgtgaaggccgcgcaggagctgcaggagggccagcgctgcgtggtcattctgcccgactcagtgcggaactacatgaccaagttcctgagcgacaggtggatgctgcagaagggctttctgaaggaggaggacctcacggagaagaagccctggtggtggcacctccgtgttcaggagctgggcctgtcagccccgctgaccgtgctcccgaccatcacctgtgggcacaccatcgagatcctccgggagaagggcttcgaccaggcgcccgtggtggatgaggcgggggtaatcctgggaatggtgacgcttgggaacatgctctcgtccctgcttgccgggaaggtgcagccgtcagaccaagttggcaaagtcatctacaagcagttcaaacagatccgcctcacggacacgctgggcaggctctcgcacatcctggagatggaccacttcgccctggtggtgcacgagcagatccagtaccacagcaccgggaagtccagtcagcggcagatggtgttcggggtggtcaccgccattgacttgctgaacttcgtggccgcccaggagcgggaccagaagtgaagtccggagcgctgggcggtgcggagcgggcccgccacccttgcccacttctccttcgctttcctgagccctaaacacacgcgtgattggtaactgcctggcctggcaccgttatccctgcacacggcacagagcatccgtctcccctcgttaacacatggcttcctaaatggccctgtttacggcctatgagatgaaatatgtgattttctctaatgtaacttcctcttaggatgtttcaccaaggaaatattgagagagaagtcggccaggtaggatgaacacaggcaatgactgcgcagagtggattaaaggcaaaagagagaagagtccaggaaggggcggggagaagcctgggtggctcagcatcctccacgggctgcgccgtctgctcggggctgagctggcgggagcagtttgcgtgtttgggttttttaattgagatgaaattcaaataacctaaaaatcaatcacttgaaagtgaacaatcagcggcatttagtacatccagaaagttgtgtaggcaccacctctgtcacgttctggaacattctgtcatcaccccgtgaagcaatcatttcccctcccgtcttcctcctcccctggcaactgctgatcgactttgtgtctctgttgtctaaaataggttttccctgttctggacatttcatataaatggaatcacacaa

SEQ ID NO: 3316 - DNA, 2453 bp, Homo sapiens
  source 1..2453: mol_type = unassigned DNA; mol_type = unassigned DNA
ccgtctccgcctcgccgcagtcggggcagccgctcgcccctcttttccatgtatccgtccagagtttgagcggtgctgaactgtcagcaccatctgtccggtcccagcatgccttctgagaccccccaggcagaagtggggcccacaggctgcccccaccgctcagggccacactcggcgaaggggagcctggagaaggggtccccagaggataaggaagccaaggagcccctgtggatccggcccgatgctccgagcaggtgcacctggcagctgggccggcctgcctccgagtccccacatcaccacactgccccggcaaaatctccaaaaatcttgccagatattctgaagaaaatcggggacacccctatggtcagaatcaacaagattgggaagaagttcggcctgaagtgtgagctcttggccaagtgtgagttcttcaacgcgggcgggagcgtgaaggaccgcatcagcctgcggatgattgaggatgctgagcgcgacgggacgctgaagcccggggacacgattatcgagccgacatccgggaacaccgggatcgggctggccctggctgcggcagtgaggggctatcgctgcatcatcgtgatgccagagaagatgagctccgagaaggtggacgtgctgcgggcactgggggctgagattgtgaggacgcccaccaatgccaggttcgactccccggagtcacacgtgggggtggcctggcggctgaagaacgaaatccccaattctcacatcctagaccagtaccgcaacgccagcaaccccctggctcactacgacaccaccgctgatgagatcctgcagcagtgtgatgggaagctggacatgctggtggcttcagtgggcacgggcggcaccatcacgggcattgccaggaagctgaaggagaagtgtcctggatgcaggatcattggggtggatcccgaagggtccatcctcgcagagccggaggagctgaaccagacggagcagacaacctacgaggtggaagggatcggctacgacttcatccccacggtgctggacaggacggtggtggacaagtggttcaagagcaacgatgaggaggcgttcacctttgcccgcatgctgatcgcgcaagaggggctgctgtgcggtggcagtgctggcagcacggtggcggtggccgtgaaggccgcgcaggagctgcaggagggccagcgctgcgtggtcattctgcccgactcagtgcggaactacatgaccaagttcctgagcgacaggtggatgctgcagaagggctttctgaaggaggaggacctcacggagaagaagccctggtggtggcacctccgtgttcaggagctgggcctgtcagccccgctgaccgtgctcccgaccatcacctgtgggcacaccatcgagatcctccgggagaagggcttcgaccaggcgcccgtggtggatgaggcgggggtaatcctgggaatggtgacgcttgggaacatgctctcgtccctgcttgccgggaaggtgcagccgtcagaccaagttggcaaagtcatctacaagcagttcaaacagatccgcctcacggacacgctgggcaggctctcgcacatcctggagatggaccacttcgccctggtggtgcacgagcagatccagtaccacagcaccgggaagtccagtcagcggcagatggtgttcggggtggtcaccgccattgacttgctgaacttcgtggccgcccaggagcgggaccagaagtgaagtccggagcgctgggcggtgcggagcgggcccgccacccttgcccacttctccttcgctttcctgagccctaaacacacgcgtgattggtaactgcctggcctggcaccgttatccctgcacacggcacagagcatccgtctcccctcgttaacacatggcttcctaaatggccctgtttacggcctatgagatgaaatatgtgattttctctaatgtaacttcctcttaggatgtttcaccaaggaaatattgagagagaagtcggccaggtaggatgaacacaggcaatgactgcgcagagtggattaaaggcaaaagagagaagagtccaggaaggggcggggagaagcctgggtggctcagcatcctccacgggctgcgccgtctgctcggggctgagctggcgggagcagtttgcgtgtttgggttttttaattgagatgaaattcaaataacctaaaaatcaatcacttgaaagtgaacaatcagcggcatttagtacatccagaaagttgtgtaggcaccacctctgtcacgttctggaacattctgtcatcaccccgtgaagcaatcatttcccctcccgtcttcctcctcccctggcaactgctgatcgactttgtgtctctgttgtctaaaataggttttccctgttctggacatttcatataaatggaatcacacaa

SEQ ID NO: 3317 - DNA, 2605 bp, Homo sapiens
  source 1..2605: mol_type = unassigned DNA; mol_type = unassigned DNA
gtgctctgccacgagacattggccggcgccggcctccgcccccgcctctccgccaatcaccgcccgcctgctcccctcgccgtgggtccccgcgaggccgccaccccggggtcgccgtctccgcctcgccgcagtcggggcagccgctcgcccctcttttccatgtatccgtccaggatcccatgacagattctgttgtcacgtctccttacagagtttgagcggtgctgaactgtcagcaccatctgtccggtcccagcatgccttctgagaccccccaggcagaagtggggcccacaggctgcccccaccgctcagggccacactcggcgaaggggagcctggagaaggggtccccagaggataaggaagccaaggagcccctgtggatccggcccgatgctccgagcaggtgcacctggcagctgggccggcctgcctccgagtccccacatcaccacactgccccggcaaaatctccaaaaatcttgccagatattctgaagaaaatcggggacacccctatggtcagaatcaacaagattgggaagaagttcggcctgaagtgtgagctcttggccaagtgtgagttcttcaacgcgggcgggagcgtgaaggaccgcatcagcctgcggatgattgaggatgctgagcgcgacgggacgctgaagcccggggacacgattatcgagccgacatccgggaacaccgggatcgggctggccctggctgcggcagtgaggggctatcgctgcatcatcgtgatgccagagaagatgagctccgagaaggtggacgtgctgcgggcactgggggctgagattgtgaggacgcccaccaatgccaggttcgactccccggagtcacacgtgggggtggcctggcggctgaagaacgaaatccccaattctcacatcctagaccagtaccgcaacgccagcaaccccctggctcactacgacaccaccgctgatgagatcctgcagcagtgtgatgggaagctggacatgctggtggcttcagtgggcacgggcggcaccatcacgggcattgccaggaagctgaaggagaagtgtcctggatgcaggatcattggggtggatcccgaagggtccatcctcgcagagccggaggagctgaaccagacggagcagacaacctacgaggtggaagggatcggctacgacttcatccccacggtgctggacaggacggtggtggacaagtggttcaagagcaacgatgaggaggcgttcacctttgcccgcatgctgatcgcgcaagaggggctgctgtgcggtggcagtgctggcagcacggtggcggtggccgtgaaggccgcgcaggagctgcaggagggccagcgctgcgtggtcattctgcccgactcagtgcggaactacatgaccaagttcctgagcgacaggtggatgctgcagaagggctttctgaaggaggaggacctcacggagaagaagccctggtggtggcacctccgtgttcaggagctgggcctgtcagccccgctgaccgtgctcccgaccatcacctgtgggcacaccatcgagatcctccgggagaagggcttcgaccaggcgcccgtggtggatgaggcgggggtaatcctgggaatggtgacgcttgggaacatgctctcgtccctgcttgccgggaaggtgcagccgtcagaccaagttggcaaagtcatctacaagcagttcaaacagatccgcctcacggacacgctgggcaggctctcgcacatcctggagatggaccacttcgccctggtggtgcacgagcagatccagtaccacagcaccgggaagtccagtcagcggcagatggtgttcggggtggtcaccgccattgacttgctgaacttcgtggccgcccaggagcgggaccagaagtgaagtccggagcgctgggcggtgcggagcgggcccgccacccttgcccacttctccttcgctttcctgagccctaaacacacgcgtgattggtaactgcctggcctggcaccgttatccctgcacacggcacagagcatccgtctcccctcgttaacacatggcttcctaaatggccctgtttacggcctatgagatgaaatatgtgattttctctaatgtaacttcctcttaggatgtttcaccaaggaaatattgagagagaagtcggccaggtaggatgaacacaggcaatgactgcgcagagtggattaaaggcaaaagagagaagagtccaggaaggggcggggagaagcctgggtggctcagcatcctccacgggctgcgccgtctgctcggggctgagctggcgggagcagtttgcgtgtttgggttttttaattgagatgaaattcaaataacctaaaaatcaatcacttgaaagtgaacaatcagcggcatttagtacatccagaaagttgtgtaggcaccacctctgtcacgttctggaacattctgtcatcaccccgtgaagcaatcatttcccctcccgtcttcctcctcccctggcaactgctgatcgactttgtgtctctgttgtctaaaataggttttccctgttctggacatttcatataaatggaatcacacaa

SEQ ID NO: 3318 - DNA, 2353 bp, Homo sapiens
  source 1..2353: mol_type = unassigned DNA; mol_type = unassigned DNA
cacgccctcggggtcggtcctcgaggacgcgcagggccccccacccaccaggacgcacgtttcaagctcatcagtaaaggttccttaaattcccgaagggcaagaagttaaccaagtaaaacagcatcggaacaccaggatcccatgacagattctgttgtcacgtctccttacagagtttgagcggtgctgaactgtcagcaccatctgtccggtcccagcatgccttctgagaccccccaggcagaagtggggcccacaggctgcccccaccgctcagggccacactcggcgaaggggagcctggagaaggggtccccagaggataaggaagccaaggagcccctgtggatccggcccgatgctccgagcaggtgcacctggcagctgggccggcctgcctccgagtccccacatcaccacactgccccggcaaaatctccaaaaatcttgccagatattctgaagaaaatcggggacacccctatggtcagaatcaacaagattgggaagaagttcggcctgaagtgtgagctcttggccaagtgtgagttcttcaacgcgggcgggagcgtgaaggaccgcatcagcctgcggatgattgaggatgctgagcgcgacgggacgctgaagcccggggacacgattatcgagccgacatccgggaacaccgggatcgggctggccctggctgcggcagtgaggggctatcgctgcatcatcgtgatgccagagaagatgagctccgagaaggtggacgtgctgcgggcactgggggctgagattgtgaggacgcccaccaatgccaggttcgactccccggagtcacacgtgggggtggcctggcggctgaagaacgaaatccccaattctcacatcctagaccagtaccgcaacgccagcaaccccctggctcactacgacaccaccgctgatgagatcctgcagcagtgtgatgggaagctggacatgctggtggcttcagtgggcacgggcggcaccatcacgggcattgccaggaagctgaaggagaagtgtcctggatgcaggatcattggggtggatcccgaagggtccatcctcgcagagccggaggagctgaaccagacggagcagacaacctacgaggtggaagggatcggctacgacttcatccccacggtgctggacaggacggtggtggacaagtggttcaagagcaacgatgaggaggcgttcacctttgcccgcatgctgatcgcgcaagaggggctgctgtgcggtggcagtgctggcagcacggtggcggtggccgtgaaggccgcgcaggagctgcaggagggccagcgctgcgtggtcattctgcccgactcagtgcggaactacatgaccaagttcctgagcgacaggtggatgctgcagaagggctttctgaaggaggaggacctcacggagaagaagccctggtggtggcacctccgtgttcaggagctgggcctgtcagccccgctgaccgtgctcccgaccatcacctgtgggcacaccatcgagatcctccgggagaagggcttcgaccaggcgcccgtggtggatgaggcgggggtaatcctgggaatggtgacgcttgggaacatgctctcgtccctgcttgccgggaaggtgcagccgtcagaccaagttggcaaagtcatctacaagcagttcaaacagatccgcctcacggacacgctgggcaggctctcgcacatcctggagatggaccacttcgccctggtggtgcacgagcagatccagtaccacagcaccgggaagtccagtcagcggcagatggtgttcggggtggtcaccgccattgacttgctgaacttcgtggccgcccaggagcgggaccagaagtgaagtccggagcgctgggcggatgtttcaccaaggaaatattgagagagaagtcggccaggtaggatgaacacaggcaatgactgcgcagagtggattaaaggcaaaagagagaagagtccaggaaggggcggggagaagcctgggtggctcagcatcctccacgggctgcgccgtctgctcggggctgagctggcgggagcagtttgcgtgtttgggttttttaattgagatgaaattcaaataacctaaaaatcaatcacttgaaagtgaacaatcagcggcatttagtacatccagaaagttgtgtaggcaccacctctgtcacgttctggaacattctgtcatcaccccgtgaagcaatcatttcccctcccgtcttcctcctcccctggcaactgctgatcgactttgtgtctctgttgtctaaaataggttttccctgttctggacatttcatataaatggaatcacacaa

SEQ ID NO: 3319 - DNA, 2583 bp, Homo sapiens
  source 1..2583: mol_type = unassigned DNA; mol_type = unassigned DNA
tcccgggcccgcgacacacgccctcggggtcggtcctcgaggacgcgcagggccccccacccaccaggacgcacgtttcaagctcatcagtaaaggttccttaaattcccgaagggcaagaagttaaccaagtaaaacagcatcggaacaccaggatcccatgacagattctgttgtcacgtctccttacagagtttgagcggtgctgaactgtcagcaccatctgtccggtcccagcatgccttctgagaccccccaggcagaagtggggcccacaggctgcccccaccgctcagggccacactcggcgaaggggagcctggagaaggggtccccagaggataaggaagccaaggagcccctgtggatccggcccgatgctccgagcaggtgcacctggcagctgggccggcctgcctccgagtccccacatcaccacactgccccggcaaaatctccaaaaatcttgccagatattctgaagaaaatcggggacacccctatggtcagaatcaacaagattgggaagaagttcggcctgaagtgtgagctcttggccaagtgtgagttcttcaacgcgggcgggagcgtgaaggaccgcatcagcctgcggatgattgaggatgctgagcgcgacgggacgctgaagcccggggacacgattatcgagccgacatccgggaacaccgggatcgggctggccctggctgcggcagtgaggggctatcgctgcatcatcgtgatgccagagaagatgagctccgagaaggtggacgtgctgcgggcactgggggctgagattgtgaggacgcccaccaatgccaggttcgactccccggagtcacacgtgggggtggcctggcggctgaagaacgaaatccccaattctcacatcctagaccagtaccgcaacgccagcaaccccctggctcactacgacaccaccgctgatgagatcctgcagcagtgtgatgggaagctggacatgctggtggcttcagtgggcacgggcggcaccatcacgggcattgccaggaagctgaaggagaagtgtcctggatgcaggatcattggggtggatcccgaagggtccatcctcgcagagccggaggagctgaaccagacggagcagacaacctacgaggtggaagggatcggctacgacttcatccccacggtgctggacaggacggtggtggacaagtggttcaagagcaacgatgaggaggcgttcacctttgcccgcatgctgatcgcgcaagaggggctgctgtgcggtggcagtgctggcagcacggtggcggtggccgtgaaggccgcgcaggagctgcaggagggccagcgctgcgtggtcattctgcccgactcagtgcggaactacatgaccaagttcctgagcgacaggtggatgctgcagaagggctttctgaaggaggaggacctcacggagaagaagccctggtggtggcacctccgtgttcaggagctgggcctgtcagccccgctgaccgtgctcccgaccatcacctgtgggcacaccatcgagatcctccgggagaagggcttcgaccaggcgcccgtggtggatgaggcgggggtaatcctgggaatggtgacgcttgggaacatgctctcgtccctgcttgccgggaaggtgcagccgtcagaccaagttggcaaagtcatctacaagcagttcaaacagatccgcctcacggacacgctgggcaggctctcgcacatcctggagatggaccacttcgccctggtggtgcacgagcagatccagtaccacagcaccgggaagtccagtcagcggcagatggtgttcggggtggtcaccgccattgacttgctgaacttcgtggccgcccaggagcgggaccagaagtgaagtccggagcgctgggcggtgcggagcgggcccgccacccttgcccacttctccttcgctttcctgagccctaaacacacgcgtgattggtaactgcctggcctggcaccgttatccctgcacacggcacagagcatccgtctcccctcgttaacacatggcttcctaaatggccctgtttacggcctatgagatgaaatatgtgattttctctaatgtaacttcctcttaggatgtttcaccaaggaaatattgagagagaagtcggccaggtaggatgaacacaggcaatgactgcgcagagtggattaaaggcaaaagagagaagagtccaggaaggggcggggagaagcctgggtggctcagcatcctccacgggctgcgccgtctgctcggggctgagctggcgggagcagtttgcgtgtttgggttttttaattgagatgaaattcaaataacctaaaaatcaatcacttgaaagtgaacaatcagcggcatttagtacatccagaaagttgtgtaggcaccacctctgtcacgttctggaacattctgtcatcaccccgtgaagcaatcatttcccctcccgtcttcctcctcccctggcaactgctgatcgactttgtgtctctgttgtctaaaataggttttccctgttctggacatttcatataaatggaatcacacaa

SEQ ID NO: 3320 - DNA, 573 bp, Homo sapiens
  source 1..573: mol_type = unassigned DNA; mol_type = unassigned DNA
gggcctgtcagccccgctgaccgtgctcccgaccatcacctgtgggcacaccatcgagatcctccgggagaagggcttcgaccaggcgcccgtggtggatgaggcgggggtaatcctgggaatggtgacgcttgggaacatgctctcgtccctgcttgccgggaaggtgcagccgtcagaccaagttggcaaagtcatctacaagcagttcaaacagatccgcctcacggacacgctgggcaggctctcgcacatcctggagatggaccacttcgccctggtggtgcacgagcagatccagtcgcaggaccaggcctgggcaggcgtggtgggggggcctgcagaccacagcaccgggaagtccagtcagcggcagatggtgttcggggtggtcaccgccattgacttgctgaacttcgtggccgcccaggagcgggaccagaagtgaagtccggagcgctgggcggtgcggagcgggcccgccacccttgcccacttctccttcgctttcctgagccctaaacacacgcgtgattggtaactgcctggcctggcaccgttatccctgcacac

SEQ ID NO: 3321 - DNA, 1038 bp, Homo sapiens
  source 1..1038: mol_type = unassigned DNA; mol_type = unassigned DNA
ggcctggctggtgggtgcccccagttgggttccccagtgtggggtgattcacatctggtgcccagggtcaagatgccctgtgcagggctcctgcccacccccgtcagtgcaagaacaccatctccccacatacttggccagcctgccatgtgtacctgtgcgtgtgagtgtgtgaggggcagagagcgagcatgagaggacgtgtttatctgagtgcctgagcgatggctgtgtgcatgctcacacacgcttgttggccatgggggcgggaagtccagcccccaggcttccccctggggcttccagccagcacttgggggtctctgctgcaccagtgaggtccaggagaggggctgggcaggcagtgcgtgccactcagcaggggcgggggcccggtggggccctgcggggactcggtgactcccccatcccgcaggaccaagttcctgagcgacaggtggatgctgcagaagggctttctgaaggaggaggacctcacggagaagaagccctggtggtggcacctccgtgttcaggagctgggcctgtcagccccgctgaccgtgctcccgaccatcacctgtgggcacaccatcgagatcctccgggagaagggcttcgaccaggcgcccgtggtggatgaggcgggggtaatcctgggaatggtgacgcttgggaacatgctctcgtccctgcttgccgggaaggtgcagccgtcagaccaagttggcaaagtcatctacaagcagttcaaacagatccgcctcacggacacgctgggcaggctctcgcacatcctggagatggaccacttcgccctggtggtgcacgagcagatccagtaccacagcaccgggaagtccagtcagcggcagatggtgttcggggtggtcaccgccattgacttgctgaacttcgtggccgcccaggagcgggaccagaagtgaagtccggagcgctgggcggtgcggagcgggcccgccacccttgcccacttctccttcgctttcctgagccctaaacacacgcgtgattggt

SEQ ID NO: 3322 - DNA, 1515 bp, Homo sapiens
  source 1..1515: mol_type = unassigned DNA; mol_type = unassigned DNA
gtggccgtgaaggccgcgcaggagctgcaggagggccagcgctgcgtggtcattctgcccgactcagtgcggaactacatgaccaagttcctgagcgacaggtggatgctgcagaagggctttctgaaggaggaggacctcacggagaagaagccctggtggtggcacctccgtgttcaggagctgggcctgtcagccccgctgaccgtgctcccgaccatcacctgtgggcacaccatcgagatcctccgggagaagggcttcgaccaggcgcccgtggtggatgaggcgggggtaatcctgggaatggtgacgcttgggaacatgctctcgtccctgcttgccgggaaggtgcagccgtcagaccaagttggcaaagtcatctacaagcagttcaaacagatccgcctcacggacacgctgggcaggctctcgcacatcctggagatggaccacttcgccctggtggtgcacgagcagatccagtcgcaggaccaggcctgggcaggcgtggtgggggggcctgcaggtaggtatcacccacccctcagaatggctctcaggctcagattcacagcctccccatggcaaatggaggccttccagggtcctggacccacccccaagcttgggtaggagggatccccctcttaatctcacatttacttgtgtttgaacatctcagaaaaaaaaaaagatgcaaattccaatgtcagggtccccaaatcaagtcttcctggagcatgtccacgcttgtcaccaccgtctgtggctgctttcaagcacgtcagggctgcgtgctcataacagagacggcacggcccccaagacctaaaataccaccagctggcccttgtcggaaagtcccctggctggccctagtccattgactctgggccgagctgccagggccacagaagcctgcggcactcagggctcccagggctcccttctccaacagttgctgtgcctccgtttccccaaaatgcaaggagctgatctcatctgtgttccctatcttttcctggggctctaagtgggccaccccaagggacctctgcctacaaagagaggagtgacagccgtggcggagttgggacgggctccgagggctcttcctcacccgcaccttgctcacccctctgtgcctcatgacagctggtgtagggtcctgtggagacgcaggaccaagaggatgtgtggggagcggggagagagagggaacgagatctgtgttaaggaactggatcatgagatcacggaggctgacaaaccctgagatctgcagggtgaggcggcaggccggagactggagagccagcagttcaagccccaaggcaggaaattccacctttggttctattcaggccttcaactgcttgggtgaggccctccacagtagcacacgttatctgcctcttgactcttgtgctaatccggaatcccctcacacatgcccagaacgacgtgtgaccaatgcctgggctcccacggccccgttaatctgtattaaaa

SEQ ID NO: 3323 - DNA, 676 bp, Homo sapiens
  source 1..676: mol_type = unassigned DNA; mol_type = unassigned DNA
gtgttcaggagctgggcctgtcagccccgctgaccgtgctcccgaccatcacctgtgggcacaccatcgagatcctccgggagaagggcttcgaccaggcgcccgtggtggatgaggcgggggtaatcctgggaatggtgacgcttgggaacatgctctcgtccctgcttgccgggaaggtgcagccgtcagaccaagttggcaaagtcatctacaagcagttcaaacagatccgcctcacggacacgctgggcaggctctcgcacatcctggagatggaccacttcgccctggtggtgcacgagcagatccagtcgcaggaccaggcctgggcaggcgtggtgggggggcctgcagaaaaaaaaaaagatgcaaattccaatgtcagggtccccaaatcaagtcttcctggagcatgtccacgcttgtcaccaccgtctgtggctgctttcaagcacgtcagggctgcgtgctcataacagagacggcacggcccccaagacctaaaataccaccagctggcccttgtcggaaagtcccctggctggccctagtccattgactctgggccgagctgccagggccacagaagcctgcggcactcagggctcccagggctcccttctccaacagttgctgtgcctccgtttccccaaaatgcaaggagctgatctca

SEQ ID NO: 3324 - DNA, 828 bp, Homo sapiens
  source 1..828: mol_type = unassigned DNA; mol_type = unassigned DNA
gtggcagtgctggcagcacggtggcggtggccgtgaaggccgcgcaggagctgcaggagggccagcgctgcgtggtcattctgcccgactcagtgcggaactacatgaccaagttcctgagcgacaggtggatgctgcagaagggctttctgaaggaggaggacctcacggagaagaagccctggtggtggcacctccgtgttcaggagctgggcctgtcagccccgctgaccgtgctcccgaccatcacctgtgggcacaccatcgagatcctccgggagaagggcttcgaccaggcgcccgtggtggatgaggcgggggtaatcctgggaatggtgacgcttgggaacatgctctcgtccctgcttgccgggaaggtgcagccgtcagaccaagttggcaaagtcatctacaagcagttcaaacagatccgcctcacggacacgctgggcaggctctcgcacatcctggagatggaccacttcgccctggtggtgcacgagcagatccagtcgcaggaccaggcctgggcaggcgtggtgggggggcctgcagggtccccaaatcaagtcttcctggagcatgtccacgcttgtcaccaccgtctgtggctgctttcaagcacgtcagggctgcgtgctcataacagagacggcacggcccccaagacctaaaataccaccagctggcccttgtcggaaagtcccctggctggccctagtccattgactctgggccgagctgccagggccacagaagcctgcggcactcagggctcccagggctcccttctccaacagttgctgtgcctccgtttccccaaaatgc

SEQ ID NO: 3325 - DNA, 673 bp, Homo sapiens
  source 1..673: mol_type = unassigned DNA; mol_type = unassigned DNA
gttttaggggtcgagtgtcactgagcaaagactgggctggggtgccccaggctgcctgtttctgaggctttcacagaccaagggcagcaacgagggctgctccaactggagaagaagtttttcttttgaactttttggttacccaccgtggtttgggctgagtgtgttttcaatgattattactatgagtgatgggctggccaggcagggacccaagaatgttatccgtccaccagggaagctggacatgctggtggcttcagtgggcacgggcggcaccatcacgggcattgccaggaagctgaaggagaagtgtcctggatgcaggatcattggggtggatcccgaagggtccatcctcgcagagccggaggagctgaaccagacggagcagacaacctacgaggtggaagggatcggctacgacttcatccccacggtgctggacaggacggtggtggacaagtggttcaagagcaacgatgaggaggcgttcacctttgcccgcatgctgatcgcgcaagaggggctgctgtgcggtggcagtgctggcagcacggtggcggtggccgtgaaggccgcgcaggagctgcaggagggccagcgctgcgtggtcattctgcccgactcagtgcggaactacatgaccaagttcctgagcgacaggtggatg

SEQ ID NO: 3326 - DNA, 773 bp, Homo sapiens
  source 1..773: mol_type = unassigned DNA; mol_type = unassigned DNA
tcttgggtttctcatcctgcctctgaggctgggaacaggccaccacccacaggcagatcattaacaggcagttgttaacggcggtattggccactcccataatagaatatcgaggcatgtccaggcggggcttttgctggccttgagccctgaagccgcgccctctgcagatcattggggtggatcccgaagggtccatcctcgcagagccggaggagctgaaccagacggagcagacaacctacgaggtggaagggatcggctacgacttcatccccacggtgctggacaggacggtggtggacaagtggttcaagagcaacgatgaggaggcgttcacctttgcccgcatgctgatcgcgcaagaggggctgctgtgcggtgagtgggtggcgggcacgggggtatggggaaggcagagatggctagggggcactggggatggctgggggcgcaccctcagtcagccaccgacctgcatgtgtaagacagcagttctgaggagtgtcactgcggcggccacgagcctcaggtgttgtctgcctgcccagtgtggtcacctgctcaggtgagggcaggaggccatggggcggggcttcgagctgccttccagaatgtgtttctagaacaaggctgaagctctcatggcacttattgtttctaatcaagtccaccagggcccctggggcggtggctctgcattgacggggcccatggccgggactgggtgctgcgagcaccctggagcagctggggaggggactggagcctga

SEQ ID NO: 3327 - DNA, 819 bp, Homo sapiens
  source 1..819: mol_type = unassigned DNA; mol_type = unassigned DNA
agttcctgccagtggacatttaattctaattcacgtctcactccctcccctactgtgagccccacgtggcagagaccgcggcggagctgcgcgggccggaggaggctgcggagcatcgctctgacctgagccggggacgctgcggaggcgcagcacgttcctctgcccagagctgatgggcaccgtccgtgtctttcgctgcaggatcccatgacagattctgttgtcacgtctccttacagagtttgagcggtgctgaactgtcagcaccatctgtccggtcccagcatgccttctgagaccccccaggcagaagtggggcccacaggctgcccccaccgctcagggccacactcggcgaaggggagcctggagaaggggtccccagaggataaggaagccaaggagcccctgtggatccggcccgatgctccgagcaggtgcacctggcagctgggccggcctgcctccgagtccccacatcaccacactgccccggcaaaatctccaaaaatcttgccagatattctgaagaaaatcggggacacccctatggtcagaatcaacaagattgggaagaagttcggcctgaagtgtgagctcttggccaagtgtgagttcttcaacgcgggcgggagcgtgaaggaccgcatcagcctgcggatgattgaggatgctgagcgcgacgggacgctgaagcccggggacacgattatcgagccgacatccgggaacaccgggatcgggctggccctggctgcggcagtgaggggctatcgctgcatcatcgtgatgccagagaagatgagctccgagaag

SEQ ID NO: 3328 - DNA, 894 bp, Homo sapiens
  source 1..894: mol_type = unassigned DNA; mol_type = unassigned DNA
gtgctctgccacgagacattggccggcgccggcctccgcccccgcctctccgccaatcaccgcccgcctgctcccctcgccgtgggtccccgcgaggccgccaccccggggtcgccgtctccgcctcgccgcagtcggggcagccgctcgcccctcttttccatgtatccgtccaggatcccatgacagattctgttgtcacgtctccttacagagtttgagcggtgctgaactgtcagcaccatctgtccggtcccagcatgccttctgagaccccccaggcagaagtggggcccacaggctgcccccaccgctcagggccacactcggcgaaggggagcctggagaaggggtccccagaggataaggaagccaaggagcccctgtggatccggcccgatgctccgagcaggtgcacctggcagctgggccggcctgcctccgagtccccacatcaccacactgccccggcaaaatctccaaaaatcttgccagatattctgaagaaaatcggggacacccctatggtcagaatcaacaagattgggaagaagttcggcctgaagtgtgagctctggcatttctttgcaggacgcagtttccaggctcaagaacgtggagggaattcctaagggtcgctcttcaccaagagcgcagagccctggtagacctcagcatcgtcacagagaaagctgtgggtgcagaggccttggggacaaggcggggacggaatttcgtatttcagatgaccaaggccaatggccaagtgtgagttcttcaacgcgggcgggagcgtgaaggaccgcatcagcctgcggatgattgaggatgctgagcgcgacgggacgctgaagcccggggacacgattatcgagccgacatccgggaacaccg

SEQ ID NO: 3329 - DNA, 683 bp, Homo sapiens
  source 1..683: mol_type = unassigned DNA; mol_type = unassigned DNA
gtgggtccccgcgaggccgccaccccggggtcgccgtctccgcctcgccgcagtcggggcagccgctcgcccctcttttccatgtatccgtccaggatcccatgacagattctgttgtcacgtctccttacagagtttgagcggtgctgaactgtcagcaccatctgtccggtcccagcatgccttctgagaccccccaggcagaagtggggcccacaggctgcccccaccgctcagggccacactcggcgaaggggagcctggagaaggggtccccagaggataaggaagccaaggagcccctgtggatccggcccgatgctccgagcaggtgcacctggcagctgggccggcctgcctccgagtccccacatcaccacactgccccggcaaaatctccaaaaatcttgccagatattctgaagaaaatcggggacacccctatggtcagaatcaacaagattgggaagaagttcggcctgaagtgtgagctctgtgagtgccctggctttggagaggggcttcctccatctacactgggctccgtgggcctggggggtcctggggggtcctgggatggatcccttaggcaaggccctgggatcagaaaactcgctggttaatgagtggccaagaacatatcagcttaagtttgggaaaaacacacaacagggcattgtgtc

SEQ ID NO: 3330 - DNA, 672 bp, Homo sapiens
  source 1..672: mol_type = unassigned DNA; mol_type = unassigned DNA
cggcctcccaaagtgctgggattacaggcgtgagccaccgcgcccggcctatttgttacaattaatgagccaattccacgatcacataaccattgttgacattaaccaaagtccgcgcttgagtcagatttgcagagttttctcctcactgcccttttctattccaggatcccatgacagattctgttgtcacgtctccttacagagtttgagcggtgctgaactgtcagcaccatctgtccggtcccagcatgccttctgagaccccccaggcagaagtggggcccacaggctgcccccaccgctcagggccacactcggcgaaggggagcctggagaaggggtccccagaggataaggaagccaaggagcccctgtggatccggcccgatgctccgagcaggtgcacctggcagctgggccggcctgcctccgagtccccacatcaccacactgccccggcaaaatctccaaaaatcttgccagatattctgaagaaaatcggggacacccctatggtcagaatcaacaagattgggaagaagttcggcctgaagtgtgagctctgtgagtgccctggctttggagaggggcttcctccatctacactgggctccgtgggcctggggggtcctggggggtcctgggatggatcccttaggcaaggccctg

SEQ ID NO: 3331 - DNA, 727 bp, Homo sapiens
  source 1..727: mol_type = unassigned DNA; mol_type = unassigned DNA
taaaggttccttaaattcccgaagggcaagaagttaaccaagtaaaacagcatcggaacaccaggtgagatccggccccaccgagactcgctcccctctctggacagaggatctcaactgggtcccggtttccctctccgcgcctccgcccagagttgcatcatctgcaccgaaaggcggcgagacagggtctcccaagacccccgccccaccggcgcccacgcctgcggtcttgaccgcccagaagatgggggctggccgtgcacgtggccccgggctcccaccccagcccccgcgccggcggagtggaccccactggcggcgagtcctggagcgtggagcagggacgcggggtgggaatccgggggagatgcacgtttcggtgcccagcattgagttcgctgcattgtggatgggaaatggctgtttgcaaatcgccctttttggcggaccgtgtggggtggcggtaaacgctgtcgttgcgcgggcggcacgcgaggtgggtgcccgctgggggagggacgcggggctctgcccaggttgcgttcgggggatggaggttttcctgggacctcacttccctgagccccaggcgagaccgcagctgagctgtaggatgcaagcgggaggcggagcgtgggtgggagagcggagcgcgaaattctcggcttcccgaggatcttctgggcttacttgtccccagctttgtcccaaagtgtcgcttccg

SEQ ID NO: 3332 - DNA, 1554 bp, Homo sapiens
  source 1..1554: mol_type = unassigned DNA; mol_type = unassigned DNA
cacaattatcaccgggtatttaggtgctgggaagacaacacttctgaactatattttgacagagcaacatagtaaaagagtagcggtcattttaaatgaatctggggaaggaagtgcgctggagaaatccttagctgtcagccaaggtggagagctctatgaagagtggctggaacttagaaacggttgcctctgctgttcagtgaaggacaatggccttagagctattgagaatttgatgcaaaagaaggggaaatttgatgacatactgttagagaccactggattagcagaccctggtgcagtggcttctatgttttgggttgatgccgaattagggagtgatatttaccttgatggtatcataactattgtggattcaaaatatggattaaaagtgaaataccactaaaggcagaagagaatgaaatcatcccacccactgacccgttcccaatctgagcatatggatagggcccaaagcacatttaacagaagagaaacctgatggccttatcaatgaagctactaggcaagttgctttggcagatatcattctcattaataaaacagacttggtcccagaagaagatgtaaagaaattaagaacgacacttagatccataaatggactaggacaaatcttagaaacacaaagatcaagagttgatctctctaatgtattagatcttcatgcctttgatagtctctctggaataagtttgcagaaaaaacttcagcatgtgccaggaacacaacctcaccttgatcagagtattgttacaatcacatttgacgtaccaggaaatgcaaaggaagaacatcttaatatgtttattcagaatcttctgtgggaaaagaatgtgagaaacaaggacaatcactgcatggaggtcataaggctgaagggattggtgtcaatcaaagacaaatcacaacaagtgattgtccagggtgtccatgagctctgtgatctggaggagactccagtgagctggaaggatgacactgagagaacaaatcgattggtcctcattggcagaaatttagataaggatatccttaaacagctgtttatagctactgtgacagaaacagaaaagcagtggacaacacatttcaaagaagatcaagtttgtacataacactagaggcatttcttatcaaaaggattggataataaaaataagtttctactgggtatatttcaagcatttatttattactttagttacgaattccaatatactttaaaatggtatttgttttacagcatacataaaatgtagcaaatcagtactgtaaaacatttaacattcatacaattatatacaatatccttttttttaaagaatggtatttcacaaaaatatcttttgaaattggctttggagtttacatatactgaacatgaaagtttataataatgatgatacaactttcaacattgtcattttttcttagaacttcagctgattgcagagatataatgattacattgttattaaatttttttaacacaagtaagtgtcaccattttatgacatgaaataa

SEQ ID NO: 3333 - DNA, 2996 bp, Homo sapiens
  source 1..2996: mol_type = unassigned DNA; mol_type = unassigned DNA
tccccctcccgtcctgtccccatcagtgttgaaatgtatgctacagttattatggttgtaatttgttatgccatgttgatcttcttgtgcttttcatatcagaacaatgtatttttaacattctgactttctttttctctcaattggtaactgactatatagaaaatttatatttatggatactatttcttttttaataagttcaagggaaaacattgataaaggaaaatttatcctttcaactttctttaggtgccagcattattttcatattaggaagcaggagaaagttaaggaactctaaacaatactagaatggttatatatatatttaagtttgtattaaacctgttggaatggtaaagaaatttactgacatatttaaccatacaaaatagtgttgctaaaagactagtttttctctttattctgtgcatatgtatatatatgaatgtgtgtttttttttaagaaattttaaaaaaacttaatctgccagcttttctctattggaatttgcgaacaacttgtaaaattggaattacagaatattagaatagtcagttatggaaagtcacttcattatccttgtgtcactaaataacgtataaagttaaatcagaagtgtattcatctctgaatttctaatcagttgtttttagtttgcagaaaaaacttcagcatgtgccaggaacacaacctcaccttgatcagagtattgttacaatcacatttgacgtaccaggaaatgcaaaggaagaacatcttaatatgtttattcagaatcttctgtgggaaaagaatgtgagaaacaaggacaatcactgcatggaggtcataaggctgaaggtacagtttactgttgcagacttttggacaaagtccttttcttggctgttataaaaactatatttggttttaaacagaaacactggttttagtacaaatcatctttgtctactttcatttttctttattattttcatgactgaaaaggagctttggaaatcactgcataaggcttgatttatttgcacaactttctttagggttgcagctagaacaaacctgtgtgctttgaaatgttaccttctgctctctgttcccaagtacagagaaataatgttgcaaatctcacttctgctgaacattatgcttcctgatgcatttagcagacactaaacatttgttgtactctaaacaaagttacaaaggactagaagaattcttgttctgtatttagaaacccactcacattacttgatatttgggtatttaagtcatgaaaggtatttcttctaggaagcagtgattctaaagtgtatgcttaaccagtcagttgagtgtctactcttgtgtgttcacaagtgtgcacaaagtttttggtaaattaagaatattatttcaaataaattaatttcatccccataggagccagtttatcagataattcgtttctcatttctgcaaatcaatacacaatgagctcatattcagataaattgagctcatatccagataaatataatagtttttctttatttcaacattgttcattgattgcaacccatttctaaaacaaattatttaatataaccaaactcctttaacttctcaacttttcccactaaaactgtgaaacattatataaaatctttaatcaataggatatgatacatatttcatcattttgtttcaggttttggttgtgataaataacactgaaaaaccatcctaatatatgtattaactttatcattagaaaaggggattgttcaaaaaaaaaatcaatacacagaaaccttttttgaaaattaaaaacattaagaaacttcttgtaattcacaaataattggaattaagtaattttctcagcttaagagtttgtattttttaagtgaatatcagtaattaatccattaacattgatgctctatttctgcttttaagtttgaactgaggctgattaatgttcagtcaattctcctttgagcagggattggtgtcaatcaaagacaaatcacaacaagtgattgtccagggtgtccatgagctctgtgatctggaggagactccagtgagctggaaggatgacactgagagaacaaatcgattggtcctcattggtaagtctcaaaggattcacagttttgaaacaaagtgaaaaatatatttgaaagggatatcatgtgccacttaaacagattaaccattcaggtcctcttttaaaactaaataagcttgtggtcaatgtttcatctttgtcacgttacaatgttcgtaaaagcttgttaggacttttgttcttcttcaattttagaaaagtggttaatccaaggaccaatgtgactttgatgtactgacctggaaagttaaagatggaatcactcaattactattctttttgtaaatttttaaacaccataaagcatttaatgaactggaattgataggtgaactgtgtcattttaataagcataatgtaatcacgtcatattttgttttgtttgcaggcagaaatttagataaggatatccttaaacagctgtttatagctactgtgacagaaacagaaaagcagtggacaacacatttcaaagaagatcaagtttgtacataacactagaggcatttcttatcaaaaggattggataataaaaataagtttctactgggtatatttcaagcatttatttattactttagttacgaattccaatatactttaaaatggtatttgttttacagcatacataaaatgtagcaaatcagtactgtaaaacatttaacattcatacaattatatacaatatccttttttttaaagaatggtatttcacaaaaatatcttttgaaattggctttggagtttacatatactgaacatgaaagtttataataatgatgatacaactttcaacattgtcattttttcttagaacttcagctgattgcagagatataatgattacattgttattaaatttttttaacacaa

SEQ ID NO: 3334 - DNA, 1813 bp, Homo sapiens
  source 1..1813: mol_type = unassigned DNA; mol_type = unassigned DNA
gtcccagcggttcagctgaggtagggacgtgctgtaggccggaatgttaccggctgttggatctgtggatgaggaagaggatcctgcggaggaggattgtcctgaattggttcccattgagacgacgcaaagcgaggaggaggaaaagtctggcctcggcgccaagatcccagtcacaattatcaccgggtatttaggtgctgggaagacaacacttctgaactatattttgacagagcaacatagtaaaagagtagcggtcattttaaatgaatctggggaaggaagtgcgctggagaaatccttagctgtcagccaaggtggagagctctatgaagagtggctggaacttagaaacggttgcctctgctgttcagtgaaggacaatggccttagagctattgagaatttgatgcaaaagaaggggaaatttgatgacatactgttagagaccactggattagcagaccctggtatcataactattgtggattcaaaatatggattaaaagtgaaataccactaaaggcagaagagaatgaaatcatcccacccactgacccgttcccaatctgagcatatggatagggcccaaagcagcaaagaattggacaacttaaaatgacagctctctattctgaggacttgacacccgggctactgacattgttcttttcagttctacaaatgtgacagcatttaatgcaatagaagcaatgaatgaagttacccagagaagcatttaacagaagagaaacctgatggccttatcaatgaagctactagatccataaatggactaggacaaatcttagaaacacaaagatcaaggctcagcagctgatagactcagcaacaggcagccaggagctctgaggctcacagctggcagtctagttccactcagtctctacttgagaaattctttctttggaagtacagcagaggccttagagttgatctctctaatgtattagatcttcatgcctttgatagtctctctggaataagtttgcagaaaaaacttcagcatgtgccaggaacacaacctcaccttgatcagagtattgttacaatcacatttgacgtaccaggaaatgcaaaggaagaacatcttaatatgtttattcagaatcttctgtgggaaaagaatgtgagaaacaaggacaatcactgcatggaggtcataaggctgaagggattggtgtcaatcaaagacaaatcacaacaagtgattgtccagggtgtccatgagctctgtgatctggaggagactccagtgagctggaaggatgacactgagagaacaaatcgattggtcctcattggcagaaatttagataaggatatccttaaacagctgtttatagctactgtgacagaaacagaaaagcagtggacaacacatttcaaagaagatcaagtttgtacataacactagaggcatttcttatcaaaaggattggataataaaaataagtttctactgggtatatttcaagcatttatttattactttagttacgaattccaatatactttaaaatggtatttgttttacagcatacataaaatgtagcaaatcagtactgtaaaacatttaacattcatacaattatatacaatatccttttttttaaagaatggtatttcacaaaaatatcttttgaaattggctttggagtttacatatactgaacatgaaagtttataataatgatgatacaactttcaacattgtcattttttcttagaacttcagctgattgcagagatataatgattacattgttattaaatttttttaacacaa

SEQ ID NO: 3335 - DNA, 3334 bp, Homo sapiens
  source 1..3334: mol_type = unassigned DNA; mol_type = unassigned DNA
ttttaaaatgctggtaatggtcttttttttccttttttttttttttcttggcgattttaatgctttggaaaagatctcatggttttatctccaaaggaggaaattaatttgatgccatggaaattagttttctagtcgtatgccttgaatgagtgaagaatttctttttcatggtggtactaaatttggggaaagctatagaaactttcatctggaagcttacacttttcctcttttttgaaaatttggtgagagacttggatattttattattttctgtaaaagagtgtaatttgttatacaggtctaatattgatccttttttggaagtatggaaagaatctgagtataaagcagaattacctctggatggcatgtattctcaaggacactgtcacagtgaaacagtttatttagaagcttgtgtttccaaactgttgaatttgatattcacaaaattggcatgtgtaaactttattaaactttaagctatttcctaagatgaagatgacaaacttggagggaaacttcattcatttggtttatttttatttttatttttatttatttttatctttttgagacagaatctcactctggtttgagacagaatctcactctgtcccccaagttggagtgcggtggtgcgatctcggctcactgaaacctctgcctcctgggttcaagcgattctcctgcttcaccctcccgagtagctgggattacaggtgtgcaccaccacacccagctaatttttgtatttttagtagagacggtttcgccacattggccaggttggtgtcaaactcctggcctcaaagtgatccgcccaccttggcctcccaaagtggagcccccgtgccccttgtttgtgacctgtcaatataaatatgctcagtagcggggggaggggtggggggtgaaaaaggaaatatgtttaatattaagactttggccttttagtgtaaactgatattcaaaaatttcttcatagaacatttgcttctttgcttgatcatttttctaattctgtacatctaaaatgcccagaatttgagttgctgttatagtctactaacatagaactttggagtaataagatgggaatttgtctctcttttgccaagacaagcattcgtaatctaacacagtattgttgccacgagtacgagtatgtgatagactgttgagaataaagaaagcaggcacagttggtcagtcctaagataaaggagatgttttttcttatatgtttgtgcattaaagaaaaaaaaatcttgaatctgaccaatgatgttttttttccttgtaagaaaatttaacaaatgtttggcaagcttctggaatctaaatttgaaattatacatttgtcattttctttaaatatttcttcaccttagctttgattatgagaaatcactgtcctctgctgttctttttttttttttttcttttgaggcggagtctcactctgtgccaggctggagtgcagtggtgcaatctcggctcactgcaacctccacttcctaggttcaaatgattctcctgctgcagcctcccgagtagctgggactacaggtgcgtgccaccacacccagctaatttttgtatttttggtagagacagggtttcaccacgttgtccatggccaggatggtcttgatcttgaccttgtgatccacccgcctcggcctcccaaagtgctgggattgcaggcgtgagccaccgcgcccagcctgtcctctgtgattttctgggcttatgttaaaattataactcaatcaccagtctttataaatttgcttttttatatttaaaccaaacctaatgctaattgtgatatgttatttattctcacctgatttgaatcattggattcaattaaatgagtttaattatcattaagtaattctaagagaaataatgtctattcggatggtgggaattttctttctacatgcagccccattctgaatgaatgaaatcaaatcacgtgaagatcagggtcctagagtaacttaatattttgtacattggttatttgactcctcatttttatattacatgttatatcaagggagggggtataaaagaaatacaaaaattgcagaggtatctggaatgtacctatttgttaattctatttgtcatttcttttgtttcatcttttgagtaataagctgcttggaaaagtttctgttctttagctgattttttagctataaaaatgtatttgaaaagctcataaatttcagcattgaaaagataattgaaagtttaaaaaaaacctaattcattgaagtaataaccaaataattttcaatcttgattcaactgtgattcaaatcttacaccatttgcccacttctatgaattttatgtataaaattttttaagagtcagagtttttttttcttgattaattggatgtatttcacagaatttccaactgctcacgttagttttcttccttttagagttgatctctctaatgtattagatcttcatgcctttgatagtctctctggaataagtttgcagaaaaaacttcagcatgtgccaggaacacaacctcaccttgatcagagtattgttacaatcacatttgacgtaccaggaaatgcaaaggaagaacatcttaatatgtttattcagaatcttctgtgggaaaagaatgtgagaaacaaggacaatcactgcatggaggtcataaggctgaagggattggtgtcaatcaaagacaaatcacaacaagtgattgtccagggtgtccatgagctctgtgatctggaggagactccagtgagctggaaggatgacactgagagaacaaatcgattggtcctcattggcagaaatttagataaggatatccttaaacagctgtttatagctactgtgacagaaacagaaaagcagtggacaacacatttcaaagaagatcaagtttgtacataacactagaggcatttcttatcaaaaggattggataataaaaataagtttctactgggtatatttcaagcatttatttattactttagttacgaattccaatatactttaaaatggtatttgttttacagcatacataaaatgtagcaaatcagtactgtaaaacatttaacattcatacaattatatacaatatccttttttttaaagaatggtatttcacaaaaatatcttttgaaattggctttggagtttacatatactgaacatgaaagtttataataatgatgatacaactttcaacattgtcattttttcttagaacttcagctgattgcagagatataatgattacattgttattaaatttttttaacac

SEQ ID NO: 3336 - DNA, 2561 bp, Homo sapiens
  source 1..2561: mol_type = unassigned DNA; mol_type = unassigned DNA
agtactgttgcttctccattcccgagttagtccatctcctgattgaatttcattgtcaggcagtcttttcaagttacaggtactgcatgcattctttgggttcttatacacttcattgattcaaaatatttgtcttttgtttttatattacttgaaggattacttggctaggtataaaatttatcagtcacacttttttccccctcaactttgtaaatgttgttccataatctcctagtgtttgattggctggatttctttgtccaatgttttctccttttattaggaagaatttgtgagtattatagtctctgagtttcaatgcttgctgttttctttaatgcttgagaatgtctgtctattgctttcgttcctgaaaaataacttgtttgggaacactttcattagaactttgtggtcactgttttattattttgggacatctagtgttactgtagaaaagtctgatttttctccctccctccttgaaggcacttttttttttttaatctaaaatgcctgagagttttcttctttatttttgaaattcagtaatataaacaaggtatatctaagtgtcacttataatcatttttccctaaattataatatgcccttagttcttctaagaacattttccttgtttattaccatgaatacttttttttggtcaaattattagatcctctacttcatgacaccagtttttttaatactgaattttcttttgttcttcgtatgtattctaattgctttgatttgtcttttacctttgcatttactgtgatcatctgaagcctttctttttgtcaataattctgttttctccagtatctgtcctgtttttgatattttaaatgaattaattggttaagtcattgtgttatataggctctaagtttctttagcactacaaactgcattttcatcttattctgcttcttgcttttgagcttgtttattataaggttgtattgttttcaagttcttcattatgatgaagttgttgagaattttctttagtttttattgggttatgtatccttccagaatgggttctttgccacttgtatgccctattcatttcttcattttgtgttctttcttgctttttattccctgtatgtgtgtatttctttttgtcaggctgtaatacatatgcatacatgtttcttcttgatatgggagaacttctatgtggtgctgatgggaaatatttttaatactccactctccttacccaagtttgtttttctcctgagccctagtttgaaagctgtatattgttggagtggagggaaggagaagggaaaagtggtgattcagagagccaaatggggcaatgtggcttttaggctctgctctcttgaagtaccaagtatttcactcttgggtctgcccaactgcttatgaataaaattcctttgccttgtatggggacatcattcgacctcagacctctcatttctctttgttctgagccctagaatgtgacctgaccttctccttcccaaagcatggagatggttaaaactcactcttgaaatttttttgttgacttttccctctgttgcttattcattcctcggctctactttttgccattttggagtgtatttctggtgcagtggcttctatgttttgggttgatgccgaattagggagtgatatttaccttgatggtatcataactattgtggattcaaaatatggattaaaacatttaacagaagagaaacctgatggccttatcaatgaagctactaggcaagttgctttggcagatatcattctcattaataaaacagacttggtcccagaagaagatgtaaagaaattaagaacgacacttagatccataaatggactaggacaaatcttagaaacacaaagatcaaggctcagcagctgatagactcagcaacaggcagccaggagctctgaggctcacagctggcagtctagttccactcagtctctacttgagaaattctttctttggaagtacagcagaggccttagagttgatctctctaatgtattagatcttcatgcctttgatagtctctctggaataagtttgcagaaaaaacttcagcatgtgccaggaacacaacctcaccttgatcagagtattgttacaatcacatttgacgtaccaggaaatgcaaaggaagaacatcttaatatgtttattcagaatcttctgtgggaaaagaatgtgagaaacaaggacaatcactgcatggaggtcataaggctgaagggattggtgtcaatcaaagacaaatcacaacaagtgattgtccagggtgtccatgagctctgtgatctggaggagactccagtgagctggaaggatgacactgagagaacaaatcgattggtcctcattggcagaaatttagataaggatatccttaaacagctgtttatagctactgtgacagaaacagaaaagcagtggacaacacatttcaaagaagatcaagtttgtacataacactagaggcatttcttatcaaaaggattggataataaaaataagtttctactgggta

SEQ ID NO: 3337 - DNA, 1877 bp, Homo sapiens
  source 1..1877: mol_type = unassigned DNA; mol_type = unassigned DNA
gttgagaattttctttagtttttattgggttatgtatccttccagaatgggttctttgccacttgtatgccctattcatttcttcattttgtgttctttcttgctttttattccctgtatgtgtgtatttctttttgtcaggctgtaatacatatgcatacatgtttcttcttgatatgggagaacttctatgtggtgctgatgggaaatatttttaatactccactctccttacccaagtttgtttttctcctgagccctagtttgaaagctgtatattgttggagtggagggaaggagaagggaaaagtggtgattcagagagccaaatggggcaatgtggcttttaggctctgctctcttgaagtaccaagtatttcactcttgggtctgcccaactgcttatgaataaaattcctttgccttgtatggggacatcattcgacctcagacctctcatttctctttgttctgagccctagaatgtgacctgaccttctccttcccaaagcatggagatggttaaaactcactcttgaaatttttttgttgacttttccctctgttgcttattcattcctcggctctactttttgccattttggagtgtatttctggtgcagtggcttctatgttttgggttgatgccgaattagggagtgatatttaccttgatggtatcataactattgtggattcaaaatatggattaaaagtgaaataccactaaaggcagaagagaatgaaatcatcccacccactgacccgttcccaatctgagcatatggatagggcccaaagcagcaaagaattggacaacttaaaatgacagctctctattctgaggacttgacacccgggctactgacattgttcttttcagttctacaaatgtgacagcatttaatgcaatagaagcaatgaatgaagttacccagagaagcatttaacagaagagaaacctgatggccttatcaatgaagctactaggcaagttgctttggcagatatcattctcattaataaaacagacttggtcccagaagaagatgtaaagaaattaagaacgacacttagatccataaatggactaggacaaatcttagaaacacaaagatcaagaacaataaacatgcagtgattgatttttcttacttcaagtggatgagtgagcaagtgactaaaatcttctgtgaattcttcagtgtatggtgcttgccaatgcatctgagaatctagggactttctgaaatagtacttccttgctatgaggactgaagttggattagaatccttttcaatgaagatcagatgtcctgagtagaattcttactattggagttgatctctctaatgtattagatcttcatgcctttgatagtctctctggaataagtttgcagaaaaaacttcagcatgtgccaggaacacaacctcaccttgatcagagtattgttacaatcacatttgacgtaccaggaaatgcaaaggaagaacatcttaatatgtttattcagaatcttctgtgggaaaagaatgtgagaaacaaggacaatcactgcatggaggtcataaggctgaagggattggtgtcaatcaaagacaaatcacaacaagtgattgtccagggtgtccatgagctctgtgatctggaggagactccagtgagctggaaggatgacactgagagaacaaatcgattggtcctcattggcagaaatttagataaggatatccttaaacagctgtttatagctactgtgacagaaacagaaaagcagtggacaacacatttcaaagaagatcaagtttgtacataacactagaggcatttcttatcaaaaggattggataataaaaataagtttctactgggt

SEQ ID NO: 3338 - DNA, 720 bp, Homo sapiens
  source 1..720: mol_type = unassigned DNA; mol_type = unassigned DNA
agaatgaattaaataatgaggaccctttcatcagggtttttgagtgagttttttaaaatacaaggtagtagtttgtgtaaatactaaatccattggtacctgtgcagaatgtaggaaatggagttgctaattccaaaaaaacagcacatatgctgaggaaagtataatacctaatatatatggtttaagcaatgtaaaattccatgaatatgttcctttcatcttaaaatttgtgatttaaaaaacattgatatcactataaagaattattattatttcccttgatttacagagtattgttacaatcacatttgacgtaccaggaaatgcaaaggaagaacatcttaatatgtttattcagaatcttctgtgggaaaagaatgtgagaaacaaggacaatcactgcatggaggtcataaggctgaagggattggtgtcaatcaaagacaaatcacaacaagtgattgtccagggtgtccatgagctctgtgatctggaggagactccagtgagctggaaggatgacactgagagaacaaatcgattggtcctcattggcagaaatttagataaggatatccttaaacagctgtttatagctactgtgacagaaacagaaaagcagtggacaacacatttcaaagaagatcaagtttgtacataacactagaggcatttcttatcaaaaggattggataataaaaataagtttctactggg

SEQ ID NO: 3339 - DNA, 2433 bp, Homo sapiens
  source 1..2433: mol_type = unassigned DNA; mol_type = unassigned DNA
ggcgtgctgggcgtgcgcggctgcggtacggcgtgttggtcccagcggttcagctgaggtagggacgtgctgtaggccggaatgttaccggctgttggatctgtggatgaggaagaggatcctgcggaggaggattgtcctgaattggttcccattgagacgacgcaaagcgaggaggaggaaaagtctggcctcggcgccaagatcccagtcacaattatcaccgggtatttaggtgctgggaagacaacacttctgaactatattttgacagagcaacatagtaaaagagtagcggtcattttaaatgaatctggggaaggaagtgcgctggagaaatccttagctgtcagccaaggtggagagctctatgaagagtggctggaacttagaaacggttgcctctgctgttcagtgaaggacaatggccttagagctattgagaatttgatgcaaaagaaggggaaatttgatgacatactgttagagaccactggattagcagaccctggtgcagtggcttctatgttttgggttgatgccgaattagggagtgatatttaccttgatggtatcataactattgtggattcaaaatatggattaaaagtgaaataccactaaaggcagaagagaatgaaatcatcccacccactgacccgttcccaatctgagcatatggatagggcccaaagcacatttaacagaagagaaacctgatggccttatcaatgaagctactaggcaagttgctttggcagatatcattctcattaataaaacagacttggtcccagaagaagatgtaaagaaattaagaacgacacttagatccataaatggactaggacaaatcttagaaacacaaagatcaagaacaataaacatgcagtgattgatttttcttacttcaagtggatgagtgagcaagtgactaaaatcttctgtgaattcttcagtgtatggtgcttgccaatgcatctgagaatctagggactttctgaaatagtacttccttgctatgaggactgaagttggattagaatccttttcaatgaagatcagatgtcctgagtagaattcttactattgggtcctgaatcttatattaaatattctctcaaattccttgaggcgtgagccaccgcgcccagcctgtcctctgtgattttctgggcttatgttaaaattataactcaatcaccagtctttataaatttgcttttttatatttaaaccaaacctaatgctaattgtgatatgttatttattctcacctgatttgaatcattggattcaattaaatgagtttaattatcattaagtaattctaagagaaataatgtctattcggatggtgggaattttctttctacatgcagccccattctgaatgaatgaaatcaaatcacgtgaagatcagggtcctagagtaacttaatattttgtacattggttatttgactcctcatttttatattacatgttatatcaagggagggggtataaaagaaatacaaaaattgcagaggtatctggaatgtacctatttgttaattctatttgtcatttcttttgtttcatcttttgagtaataagctgcttggaaaagtttctgttctttagctgattttttagctataaaaatgtatttgaaaagctcataaatttcagcattgaaaagataattgaaagtttaaaaaaaacctaattcattgaagtaataaccaaataattttcaatcttgattcaactgtgattcaaatcttacaccatttgcccacttctatgaattttatgtataaaattttttaagagtcagagtttttttttcttgattaattggatgtatttcacagaatttccaactgctcacgttagttttcttccttttagagttgatctctctaatgtattagatcttcatgcctttgatagtctctctggaataagtttgcagaaaaaacttcagcatgtgccaggaacacaacctcaccttgatcagagtattgttacaatcacatttgacgtaccaggaaatgcaaaggaagaacatcttaatatgtttattcagaatcttctgtgggaaaagaatgtgagaaacaaggacaatcactgcatggaggtcataaggctgaagggattggtgtcaatcaaagacaaatcacaacaagtgattgtccagggtgtccatgagctctgtgatctggaggagactccagtgagctggaaggatgacactgagagaacaaatcgattggtcctcattggcagaaatttagataaggatatccttaaacagctgtttatagctactgtgacagaaacagaaaagcagtggacaacacatttcaaagaagatcaagtttgtacataacactagaggcatttcttatcaaaaggattggataataaaaataagtttctactggg

SEQ ID NO: 3340 - DNA, 1979 bp, Homo sapiens
  source 1..1979: mol_type = unassigned DNA; mol_type = unassigned DNA
ttgattttacaggcccataggtggaagggacttgccttgtctcagatgagactttggacttcggactgtggacttttgagttaacactgaaatgaattaatgctgaaatgaattaagactttgggagacggttgagaagccatgactcattttaaaatgtgagacatgcctttcaccttctgccatgattgtgaggcctctccagccatgtggaactgtgaacacacattgttcatcccctcaggaggacacagcttttgagataccatcttggaagcagagaccagccctcactagacacaaacttcctggcaccttgattttggacttcatagcctctagaactgtgctgggaagacaacacttctgaactatattttgacagagcaacatagtaaaagagtagcggtcattttaaatgaatctggggaaggaagtgcgctggagaaatccttagctgtcagccaaggtggagagctctatgaagagtggctggaacttagaaacggttgcctctgctgttcagtgaaggacaatggccttagagctattgagaatttgatgcaaaagaaggggaaatttgatgacatactgttagagaccactggattagcagaccctggtgcagtggcttctatgttttgggttgatgccgaattagggagtgatatttaccttgatggtatcataactattgtggattcaaaatatggattaaaagtgaaataccactaaaggcagaagagaatgaaatcatcccacccactgacccgttcccaatctgagcatatggatagggcccaaagcacatttaacagaagagaaacctgatggccttatcaatgaagctactaggcaagttgctttggcagatatcattctcattaataaaacagacttggtcccagaagaagatgtaaagaaattaagaacgacacttagatccataaatggactaggacaaatcttagaaacacaaagatcaaggctcagcagctgatagactcagcaacaggcagccaggagctctgaggctcacagctggcagtctagttccactcagtctctacttgagaaattctttctttggaagtacagcagaggccttagccactcatctgctggcagaggtagcagaagaatgcccttagtaacaataaacatgcagtgattgatttttcttacttcaagtggatgagtgagcaagtgactaaaatcttctgtgaattcttcagtaatctcactctggtttgagacagaatctcactctgtcccccaagttggagtgcggtggtgcgatctcggctcactgaaacctctgcctcctgggttcaagcgattctcctgcttcaccctcccgagtagctgggattacaggtgtgcaccaccacacccagctaatttttgtatttttagtagagacggtttcgccacattggccagagttgatctctctaatgtattagatcttcatgcctttgatagtctctctggaataagtttgcagaaaaaacttcagcatgtgccaggaacacaacctcaccttgatcagagtattgttacaatcacatttgacgtaccaggaaatgcaaaggaagaacatcttaatatgtttattcagaatcttctgtgggaaaagaatgtgagaaacaaggacaatcactgcatggaggtcataaggctgaagggattggtgtcaatcaaagacaaatcacaacaagtgattgtccagggtgtccatgagctctgtgatctggaggagactccagtgagctggaaggatgacactgagagaacaaatcgattggtcctcattggcagaaatttagataaggatatccttaaacagctgtttatagctactgtgacagaaacagaaaagcagtggacaacacatttcaaagaagatcaagtttgtacataacactagaggcatttcttatcaaaaggattggataataaaaataagtttctactgg

SEQ ID NO: 3341 - DNA, 449 bp, Homo sapiens
  source 1..449: mol_type = unassigned DNA; mol_type = unassigned DNA
ggaagaagtaaggaaaagagcaatatggatgtttaaaaatgagaagagtattgttacaatcacatttgacgtaccaggaaatgcaaaggaagaacatcttaatatgtttattcagaatcttctgtgggaaaagaatgtgagaaacaaggacaatcactgcatggaggtcataaggctgaagggattggtgtcaatcaaagacaaatcacaacaagtgattgtccagggtgtccatgagctctgtgatctggaggagactccagtgagctggaaggatgacactgagagaacaaatcgattggtcctcattggcagaaatttagataaggatatccttaaacagctgtttatagctactgtgacagaaacagaaaagcagtggacaacacatttcaaagaagatcaagtttgtacataacactagaggcatttcttatcaaaaggattgg

SEQ ID NO: 3342 - DNA, 599 bp, Homo sapiens
  source 1..599: mol_type = unassigned DNA; mol_type = unassigned DNA
ccactggattagcagaccctggtgcagtggcttctatgttttgggttgatgccgaattagggagtgatatttaccttgatggtatcataactattgtggattcaaaatatggattaaaagcaaagaattggacaacttaaaatgacagctctctattctgaggacttgacacccgggctactgacattgttcttttcagttctacaaatgtgacagcatttaatgcaatagaagcaatgaatgaagttacccagagaaggtcaacatttaacagaagagaaacctgatggccttatcaatgaagctactaggcaagttgctttggcagatatcattctcattaataaaacagacttggtcccagaagaagatgtaaagaaattaagaacgacacttagatccataaatggactaggacaaatcttagaaacacaaagatcaagaacaataaacatgcagtgattgatttttcttacttcaagtggatgagtgagcaagtgactaaaatcttctgtgaattcttcagtagttgatctctctaatgtattagatcttcatgcctttgatagtctctctggaataagtttgcagaaaaaact

SEQ ID NO: 3343 - DNA, 369 bp, Homo sapiens
  source 1..369: mol_type = unassigned DNA; mol_type = unassigned DNA
gttctacaaatgtgacagcatttaatgcaatagaagcaatgaatgaagttacccagagaagcatttaacagaagagaaacctgatggccttatcaatgaagctactaggcaagttgctttggcagatatcattctcattaataaaacagacttggtcccagaagaagatgtaaagaaattaagaacgacacttagatccataaatggactaggacaaatcttagaaacacaaagatcaagaacaataaacatgcagtgattgatttttcttacttcaagtggatgagtgagcaagtgactaaaatcttctgtgaattcttcagtagttgatctctctaatgtattagatcttcatgcctttgatagtct

SEQ ID NO: 3344 - DNA, 1160 bp, Homo sapiens
  source 1..1160: mol_type = unassigned DNA; mol_type = unassigned DNA
tgccgaattagggagtgatatttaccttgatggtatcataactattgtggattcaaaatatggattaaaagtgaaataccactaaaggcagaagagaatgaaatcatcccacccactgacccgttcccaatctgagcatatggatagggcccaaagcacatttaacagaagagaaacctgatggccttatcaatgaagctactaggcaagttgctttggcagatatcattctcattaataaaacagacttggtcccagaagaagatgtaaagaaattaagaacgacacttaggtacaaaatgatgtgtgttaagtgcctacagatccatattgtatacacagaatgttttttactctgattgttgccctgtagaaacttaaggtataaggttgacctgcttcaagaacgttagggaatcacatatattgttgatggctaattgttatataaatggtaatacataaaattagtccccagtgcttgcagaatatagttcacagttaatagactgatattcagggtcttcgcactccatctttcttttcctgtcttctctttgactctttcctaatgtcagtcttccctaactttacccaggatggttaattcactttcccatggatgcatcctgtcagttcctgtctttactcataatgtattctcactctgccaatccctgagttctttcttgttctgtttttttttttaatttattctatagagcctattctgtctctccccccttcctatgtgaagtcttccctgactcaagtggtctcagttttccctgaactcttgttgacttcatcttccttaactgtcaaccatgcattgtcttccagcttgcttgtatatcttctttgtccatagccaaggctgatcagcataggacaatcaggacaatatgaatgatgctgaaatatgtgctaacagtcattttgctgactgttctggagactcccattccttttgaaaacaaagatggacttttcaaatgaagttatagttcagggactttgttttgaattattttgtaagacctgaactaataaaagccctatacagagagacattcggtagctattattattggttatctttaatgtgtacaatgctttgagcgtgatggctcaaaattactattcttagtatttataag

SEQ ID NO: 3345 - DNA, 452 bp, Homo sapiens
  source 1..452: mol_type = unassigned DNA; mol_type = unassigned DNA
tgttcagtgaaggacaatggccttagagctattgagaatttgatgcaaaagaaggggaaatttgatgacatactgttagagaccactggattagcagaccctggtgcagtggcttctatgttttgggttgatgccgaattagggagtgatatttaccttgatggtatcataactattgtggattcaaaatatggattaaaagcaaagaattggacaacttaaaatgacagctctctattctgaggacttgacacccgggctactgacattgttcttttcagttctacaaatgtgacagcatttaatgcaatagaagcaatgaatgaagttacccagagaagcatttaacagaagagaaacctgatggccttatcaatgaagctactaggcaagttgctttggcagatatcattctcattaataaaacagacttggtcccagaagaagatgta

SEQ ID NO: 3346 - DNA, 1820 bp, Homo sapiens
  source 1..1820: mol_type = unassigned DNA; mol_type = unassigned DNA
gtcaggccccggccaggccgggagtggcgtgctgggcgtgcgcggctgcggtacggcgtgttggtcccagcggttcagctgaggtagggacgtgctgtaggccggaatgttaccggctgttggatctgtggatgaggaagaggatcctgcggaggaggattgtcctgaattggttcccattgagacgacgcaaagcgaggaggaggaaaagtctggcctcggcgccaagatcccagtcacaattatcaccgggtatttagttattcagaggctgctctactgagaagatgaacaaatttcttgtccaaaacaatgtatttcaaacgtgcccctcgggcctttcccgtgttgctcactggtgctgggaagacaacacttctgaactatattttgacagagcaacatagtaaaagagtagcggtcattttaaatgaatctggggaaggaagtgcgctggagaaatccttagctgtcagccaaggtggagagctctatgaagagtggctggaacttagaaacggttgcctctgctgttcagtgaaggacaatggccttagagctattgagaatttgatgcaaaagaaggggaaatttgatgacatactgttagagaccactggattagcagaccctggtgcagtggcttctatgttttgggttgatgccgaattagggagtgatatttaccttgatggtatcataactattgtggattcaaaatatggattaaaacatttaacagaagagaaacctgatggccttatcaatgaagctactaggcaagttgctttggcagatatcattctcattaataaaacagacttggtcccagaagaagatgtaaagaaattaagaacgacacttagatccataaatggactaggacaaatcttagaaacacaaagatcaagagttgatctctctaatgtattagatcttcatgcctttgatagtctctctggaataagtttgcagaaaaaacttcagcatgtgccaggaacacaacctcaccttgatcagagtattgttacaatcacatttgacgtaccaggaaatgcaaaggaagaacatcttaatatgtttattcagaatcttctgtgggaaaagaatgtgagaaacaaggacaatcactgcatggaggtcataaggctgaagggattggtgtcaatcaaagacaaatcacaacaagtgattgtccagggtgtccatgagctctgtgatctggaggagactccagtgagctggaaggatgacactgagagaacaaatcgattggtcctcattggcagaaatttagataaggatatccttaaacagctgtttatagctactgtgacagaaacagaaaagcagtggacaacacatttcaaagaagatcaagtttgtacataacactagaggcatttcttatcaaaaggattggataataaaaataagtttctactgggtatatttcaagcatttatttattactttagttacgaattccaatatactttaaaatggtatttgttttacagcatacataaaatgtagcaaatcagtactgtaaaacatttaacattcatacaattatatacaatatccttttttttaaagaatggtatttcacaaaaatatcttttgaaattggctttggagtttacatatactgaacatgaaagtttataataatgatgatacaactttcaacattgtcattttttcttagaacttcagctgattgcagagatataatgattacattgttattaaatttttttaacacaagtaagtgtcaccattttatgacatgaaataaaaggttatgactgttattg

SEQ ID NO: 3347 - DNA, 721 bp, Homo sapiens
  source 1..721: mol_type = unassigned DNA; mol_type = unassigned DNA
aagggacgaggcagttctcgtccagagcccaggtaatccgggcgggatcagctagcgtcgcgatgtgatgacgtcaggccccggccaggccgggagtggcgtgctgggcgtgcgcggctgcggtacggcgtgttggtcccagcggttcagctgaggtagggacgtgctgtaggccggaatgttaccggctgttggatctgtggatgaggaagaggatcctgcggaggaggattgtcctgaattggttcccattgagacgacgcaaagcgaggaggaggaaaagtctggcctcggcgccaagatcccagtcacaattatcaccgggtatttaggtgctgggaagacaacacttctgaactatattttgacagagcaacatagtaaaagagtagcggtcattttaaatgaatctggggaaggaagtgcgctggagaaatccttagctgtcagccaaggtggagagctctatgaagagtggctggaacttagaaacggttgcctctgctgttcagtgaaggacaatggccttagagctattgagaatttgatgcaaaagaaggggaaatttgatgacatactgttagagaccactggattagcagaccctggtgcagtggcttctatgttttgggttgatgccgaattagggagtgatatttaccttgatggtatcataactattgtggattcaaaatatggattaaaagtgaaataccactaa

SEQ ID NO: 3348 - DNA, 1792 bp, Homo sapiens
  source 1..1792: mol_type = unassigned DNA; mol_type = unassigned DNA
aagggacgaggcagttctcgtccagagcccaggtaatccgggcgggatcagctagcgtcgcgatgtgatgacgtcaggccccggccaggccgggagtggcgtgctgggcgtgcgcggctgcggtacggcgtgttggtcccagcggttcagctgaggtagggacgtgctgtaggccggaatgttaccggctgttggatctgtggatgaggaagaggatcctgcggaggaggattgtcctgaattggttcccattgagacgacgcaaagcgaggaggaggaaaagtctggcctcggcgccaagatcccagtcacaattatcaccgggtatttaggtgctgggaagacaacacttctgaactatattttgacagagcaacatagtaaaagagtagcggtcattttaaatgaatctggggaaggaagtgcgctggagaaatccttagctgtcagccaaggtggagagctctatgaagagtggctggaacttagaaacggttgcctctgctgttcagtgaaggacaatggccttagagctattgagaatttgatgcaaaagaaggggaaatttgatgacatactgttagagaccactggattagcagaccctggtgcagtggcttctatgttttgggttgatgccgaattagggagtgatatttaccttgatggtatcataactattgtggattcaaaatatggattaaaacatttaacagaagagaaacctgatggccttatcaatgaagctactaggcaagttgctttggcagatatcattctcattaataaaacagacttggtcccagaagaagatgtaaagaaattaagaacgacacttagatccataaatggactaggacaaatcttagaaacacaaagatcaagagttgatctctctaatgtattagatcttcatgcctttgatagtctctctggaataagtttgcagaaaaaacttcagcatgtgccaggaacacaacctcaccttgatcagagtattgttacaatcacatttgacgtaccaggaaatgcaaaggaagaacatcttaatatgtttattcagaatcttctgtgggaaaagaatgtgagaaacaaggacaatcactgcatggaggtcataaggctgaagggattggtgtcaatcaaagacaaatcacaacaagtgattgtccagggtgtccatgagctctgtgatctggaggagactccagtgagctggaaggatgacactgagagaacaaatcgattggtcctcattggcagaaatttagataaggatatccttaaacagctgtttatagctactgtgacagaaacagaaaagcagtggacaacacatttcaaagaagatcaagtttgtacataacactagaggcatttcttatcaaaaggattggataataaaaataagtttctactgggtatatttcaagcatttatttattactttagttacgaattccaatatactttaaaatggtatttgttttacagcatacataaaatgtagcaaatcagtactgtaaaacatttaacattcatacaattatatacaatatccttttttttaaagaatggtatttcacaaaaatatcttttgaaattggctttggagtttacatatactgaacatgaaagtttataataatgatgatacaactttcaacattgtcattttttcttagaacttcagctgattgcagagatataatgattacattgttattaaatttttttaacacaagtaagtgtcaccattttatgacatgaaataaaaggttatgactgttat

SEQ ID NO: 3349 - DNA, 1608 bp, Homo sapiens
  source 1..1608: mol_type = unassigned DNA; mol_type = unassigned DNA
ggcgtgttggtcccagcggttcagctgaggtagggacgtgctgtaggccggaatgttaccggctgttggatctgtggatgaggaagaggatcctgcggaggaggattgtcctgaattggttcccattgagacgacgcaaagcgaggaggaggaaaagtctggcctcggcgccaagatcccagtcacaattatcaccgggtatttaggtgctgggaagacaacacttctgaactatattttgacagagcaacatagtaaaagagtagcggtcattttaaatgaatctggggaaggaagtgcgctggagaaatccttagctgtcagccaaggtggagagctctatgaagagtggctggaacttagaaacggttgcctctgctgttcagtgaaggacaatggccttagagctattgagaatttgatgcaaaagaaggggaaatttgatgacatactgttagagaccactggattagcagaccctggtgcagtggcttctatgttttgggttgatgccgaattagggagtgatatttaccttgatggtatcataactattgtggattcaaaatatggattaaaacatttaacagaagagaaacctgatggccttatcaatgaagctactaggcaagttgctttggcagatatcattctcattaataaaacagacttggtcccagaagaagatgtaaagaaattaagaacgacacttagatccataaatggactaggacaaatcttagaaacacaaagatcaagtttgcagaaaaaacttcagcatgtgccaggaacacaacctcaccttgatcagagtattgttacaatcacatttgacgtaccaggaaatgcaaaggaagaacatcttaatatgtttattcagaatcttctgtgggaaaagaatgtgagaaacaaggacaatcactgcatggaggtcataaggctgaagggattggtgtcaatcaaagacaaatcacaacaagtgattgtccagggtgtccatgagctctgtgatctggaggagactccagtgagctggaaggatgacactgagagaacaaatcgattggtcctcattggcagaaatttagataaggatatccttaaacagctgtttatagctactgtgacagaaacagaaaagcagtggacaacacatttcaaagaagatcaagtttgtacataacactagaggcatttcttatcaaaaggattggataataaaaataagtttctactgggtatatttcaagcatttatttattactttagttacgaattccaatatactttaaaatggtatttgttttacagcatacataaaatgtagcaaatcagtactgtaaaacatttaacattcatacaattatatacaatatccttttttttaaagaatggtatttcacaaaaatatcttttgaaattggctttggagtttacatatactgaacatgaaagtttataataatgatgatacaactttcaacattgtcattttttcttagaacttcagctgattgcagagatataatgattacattgttattaaatttttttaacacaagtaagtgtcaccattttatgacatgaaataaaaggttatgactgtta

SEQ ID NO: 3350 - DNA, 6227 bp, Homo sapiens
  source 1..6227: mol_type = unassigned DNA; mol_type = unassigned DNA
cggagctcggcgctgggaagaagccgggagcttccctgatggtgccgccgcctccgagccggggaggagctgccaggggccagctgggcaggagcctgggtccgctgctgctgctcctggcgttgggacacacgtggacctacagagaggagccggaggacggcgacagagaaatctgctcagagagcaaaatcgcgacgactaaatacccgtgtctgaagtcttcaggcgagctcaccacatgctacaggaaaaagtgctgcaaaggatataaatttgttcttggacaatgcatcccagaagattacgacgtttgtgccgaggctccctgtgaacagcagtgcacggacaactttggccgagtgctgtgtacttgttatccgggataccgatatgaccgggagagacaccggaagcgggagaagccatactgtctggatattgatgagtgtgccagcagcaatgggacgctgtgtgcccacatctgcatcaataccttgggcagctaccgctgcgagtgccgggaaggctacatccgggaagatgatgggaagacatgtaccaggggagacaaatatcccaatgacactggccatgagaagtctgagaacatggtgaaagccggaacttgctgtgccacatgcaaggagttctaccagatgaagcagaccgtgctgcagctgaagcaaaagattgctctgctccccaacaatgcagctgacctgggcaagtatatcactggtgacaaggtgctggcctcaaacacctaccttccaggacctcctggcctgcctgggggccagggccctcccggctcaccaggaccaaagggaagcccaggcttccccggtatgccaggccctcctgggcagcccggcccacggggctcaatgggacccatgggaccatctcctgatctgtcccacattaagcaaggccggaggggccctgtgggtccaccaggggcaccaggaagagatggttctaagggggagagaggagcgcctgggcccagagggtctccaggaccccctggttctttcgacttcctgctacttatgctggctgacatccgcaatgacatcactgagctgcaggaaaaggtgttcgggcaccggactcactcttcagcagaggagttccctttacctcaggaatttcccagctacccagaagccatggacctgggctctggagatgaccatccaagaagaactgagacaagagacttgagagcccccagagacttctacccatagcacatcccaacaccgtcacgccaaaggaagagaaagatcaactcacctgcagttaaaccatctaaagagaagaaagaccactggagacctagaaaacatacatttttctcttctcttctcctgacgtctctccactcctcttcttccaaatacgatgctattttcagagtcccctcctaggcctgcagacatgagggagtgaatgattgatttacctgcttctcactaagagtccattggggtggtttgcattgtaacttttcttttacatcctatttttccaggaactttggatttaagtactctcacagtgtcttaaatcataaattcttgaagttaaatttggcagagtatcaaaagggggaaaatgacaaagtgagctctaagaaaatgtgaggctacttctaagatgtgtgttcacaatagaccataactcctctagtatcaaaattggggctcttcagttaaaaaggggtggggaggacaaacgtgtcgatgtgctttggtggagaattttttccttgtgcttctagtagactttaaatattgtatccctttgtcaaaccttgtttcccaaattcaattaaagagaggagagaattgaatggcgtttagagaagatagaaaagaatcacagtcatatatttactgttatatagattgccacattctaaaattcaaatacggtgcttaaggtttcatgccatgcttatctgtaagtatcctatttagggaagaagattaaactctcttttcaaaaaaacaaagtgaaatgcctggattcacattaaaacaatgggctctcgtttgctataatattttaaagctgtttaatcaacagtggagtctgctctataaatatagattatttgttcaataaactggctgagcttagagagaggtgcagaattcctggttctgagcaggtgcccagaaggtaccattaggtgccatgatccaggctgaaccaatatacagtggggctgaagtctgcaaggaggttgctggcttgggctgacctcactaatgccatcagcagcggtaggtaaattttttctccttgggtattacaagtttttgtctggagccaaccaagcttgccaccaacatattgagagtaatacactattgaaagttatcttggatggggagaaaaaaaaatagtggttttccttgtttgcaaaaacttccttcctattctcattttttcttaattttctttaatttagtccaagttccagttcttttaggccttctctttgatttattttcccctgcatgtgagaagcagttcagaaaaaggtctatatctccacctcctagtgagttagagtgttttctcagagcacctctgggtggcaaagggaagcatgttcctgccaaggtttgctgtggattcagaagcaccaggagcaagagaccagaaggatgatctgctcctttgtaacgttgttgagggccctcttgtttccaatgagcagcttataggttactcacagtccactttctcactggacacacaaagtggctctttatctacctttgcgggagattttcactctcctgcaaatgatcgttctcacactcatattagctcatgttggaatttcccatcctgccatgtcctttcccatttctttttggcttttttgcctccaccttttagcccacatcatttaactccactactgtgaaagcttgcttaaagaaaatccctcttggccgggtgtggtagcccacgcctctaatcccagcactttgggaggctgaggcggggagatcacaaggtcaggagatcgagaccagcctgaccaacatggtgaaaccctgtctctactaaaaatacaaaaattagctgggcgtgttggcacacacctgtaatcccagctactcaggaggctgaggcaggagaattactttaacctgcggggggagcctagattgcgctactgcactccagcctaggcaacagagggagactctgtctcattaaaaaaaaaaaaaaaaaaaaaaaaaggccgggcttggtggctcatgcctgtaatcccagcactttgggaggccgaggcgggcggatcacgaggtcaggagatcgagaccacagtgaaaccctgtctctactaaaaacacaaaaaattagtcgggcgtggtggtgggcgcctgtggtcccagctgctcgggaggctgaggcaggagaatggcgtgaacctgggaggcggagcttgcgctgagccgagatcgtgccactgcactccagcctgggcgacagagcgagactctgtctcaaaaaaaaaaaaatatcccttttgttgtgtttgaatgccacctttcagtcttcttccttaagaatgttaggaaggggctttgcaaacctctagtggcaacagtcttccttcccttcttcctaccacgttggaaatgcaggactcatgtcagtcagcatgtgaccgagtctttcatgaacactttgctcctctatgtctcatttatgcaaaattcctggtgactctccactaacatttttaaagtgaaagcaaactttcactttaaaaaaagtgagcgagaggatcccttgagcccaggagttcaaggccagtctgggcaacatagcaagaccccatccctaaaaaaaaaaaaataagttttattaaatgtggcactttcccctagaagggcagtaaccccaggaaccagtctgcctcttttcgaataaaggagactttttaaaaagaaaaaatttctttttagggtggggtgctctttatctagcatctttccttcctccttctctctgcaaaattcaacattcatgacagagggccacaccaaccacgggtttatagagagaggaactgaacagctgttgattcccatctggaatatatttaatgtttgcctgcttgtggagcatggtatttaaagggtgtggatggatgaatgtttaaaaaaaaacacacaaaactatgcacaagctgtatgagagatggctaggtccatctatgattttttttaaaagaagaattttaataccttttctttgacagtgaactgtatttagaaatatgatctttattgtgaaatgctcataaaatgcaaccaaactgcatgtttggccataggctagaataatatattaaaagaattaatggaaagtagtattgtctgggtttcatgaaactattccagataatattctccagcaaaacttatggtaacctgtattttataatgtcaatctgctggaccaagttaatttagaaaataatttttaatcctcagattttcaaaacttggactactgcaagactgatatgtactttttatgcccaaatcatatttttcaaagataggacatcataaggcatcattatttctaatgtatcttttaactagatagaaaaagctttactgtctaaacaggacttctgctcaaaacctaatgggaaagctatttctggggtaagatttgtaacagtgcttctaggtcatttcatgttttatagggaaaaagatctttgtacacctcctcaacctgttagtagaaatgttgacttcgattttttgcaccctcttcacaggacctcataagttgcctctgttcttggaaagcaatgggaataaaaatatgctgttgaaaatagtgcatggggccaggcacagtggttatgcctgtaatcccaacactttgggaggctgaggcgggcgcatcatgaggtcaggagatcaagaccatcctgaccaacacgtggtgaaaccccatctctactaaaataaataaaaaaaaaaattagccaggcgtggtggtgcacgcctgtagtctcagctactcgggaagctgagacacaagaattgcttgaacccgggaggtggaggttgcagtgagccaagattgcgccactgcactccagcctggctacagagtgagactccgtctcgaaaaaagaaaatagtacatggagggcatgcattttagtttaggaaacccccctcccttcccagttccagagggagaaattataagctatactgtgccaaaagtgagtggggctgcagagagaatggtgccttttctcaccttctgagttaatgcccgacatctgccattggattcattgaccaaaggaagtcatttctactgtataaactcaggagtatcatagcccaacaagtaaataataaatgttcattggttttggaaggaaggaaaggtgagtattaccccaccaaataccagcgaagagcaccctggctttggccatctttccaaggttcataattgctgtgggcctggtgagccctgttcccaggtatgcaagggagggcttctccaggccagacatttctgtaggttttcaggtagcaactcccccatcatattttgggtgtcattccccactctctctccccacttctcagcctgtgccccagaaacaaccacagcagcctcattctgcagacttaacatctgtcaaataaccttcctgaaaaggaaagttattggaggaatccaggccaaacaacaagtagaatagagccatctaaagttattaataatgagttcagggaaatagatgaattttttcctggcatagtcaatatttatatctcacaacaagtcaaaaataattttccatttggaaaacaaaacacaccatgactgtaattgttaaggcatataatcatgaacttcacatgctccctcaacaaacgttactgctctagggaaatcatagaaaaggaccctcttactccccaggggatcaaagcaagtccccttaggaatttcatgtgtgccgtgggtctgtttttatttcacagtgactagtcatatactggagtagctctgttgttcattatttgtaacaggtccatgtaacagtcaagttagcattcaagcaattatggatgtgatactatgatgtacttttgttatgattgtatatgcttaataacaaagttatttttctt

SEQ ID NO: 3351 - DNA, 1691 bp, Homo sapiens
  source 1..1691: mol_type = unassigned DNA; mol_type = unassigned DNA
gatcagggtcttcctggcatgtctaaataggaacagctgagcccagcttctagcagggcccctctccctctgtcctcccctcttccctgaccctggggcatgctggcaggacctgagagctgtaaaatcacccacagttgagccctcgcatgtcccgctgtcagctactctgtccctgggaccgcccttcccgatgctgtctctctgggtctggcttgcatccagcctcccagacaggactgagcctatctcctttctcaggccatgagaagtctgagaacatggtgaaagccggaacttgctgtgccacatgcaaggagttctaccagatgaagcagaccgtgctgcagctgaagcaaaagattgctctgctccccaacaatgcagctgacctgggcaagtatatcactggtgacaaggtgctggcctcaaacacctaccttccaggacctcctggcctgcctgggggccagggccctcccggctcaccaggaccaaagggaagcccaggcttccccggtatgccaggccctcctgggcagcccggcccacggggctcaatgggacccatgggaccatctcctgatctgtcccacattaagcaaggccggaggggccctgtgggtccaccaggggcaccaggaagagatggttctaagggggagagaggagcgcctgggcccagagggtctccaggaccccctggttctttcgacttcctgctacttatgctggctgacatccgcaatgacatcactgagctgcaggaaaaggtgttcgggcaccggactcactcttcagcagaggagttccctttacctcaggaatttcccagctacccagaagccatggacctgggctctggagatgaccatccaagaagaactgagacaagagacttgagagcccccagagacttctacccatagcacatcccaacaccgtcacgccaaaggaagagaaagatcaactcacctgcagttaaaccatctaaagagaagaaagaccactggagacctagaaaacatacatttttctcttctcttctcctgacgtctctccactcctcttcttccaaatacgatgctattttcagagtcccctcctaggcctgcagacatgagggagtgaatgattgatttacctgcttctcactaagagtccattggggtggtttgcattgtaacttttcttttacatcctatttttccaggaactttggatttaagtactctcacagtgtcttaaatcataaattcttgaagttaaatttggcagagtatcaaaagggggaaaatgacaaagtgagctctaagaaaatgtgaggctacttctaagatgtgtgttcacaatagaccataactcctctagtatcaaaattggggctcttcagttaaaaaggggtggggaggacaaacgtgtcgatgtgctttggtggagaattttttccttgtgcttctagtagactttaaatattgtatccctttgtcaaaccttgtttcccaaattcaattaaagagaggagagaattgaatggcgtttagagaagatagaaaagaatcacagtcatatatttactgttatatagattgccacattctaaaattcaaatacggtgcttaaggtttcatgccatgcttatctgtaagtatcctatttagggaagaagattaaactctcttttcaaaaaa

SEQ ID NO: 3352 - DNA, 587 bp, Homo sapiens
  source 1..587: mol_type = unassigned DNA; mol_type = unassigned DNA
ctttgcctgctgccatctatgtaagacgtgacttgttcctcctcgccttttgccgtgattatgaagcctccccagccatgtggaactgaaaaagtgctgcaaaggatataaatttgttcttggacaatgcatcccagaagattacgacgtttgtgccgaggctccctgtgaacagcagtgcacggacaactttggccgagtgctgtgtacttgttatccgggataccgatatgaccgggagagacaccggaagcgggagaagccatactgtctggatattgatgagtgtgccagcagcaatgggacgctgtgtgcccacatctgcatcaataccttgggcagctaccgctgcgagtgccgggaaggctacatccgggaagatgatgggaagacatgtaccaggggagacaaatatcccaatgacactggccatgagaagtctgagaacatggtgaaagccggaacttgctgtgccacatgcaaggagttctaccagatgaagcagaccgtgctgcagctgaagcaaaagattgctctgctccccaacaatgcagctgacctgggcaagtatatcactggtgacaagg

SEQ ID NO: 3353 - DNA, 5979 bp, Homo sapiens
  source 1..5979: mol_type = unassigned DNA; mol_type = unassigned DNA
aggaaaaagtgctgcaaaggatataaatttgttcttggacaatgcatcccagaagattacgacgtttgtgccgaggctccctgtgaacagcagtgcacggacaactttggccgagtgctgtgtacttgttatccgggataccgatatgaccgggagagacaccggaagcgggagaagccatactgtctggatattgatgagtgtgccagcagcaatgggacgctgtgtgcccacatctgcatcaataccttgggcagctaccgctgcgagtgccgggaaggctacatccgggaagatgatgggaagacatgtaccaggggagacaaatatcccaatgacactggccatgagaagtctgagaacatggtgaaagccggaacttgctgtgccacatgcaaggagttctaccagatgaagcagaccgtgctgcagctgaagcaaaagattgctctgctccccaacaatgcagctgacctgggcaagtatatcactggtgacaaggtgctggcctcaaacacctaccttccaggacctcctggcctgcctgggggccagggccctcccggctcaccaggaccaaagggaagcccaggcttccccggtatgccaggccctcctgggcagcccggcccacggggctcaatgggacccatgggaccatctcctgatctgtcccacattaagcaaggccggaggggccctgtgggtccaccaggggcaccaggaagagatggttctaagggggagagaggagcgcctgggcccagagggtctccaggaccccctggttctttcgacttcctgctacttatgctggctgacatccgcaatgacatcactgagctgcaggaaaaggtgttcgggcaccggactcactcttcagcagaggagttccctttacctcaggaatttcccagctacccagaagccatggacctgggctctggagatgaccatccaagaagaactgagacaagagacttgagagcccccagagacttctacccatagcacatcccaacaccgtcacgccaaaggaagagaaagatcaactcacctgcagttaaaccatctaaagagaagaaagaccactggagacctagaaaacatacatttttctcttctcttctcctgacgtctctccactcctcttcttccaaatacgatgctattttcagagtcccctcctaggcctgcagacatgagggagtgaatgattgatttacctgcttctcactaagagtccattggggtggtttgcattgtaacttttcttttacatcctatttttccaggaactttggatttaagtactctcacagtgtcttaaatcataaattcttgaagttaaatttggcagagtatcaaaagggggaaaatgacaaagtgagctctaagaaaatgtgaggctacttctaagatgtgtgttcacaatagaccataactcctctagtatcaaaattggggctcttcagttaaaaaggggtggggaggacaaacgtgtcgatgtgctttggtggagaattttttccttgtgcttctagtagactttaaatattgtatccctttgtcaaaccttgtttcccaaattcaattaaagagaggagagaattgaatggcgtttagagaagatagaaaagaatcacagtcatatatttactgttatatagattgccacattctaaaattcaaatacggtgcttaaggtttcatgccatgcttatctgtaagtatcctatttagggaagaagattaaactctcttttcaaaaaaacaaagtgaaatgcctggattcacattaaaacaatgggctctcgtttgctataatattttaaagctgtttaatcaacagtggagtctgctctataaatatagattatttgttcaataaactggctgagcttagagagaggtgcagaattcctggttctgagcaggtgcccagaaggtaccattaggtgccatgatccaggctgaaccaatatacagtggggctgaagtctgcaaggaggttgctggcttgggctgacctcactaatgccatcagcagcggtaggtaaattttttctccttgggtattacaagtttttgtctggagccaaccaagcttgccaccaacatattgagagtaatacactattgaaagttatcttggatggggagaaaaaaaaatagtggttttccttgtttgcaaaaacttccttcctattctcattttttcttaattttctttaatttagtccaagttccagttcttttaggccttctctttgatttattttcccctgcatgtgagaagcagttcagaaaaaggtctatatctccacctcctagtgagttagagtgttttctcagagcacctctgggtggcaaagggaagcatgttcctgccaaggtttgctgtggattcagaagcaccaggagcaagagaccagaaggatgatctgctcctttgtaacgttgttgagggccctcttgtttccaatgagcagcttataggttactcacagtccactttctcactggacacacaaagtggctctttatctacctttgcgggagattttcactctcctgcaaatgatcgttctcacactcatattagctcatgttggaatttcccatcctgccatgtcctttcccatttctttttggcttttttgcctccaccttttagcccacatcatttaactccactactgtgaaagcttgcttaaagaaaatccctcttggccgggtgtggtagcccacgcctctaatcccagcactttgggaggctgaggcggggagatcacaaggtcaggagatcgagaccagcctgaccaacatggtgaaaccctgtctctactaaaaatacaaaaattagctgggcgtgttggcacacacctgtaatcccagctactcaggaggctgaggcaggagaattactttaacctgcggggggagcctagattgcgctactgcactccagcctaggcaacagagggagactctgtctcattaaaaaaaaaaaaaaaaaaaaaaaaaggccgggcttggtggctcatgcctgtaatcccagcactttgggaggccgaggcgggcggatcacgaggtcaggagatcgagaccacagtgaaaccctgtctctactaaaaacacaaaaaattagtcgggcgtggtggtgggcgcctgtggtcccagctgctcgggaggctgaggcaggagaatggcgtgaacctgggaggcggagcttgcgctgagccgagatcgtgccactgcactccagcctgggcgacagagcgagactctgtctcaaaaaaaaaaaaatatcccttttgttgtgtttgaatgccacctttcagtcttcttccttaagaatgttaggaaggggctttgcaaacctctagtggcaacagtcttccttcccttcttcctaccacgttggaaatgcaggactcatgtcagtcagcatgtgaccgagtctttcatgaacactttgctcctctatgtctcatttatgcaaaattcctggtgactctccactaacatttttaaagtgaaagcaaactttcactttaaaaaaagtgagcgagaggatcccttgagcccaggagttcaaggccagtctgggcaacatagcaagaccccatccctaaaaaaaaaaaaataagttttattaaatgtggcactttcccctagaagggcagtaaccccaggaaccagtctgcctcttttcgaataaaggagactttttaaaaagaaaaaatttctttttagggtggggtgctctttatctagcatctttccttcctccttctctctgcaaaattcaacattcatgacagagggccacaccaaccacgggtttatagagagaggaactgaacagctgttgattcccatctggaatatatttaatgtttgcctgcttgtggagcatggtatttaaagggtgtggatggatgaatgtttaaaaaaaaacacacaaaactatgcacaagctgtatgagagatggctaggtccatctatgattttttttaaaagaagaattttaataccttttctttgacagtgaactgtatttagaaatatgatctttattgtgaaatgctcataaaatgcaaccaaactgcatgtttggccataggctagaataatatattaaaagaattaatggaaagtagtattgtctgggtttcatgaaactattccagataatattctccagcaaaacttatggtaacctgtattttataatgtcaatctgctggaccaagttaatttagaaaataatttttaatcctcagattttcaaaacttggactactgcaagactgatatgtactttttatgcccaaatcatatttttcaaagataggacatcataaggcatcattatttctaatgtatcttttaactagatagaaaaagctttactgtctaaacaggacttctgctcaaaacctaatgggaaagctatttctggggtaagatttgtaacagtgcttctaggtcatttcatgttttatagggaaaaagatctttgtacacctcctcaacctgttagtagaaatgttgacttcgattttttgcaccctcttcacaggacctcataagttgcctctgttcttggaaagcaatgggaataaaaatatgctgttgaaaatagtgcatggggccaggcacagtggttatgcctgtaatcccaacactttgggaggctgaggcgggcgcatcatgaggtcaggagatcaagaccatcctgaccaacacgtggtgaaaccccatctctactaaaataaataaaaaaaaaaattagccaggcgtggtggtgcacgcctgtagtctcagctactcgggaagctgagacacaagaattgcttgaacccgggaggtggaggttgcagtgagccaagattgcgccactgcactccagcctggctacagagtgagactccgtctcgaaaaaagaaaatagtacatggagggcatgcattttagtttaggaaacccccctcccttcccagttccagagggagaaattataagctatactgtgccaaaagtgagtggggctgcagagagaatggtgccttttctcaccttctgagttaatgcccgacatctgccattggattcattgaccaaaggaagtcatttctactgtataaactcaggagtatcatagcccaacaagtaaataataaatgttcattggttttggaaggaaggaaaggtgagtattaccccaccaaataccagcgaagagcaccctggctttggccatctttccaaggttcataattgctgtgggcctggtgagccctgttcccaggtatgcaagggagggcttctccaggccagacatttctgtaggttttcaggtagcaactcccccatcatattttgggtgtcattccccactctctctccccacttctcagcctgtgccccagaaacaaccacagcagcctcattctgcagacttaacatctgtcaaataaccttcctgaaaaggaaagttattggaggaatccaggccaaacaacaagtagaatagagccatctaaagttattaataatgagttcagggaaatagatgaattttttcctggcatagtcaatatttatatctcacaacaagtcaaaaataattttccatttggaaaacaaaacacaccatgactgtaattgttaaggcatataatcatgaacttcacatgctccctcaacaaacgttactgctctagggaaatcatagaaaaggaccctcttactccccaggggatcaaagcaagtccccttaggaatttcatgtgtgccgtgggtctgtttttatttcacagtgactagtcatatactggagtagctctgttgttcattatttgtaacaggtccatgtaacagtcaagttagcattcaagcaattatggatgtgatactatgatgtacttttgttatgattgtatatgcttaataacaaagttatttttctt

SEQ ID NO: 3354 - DNA, 568 bp, Homo sapiens
  source 1..568: mol_type = unassigned DNA; mol_type = unassigned DNA
gtgagattcaaagtgtgttaagggtatctagctggctttaaagatggagggggcaaggtggctcctagaaggtgaaattgaccagcagcctgcagggaacagggacctcagtccttcaactacctggaactggattctgtcaacactctgaatgggcctgaaagtggattttcccccggaacctccagataagagcccagggtggaggagagcaacagcaagctcctggagtcagagaggaagctgcaggaggagcgacaccgcaccgtggtgctggagcaacatctggagaagatacgcctggagccagggaaggcatcagcctcccagagagcagctcccaggaccaaaacagggttcccccagaccacgctgtccatcctgtttgtcacctactgtggcgtccagctggtaaaggagcgtgagcgaaccttggcactggaggaggagcagaagcaggacaaagagaagccggagtaggagggagcgggtagagggatgggctctgctcagctattcttgggccagatggggcctgaccgatagaataaaagacttttctacaaca

SEQ ID NO: 3355 - DNA, 386 bp, Homo sapiens
  source 1..386: mol_type = unassigned DNA; mol_type = unassigned DNA
gccttccctgcccagtccccacaggacctcacctagggtggaggagagcaacagcaagctcctggagtcagagaggaagctgcaggaggagcgacaccgcaccgtggtgctggagcaacatctggagaagatacgcctggagccagggaaggcatcagcctcccagagagcagctcccaggaccaaaacagctccgctcctggatgtatgctgtgtacggggccttggctgtgatgggcacaatgggcccttggtacctgctgctgctgcttggtcactgtgtgggcctctatgtggcctcgcttttgggccagccctggctctgtcttggccttggcttggccagcctggcctccttcaagatggaccccctaatctcttggcag

SEQ ID NO: 3356 - DNA, 2943 bp, Homo sapiens
  source 1..2943: mol_type = unassigned DNA; mol_type = unassigned DNA
agggcagcgcgtgtcggcgtccggaggaggtgacctagccgccgcggtcctagaagggagaagtggagagagaccgctggcaggatggcagcagatgaaagctcacagaacactttgcggctccagttcaaggcaatgcaggagatgcagcacaaacggttacagaagcagatggagaaaaagagggaaaaagaactgagcctcaaaagcagagctgacgaccaagaggagcccttggaggtttcagatggcctcagccttctccacgcaggggagccaaactcgaaaaatagctttgagaagagggtgcttgaagatgagattgaacaccttcgaaatgagctcagggaaacggtggacgagaacgggcgattgtataagctgctgaaggaaagggactttgaaatcaaacacctcaaaaagaaaatagaagaggacagatttgccttcacagggacagccggtgtagccggagacgtggtcgccaccaaaattgtggagctatcaaaaaagaaccggctgttgatggcagaatcagagggtgcaaaaaccagggtgaagcagctgaccaatcgcatccaggagctggagcgggaactgcagacagccctgaccaggctgtcagccaagggggccaccgacgcaggagccaagccaccgagggcccagatgggagacagagcattgctggagaccccagaggtgaaggccctgcaggacaggctggtggccaccaacttgaagatgagtgacctccgaaaccagatccagtctgtgaagcaggagctgcggatggcacagaaggttttggccagagaggttggggaagacatcaacgttcagcagctcctatcttcgccagggacctggaggggtcgggctcaacaaattcttgttttgcagagcaaggttcaagagcttgagaagcaattgggccaggcccggagccagtctgcgggaacagccagtgatgagttgtctgtctatccagacccaaggaagctgtcggcacaggagaaaaacctgctgaggatccgcagcctggaaagggaaaaacaggaaggcttggagaaacttgccagtgaacgggatgtcctccagagagagcttgaagagctaaaaaagaagttcgagggcatgaggtctcggaacaagctgctgtcaagtgagatgaagaccctcaagagtcagatgggaaccctggtggagaagggccggcatgatgacgagctcatcgacgccctcatggaccagctgaagcagctacaggagatcctaggcagcctgagtctgcaggaggagaaaacgcgagtgtcccagcaccacctggaccagcaactgaacagcgaggctcagcggagcaacagcctagtcgcccagctgcaggccatggtagctgagcgggaggccaaagtgcgacagctggagatggagatcggacaactcaatgtgcactatcttcggaataaaggagtgggtgaggggtccagtggccgcgaggtcagccctgcctatacccagttcctggaggacccaggcctgaccaagtccccggcctcagcaggcgatcatgttggcaggcttggatcttctcgctctgtgaccagcctgggccacacactggtggaatctgctctcacgaggccttccctgcccagtccccacaggacctcacctaggttctcggactccccagaacaaaaaggctggcaggcacaagtgtcagagatcaaggccctctggcaggctgccgaggtggagcgtgaccggctcaccgagtttgtcactgtcctgcagaaacgggtggaggagagcaacagcaagctcctggagtcagagaggaagctgcaggaggagcgacaccgcaccgtggtgctggagcaacatctggagaagatacgcctggagccagggaaggcatcagcctcccagagagcagctcccaggaccaaaacaggtctgcccacctctaacaacaggcacaacccaaccgggagcgagaagaaggacccatcctttgcccagctctccgatgtgcccgtggaatcccaaatggaagagctgacaaccaggctggccatccaggtggaggagaatgaaatgctaaaggctgccctgggcagtgccctgcggggaaaggaggaggacttccggatgtaccatgagatcctgggccaggtgaaaagtgtcttcctgcaggccctgcggcagcagaagacaggcaagcaataggatgacagcccagtgtcggcctggccgggtgggcagcctcaggtcttgagaggataagactctgtctgaggactccatctgctccgggaagccagcccagggcagccagctcaaccacttctaccagaagaggctccttaaggatgaccaaaaccaatgtctcaggccaggaaggcagaagagaagccctggtgggacactgcaggagaccctgggctggctgggttacagcagcagggaggcccagcagcccactggcagaggcgagagctctgggatggcaaggcggctgtgaatggacagatgcagtccctcgggcaggtgttcatcgccctcatcctaggtactagccctggatgtccccatggcttcacacacagaagagcccttggttaccctaagtgggcatatcccccatgccactcagccctgccctatcccctcacccccatcccggctccatctgtagccgtccacaccctacacagacttggggcactatgctctcaaccagtttgtcagcccactcctcaggacacttcctcaggtgcagacccttggacttgtaataataataagtattttcataatcactgcagctcccagtgagtgagcatctactgtggcaacctgaccccattcagtcctctaatgacccaggggtttgttgtcttatttgacagatgaagaaactgaggttcacagaaagaa

SEQ ID NO: 3357 - DNA, 479 bp, Homo sapiens
  source 1..479: mol_type = unassigned DNA; mol_type = unassigned DNA
tgtggaggaagtcagagagggtagtgagattcaaagtgtgttaagggtatctagctggctttaaagatggagggggcaaggtggctcctagaaggtgaaattgaccagcagcctgcagggaacagggacctcagtccttcaactacctggaactggattctgtcaacactctgaatgggcctgaaagtggattttcccccggaacctccagataagagcccagggtggaggagagcaacagcaagctcctggagtcagagaggaagctgcaggaggagcgacaccgcaccgtggtgctggagcaacatctggagaagatacgcctggagccagggaaggcatcagcctcccagagagcagctcccaggaccaaaacaggtctgcccacctctaacaacaggcacaacccaaccgggagcgagaagaaggacccatcctttgcccagctctccgatgtgcccgtggaatcccaaatggaa

SEQ ID NO: 3358 - DNA, 314 bp, Homo sapiens
  source 1..314: mol_type = unassigned DNA; mol_type = unassigned DNA
gttcctggaggacccaggcctgaccaagtccccggcctcagcaggcgatcatgttggcaggcttggatcttctcgctctgtgaccagcctgggccacacactggtggaatctgctctcacgaggccttccctgcccagtccccacaggacctcacctagggtggaggagagcaacagcaagctcctggagtcagagaggaagctgcaggaggagcgacaccgcaccgtggtgctggagcaacatctggagaagatacgcctggagccagggaaggcatcagcctcccagagagcagctcccaggaccaaaacag

SEQ ID NO: 3359 - DNA, 597 bp, Homo sapiens
  source 1..597: mol_type = unassigned DNA; mol_type = unassigned DNA
acaccagattcgctgcagcttaagactagcctcacaaatcctttttctaattaattaaaactttacaggagataaacaatgatttttaccagtctgcacagagagagagagagagagagagagagagagagagagagagagaggaaagcactgcctgaggcagagtggggaaggtgaggtgctcagagaggccagagaaagacccacccattgcagcgacactgaaaagttcaggcggctgcttgtcaccatcagcgaagagtgcaagacagattaatccaaagagaatagcagttaacatcccggagtgccaaacccatttttagctgaaagggactttaccgagaggaactttactgagaggaccactaactccctacatcttagaagggactctaaccctcctaagttgggcctctaacccaagaatgccttaaccatctgggaatgcagcagttggtttcagccttatttcacccagctcctatttaagatggagttgctcttgttcaaacgcctctgacaaaaccactgtgctttggagagaacaacatggcggtggatggttgtggtattatgcaataacaacacaaaatg

SEQ ID NO: 3360 - DNA, 698 bp, Homo sapiens
  source 1..698: mol_type = unassigned DNA; mol_type = unassigned DNA
tttgaaatcaaacacctcaaaaagaaaatagaagaggacagatttgccttcacagggacagccggtgtagccggagacgtggtcgccaccaaaattgtggagctatcaaaaaagaaccggctgttgatggcagaatcagagggtgcaaaaaccagggtgaagcagctgaccaatcgcatccaggagctggagcgggaactgcagacagccctgaccaggctgtcagccaagggggccaccgacgcaggagccaagccaccgagggcccagatgggagacagagcattgctggagaccccagaggtgaaggccctgcaggacaggctggtggccaccaacttgaagatgagtgacctccgaaaccagatccagtctgtgaagcaggagctgcggatggcacagaaggttttggccagagaggttggggaagacatcaacgttcagcagctcctatcttcgccagggacctggaggggtcgggctcaacaaattcttgttttgcagagcaaggtgagtgagtcatcagacttctcctggcctgaacaaaggatttaaaacaccccagaaagagctgccctgacccccttagagacctaagcacacagtacccaaaaaaggcctttaggtctcacagtgcactcgtgcggggttgttgttttaccttctcgccaaccagcctgattttaatttgttattta

SEQ ID NO: 3361 - DNA, 1267 bp, Homo sapiens
  source 1..1267: mol_type = unassigned DNA; mol_type = unassigned DNA
agggcagcgcgtgtcggcgtccggaggaggtgacctagccgccgcggtcctagaagggagaagtggagagagaccgctggcaggatggcagcagatgaaagctcacagaacactttgcggctccagttcaaggcaatgcaggagatgcagcacaaacggttacagaagcagatggagaaaaagagggaaaaagaactgagcctcaaaagcagagctgacgaccaagaggagcccttggaggtttcagatggcctcagccttctccacgcaggggagccaaactcgaaaaatagctttgagaagagggtgcttgaagatgagattgaacaccttcgaaatgagctcagggaaacggtggacgagaacgggcgattgtataagctgctgaaggaaagggactttgaaatcaaacacctcaaaaagaaaatagaagaggacagatttgccttcacagggacagccggtgtagccggagacgtggtcgccaccaaaattgtggagctatcaaaaaagaaccggctgttgatggcagaatcagagggtgcaaaaaccagggtgaagcagctgaccaatcgcatccaggagctggagcgggaactgcagacagccctgaccaggctgtcagccaagggggccaccgacgcaggagccaagccaccgagggcccagatgggagacagagcattgctggagaccccagaggtgaaggccctgcaggacaggctggtggccaccaacttgaagatgagtgacctccgaaaccagatccagtctgtgaagcaggagctgcggatggcacagaaggtctttcagagccagggcttggggcttcttgtgtggctggggctggacttgggaagagcacggctggcacagtggattcctttctggagccatgagtgctcagtcccttgagcacactgcttgctctgggtcaggctccagttccagtccttcctcccaccagcccttggtccataaccatttggtgggcagagtcgctggctacctgagcctgccacccccacccccgcagcatacctgcccttgtggtgcctgcccagctctagactgaggaggacagcactgtccacccagggagagtccattaagccttccctgcactacttgtgccccagtagatcctgggtctccccttaatgtcacccttacttaacttgaaagcctgccaacacctgccttcttctctgctatctgtaacagaaaatgaataggttacttgtgtattaaaggaccctttcaaagg

SEQ ID NO: 3362 - DNA, 821 bp, Homo sapiens
  source 1..821: mol_type = unassigned DNA; mol_type = unassigned DNA
gtgtcggcgtccggaggaggtgacctagccgccgcggtcctagaagggagaagtggagagagaccgctggcaggatggcagcagatgaaagctcacagaacactttgcggctccagttcaaggcaatgcaggagatgcagcacaaacggttacagaagcagatggagaaaaagagggaaaaagaactgagcctcaaaagcagagctgacgaccaagaggagcccttggaggtttcagatggcctcagccttctccacgcaggggagccaaactcgaaaaatagctttgagaagagggtgcttgaagatgagattgaacaccttcgaaatgagctcagggaaacggtggacgagaacgggcgattgtataagctgctgaaggaaagggactttgaaatcaaacacctcaaaaagaaaatagaagaggacagatttgccttcacagggacagccggtgtagccggagacgtggtcgccaccaaaattgtggagctatcaaaaaagaaccggctgttgatggcagaatcagagggtgcaaaaaccagggtgaagcagctgaccaatcgcatccaggagctggagcgggaactgcagacagccctgaccaggctgtcagccaagggggccaccgacgcaggagccaagccaccgagggcccagatgggagacagagcattggctgctcagggcggcccaagcccgagccacactccagaggcctgcaggctcaatccacattccaaccctaggcctccaaagcacattccagagtggagctgaacacccttccctctgcttggggcttcaggaggccgtgatgtg

SEQ ID NO: 3363 - DNA, 557 bp, Homo sapiens
  source 1..557: mol_type = unassigned DNA; mol_type = unassigned DNA
acatatcccaggaggcaatgcgcaggggagcacggaatcgtgaaaaatggaagacagtagcacagacacagaaaaagaagaggaagaggagaaagatgaaaaggatcaagagcccatttatgccatagtgcccacaattaacattcaagatgagcggtttgttgatttatctgaaactccagctttcatttttctgcatgagttacatgctatgggaaaacttcctggaaccagaatggcagcgttaaaagccaagtataccttgctgcatgacgccgtgatgagcacacaagagtcagaggtccaactgctacagaatgccaaacgtttcactgagcaaatacaacagcagcagtttcacctgcagcaagctgataattttccagaagcattctccacggaggtctccaaaatgagagaacaacttctcaagtatcaaaatgaatataatgcagtgaaggaaagagagttccataatcagtacagattaaatagcttaaaggaagaaaaaatcatcatagtaaaagaatttgagaagataacaaagccaggagtaa

SEQ ID NO: 3364 - DNA, 3333 bp, Homo sapiens
  source 1..3333: mol_type = unassigned DNA; mol_type = unassigned DNA
ataccaaggacgcgacttcttgtttggagagggtggagctttggagtgagacccaggaggccaaatcccaaagagaaaaataggagcctaaataaggatcaggaccaagggaagggaatcgtgaaaaatggaagacagtagcacagacacagaaaaagaagaggaagaggagaaagatgaaaaggatcaagagcccatttatgccatagtgcccacaattaacattcaagatgagcggtttgttgatttatctgaaactccagctttcatttttctgcatgagttacatgctatgggaaaacttcctggaaccagaatggcagcgttaaaagccaagtataccttgctgcatgacgccgtgatgagcacacaagagtcagaggtccaactgctacagaatgccaaacgtttcactgagcaaatacaacagcagcagtttcacctgcagcaagctgataattttccagaagcattctccacggaggtctccaaaatgagagaacaacttctcaagtatcaaaatgaatataatgcagtgaaggaaagagagttccataatcagtacagattaaatagcttaaaggaagaaaaaatcatcatagtaaaagaatttgagaagataacaaagccaggagaaatggagaagaagatgaaaatattgagagaaagcactgaagaattacgtaaagaaataatgcagaagaaattagaaattaaaaatttacgagaagatttggcatctaaacaaaagcaattattaaaagagcagaaggaactagaagaattgttgggacatcaggtcgtcctaaaggatgaagtggcccaccatcaaaccattccagtacaaattggaaaagagatagaaaaaataacacgcaaaaaagtagaaatggaaaagaaaaaaattgtcttggaacaagaagtcaaaacgctaaatgactccctaaagaaagttgaaaacaaggttagtgctatagtggatgagaaggaaaatgtaataaaggaagttgaaggcaaacgagccttacttgaaatcaaagaacgagaacataaccaattggtcaagctattggaattagccagagagaatgaagcaacttcattaactgaaagagggatcttggatctcaatttacgcaacagtctcattgacaagcagaactaccatgatgaactttctcgtaagcaaagagagaaagaacgagattttcgaaatttaagaaagatggaactgctcttgaaagtgtcctgggatgcacttaggcaaactcaagcactgcatcaaaggcttctattagagatggaagctatccccaaagatgattctacattatctgagagaaggcgagagcttcacaaggaagttgaagtagctaagaggaatttggcccaacagaaaattatatcagaaatggagtctaagttagtagaacaacaacttgcagaagaaaacaagcttttaaaggagcaagaaaacatgaaagagctagtagtcaaccttctccgcatgactcaaatcaaaattgatgaaaaggaacaaaagtccaaggatttcctgaaagctcagcaaaaatacaccaacattgttaaagaaatgaaagcaaaggatcttgaaatcaggatacacaagaagaaaaaatgtgaaatttatcggagactgagagagtttgctaaactgtatgacaccattcgaaatgaaagaaacaaatttgttaacttactccacaaagctcatcagaaagtaaatgaaataaaagaaaggcataaaatgtcattaaatgaacttgaaattctgagaaatagtgccgttagtcaagaaagaaagctacaaaattccatgctgaaacacgccaacaatgttaccatcagagagagcatgcaaaacgatgtgcgcaaaattgtatcaaaacttcaggaaatgaaagaaaagaaggaagcccagttaaataacattgacagacttgccaacacgatcacaatgatcgaagaggagatggtgcagcttcgcaaaagatacgaaaaagctgttcagcatcgaaatgaaagtggcgttcagctgatagagcgggaagaagaaatatgcattttttatgaaaaaataaatatccaagagaagatgaaactaaatggagaaattgaaatacatctactggaagaaaagatccaattcctgaaaatgaagattgctgagaagcaaagacaaatttgtgtgacccagaaattactgccagccaagaggtccctggatgccgacctagctgtgctccaaattcagttttcacagtgtacagacagaattaaagacctggagaaacagttcgtaaagcctgatggtgagaatagagctcgcttccttccagggaaagatctgaccgaaaaagaaatgatccaaaaattagacaagctggaactacaactggccaagaaggaggagaagctgctggagaaggatttcatctatgagcaggtctccaggctcacagacaggctctgcagcaaaactcagggctgcaagcaggacacactgctcttagccaagaagatgaatggctatcaaagaaggatcaaaaatgcaactgagaaaatgatggctcttgttgctgagctgtccatgaaacaagccctaaccattgaactccaaaaggaagtcagggagaaagaagacttcatcttcacttgcaattccaggatagaaaaaggtctgccactcaataaggaaattgagaaagaatggttgaaagtccttcgagatgaagaaatgcacgccttggccatcgctgaaaagtctcaggagttcttggaagcagataatcgccagctgcccaatggtgtttacacaactgcagagcagcgtccgaatgcctacatcccagaagcagatgccactcttcctttgccaaaaccttatggtgctttggctccttttaaacccagtgaacctggagccaatatgaggcacataaggaaacctgttataaagccagttgaaatctgaatatgtgaacaaatccaggcctctcaaggaaaagacttcaaccaggcttccttgtacccacaggtgaaaaatgtgagcataatacttctaatattattgataagtaaggtaaccacaattagtcagcaacagagtacaacagggtttctatttacccaccaactactatacctttcatgacgttgaatgggacatagaactgtcctacatttatgtcaaagtatatatttgaatcgcttatattttctttttcactctttatattgagtacattccagaaatttgtagtaggcaaggtgctataaaaatgcactaaaaataaatctgttctcaatgaa

SEQ ID NO: 3365 - DNA, 615 bp, Homo sapiens
  source 1..615: mol_type = unassigned DNA; mol_type = unassigned DNA
attcttctaagagagcagcaacaggaccacatatgcaaacttcatctcctactactagattgttcctcaggatcaaggagaaaagcttaaaggaagaaaaaatcatcatagtaaaagaatttgagaagataacaaagccaggagaaatggagaagaagatgaaaatattgagagaaagcactgaagaattacgtaaagaaataatgcagaagaaattagaaattaaaaatttacgagaagatttggcatctaaacaaaagcaattattaaaagagcagaaggaactagaagaattgttgggacatcaggtcgtcctaaaggatgaagtggcccaccatcaaaccattccagtacaaattggaaaagagatagaaaaaataacacgcaaaaaagtgtatgatttaatatttttactttgaatccctgccagtccaagttatgtgtgcacactagaacaagagtactaaccattggacacattaaattactatgataattttagaaatttctgctttgggccctgtctaggttgtttatatcaagttctttaaaagaaagtaatgcaccaaatttctatcattcatagtatttatggcttaattatgggtcaagatt

SEQ ID NO: 3366 - DNA, 2405 bp, Homo sapiens
  source 1..2405: mol_type = unassigned DNA; mol_type = unassigned DNA
gtgtgtgtgtgtgtgtgtgtgtgtgtgtgtatcccctacagagaaatggaaaagaaaaaaattgtcttggaacaagaagtcaaaacgctaaatgactccctaaagaaagttgaaaacaaggttagtgctatagtggatgagaaggaaaatgtaataaaggaagttgaaggcaaacgagccttacttgaaatcaaagaacgagaacataaccaattggtcaagctattggaattagccagagagaatgaagcaacttcattaactgaaagagggatcttggatctcaatttacgcaacagtctcattgacaagcagaactaccatgatgaactttctcgtaagcaaagagagaaagaacgagattttcgaaatttaagaaagatggaactgctcttgaaagtgtcctgggatgcacttaggcaaactcaagcactgcatcaaaggcttctattagagaaaattatatcagaaatggagtctaagttagtagaacaacaacttgcagaagaaaacaagcttttaaaggagcaagaaaacatgaaagagctagtagtcaaccttctccgcatgactcaaatcaaaattgatgaaaaggaacaaaagtccaaggatttcctgaaagctcagcaaaaatacaccaacattgttaaagaaatgaaagcaaaggatcttgaaatcaggatacacaagaagaaaaaatgtgaaatttatcggagactgagagagtttgctaaactgtatgacaccattcgaaatgaaagaaacaaatttgttaacttactccacaaagctcatcagaaagtaaatgaaataaaagaaaggcataaaatgtcattaaatgaacttgaaattctgagaaatagtgccgttagtcaagaaagaaagctacaaaattccatgctgaaacacgccaacaatgttaccatcagagagagcatgcaaaacgatgtgcgcaaaattgtatcaaaacttcaggaaatgaaagaaaagaaggaagcccagttaaataacattgacagacttgccaacacgatcacaatgatcgaagaggagatggtgcagcttcgcaaaagatacgaaaaagctgttcagcatcgaaatgaaagtggcgttcagctgatagagcgggaagaagaaatatgcattttttatgaaaaaataaatatccaagagaagatgaaactaaatggagaaattgaaatacatctactggaagaaaagatccaattcctgaaaatgaagattgctgagaagcaaagacaaatttgtgtgacccagaaattactgccagccaagaggtccctggatgccgacctagctgtgctccaaattcagttttcacagtgtacagacagaattaaagacctggagaaacagttcgtaaagcctgatggtgagaatagagctcgcttccttccagggaaagatctgaccgaaaaagaaatgatccaaaaattagacaagctggaactacaactggccaagaaggaggagaagctgctggagaaggatttcatctatgagcaggtctccaggctcacagacaggctctgcagcaaaactcagggctgcaagcaggacacactgctcttagccaagaagatgaatggctatcaaagaaggatcaaaaatgcaactgagaaaatgatggctcttgttgctgagctgtccatgaaacaagccctaaccattgaactccaaaaggaagtcagggagaaagaagacttcatcttcacttgcaattccaggatagaaaaaggtctgccactcaataaggaaattgagaaagaatggttgaaagtccttcgagatgaagaaatgcacgccttggccatcgctgaaaagtctcaggagttcttggaagcagataatcgccagctgcccaatggtgtttacacaactgcagagcagcgtccgaatgcctacatcccagaagcagatgccactcttcctttgccaaaaccttatggtgctttggctccttttaaacccagtgaacctggagccaatatgaggcacataaggaaacctgttataaagccagttgaaatctgaatatgtgaacaaatccaggcctctcaaggaaaagacttcaaccaggcttccttgtacccacaggtgaaaaatgtgagcataatacttctaatattattgataagtaaggtaaccacaattagtcagcaacagagtacaacagggtttctatttacccaccaactactatacctttcatgacgttgaatgggacatagaactgtcctacatttatgtcaaagtatatatttgaatcgcttatattttctttttcactctttatattgagtacattccagaaatttgtagtaggcaaggtgctataaaaatgcactaaaaataaatctgttctcaatgaagtacggaaatgg

SEQ ID NO: 3367 - DNA, 1554 bp, Homo sapiens
  source 1..1554: mol_type = unassigned DNA; mol_type = unassigned DNA
ttgggactttcagagacattgtggctagccaaccacatggtcagcctcaaagttgagaggctcagtaaccctcctatccctagagaattccaaagtgtggatgtaatttaactagaaagccattggtgactatctgtgatcctctggaagtatgctatgttgtgtatatcttgcatccaaagccagagggaaccacaatgactagtaaaacggtggtctcaatgcccacttagcctctgcctctgaatttgaccatagtggcgttcagctgatagagcgggaagaagaaatatgcattttttatgaaaaaataaatatccaagagaagatgaaactaaatggagaaattgaaatacatctactggaagaaaagatccaattcctgaaaatgaagattgctgagaagcaaagacaaatttgtgtgacccagaaattactgccagccaagaggtccctggatgccgacctagctgtgctccaaattcagttttcacagtgtacagacagaattaaagacctggagaaacagttcgtaaagcctgatggtgagaatagagctcgcttccttccagggaaagatctgaccgaaaaagaaatgatccaaaaattagacaagctggaactacaactggccaagaaggaggagaagctgctggagaaggatttcatctatgagcaggtctccaggctcacagacaggctctgcagcaaaactcagggctgcaagcaggacacactgctcttagccaagaagatgaatggctatcaaagaaggatcaaaaatgcaactgagaaaatgatggctcttgttgctgagctgtccatgaaacaagccctaaccattgaactccaaaaggaagtcagggagaaagaagacttcatcttcacttgcaattccaggatagaaaaaggtctgccactcaataaggaaattgagaaagaatggttgaaagtccttcgagatgaagaaatgcacgccttggccatcgctgaaaagtctcaggagttcttggaagcagataatcgccagctgcccaatggtgtttacacaactgcagagcagcgtccgaatgcctacatcccagaagcagatgccactcttcctttgccaaaaccttatggtgctttggctccttttaaacccagtgaacctggagccaatatgaggcacataaggaaacctgttataaagccagttgaaatctgaatatgtgaacaaatccaggcctctcaaggaaaagacttcaaccaggcttccttgtacccacaggtgaaaaatgtgagcataatacttctaatattattgataagtaaggtaaccacaattagtcagcaacagagtacaacagggtttctatttacccaccaactactatacctttcatgacgttgaatgggacatagaactgtcctacatttatgtcaaagtatatatttgaatcgcttatattttctttttcactctttatattgagtacattccagaaatttgtagtaggcaaggtgctataaaaatgcactaaaaataaatctgttctcaatgaagtacggaaa

SEQ ID NO: 3368 - DNA, 720 bp, Homo sapiens
  source 1..720: mol_type = unassigned DNA; mol_type = unassigned DNA
gtggtctcaatgcccacttagcctctgcctctgaatttgaccatagtggcgttcagctgatagagcgggaagaagaaatatgcattttttatgaaaaaataaatatccaagagaagatgaaactaaatggagaaattgaaatacatctactggaagaaaagatccaattcctgaaaatgaagattgctgagaagcaaagacaaatttgtgtgacccagaaattactgccagccaagaggtccctggatgccgacctagctgtgctccaaattcagttttcacagtgtacagacagaattaaagacctggagaaacagttcgtaaagcctgatgctggaactacaactggccaagaaggaggagaagctgctggagaaggatttcatctatgagcaggtctccaggctcacagacaggctctgcagcaaaactcagggctgcaagcaggacacactgctcttagccaagaagatgaatggctatcaaagaaggatcaaaaatgcaactgagaaaatgatggctcttgttgctgagctgtccatgaaacaagccctaaccattgaactccaaaaggaagtcagggagaaagaagacttcatcttcacttgcaattccaggatagaaaaaggtctgccactcaataaggaaattgagaaagaatggttgaaagtccttcgagatgaagaaatgcacgccttggccatcgctgaaaagtctcag

SEQ ID NO: 3369 - DNA, 567 bp, Homo sapiens
  source 1..567: mol_type = unassigned DNA; mol_type = unassigned DNA
gcattttttatgaaaaaataaatatccaagagaagatgaaactaaatggagaaattgaaatacatctactggaagaaaagatccaattcctgaaaatgaagattgctgagaagcaaagacaaatttgtgtgacccagaaattactgccagccaagaggtccctggatgccgacctagctgtgctccaaattcagttttcacagtgtacagacagaattaaagacctggagaaacagttcgtaaagcctgatggtgagaatagagctcgcttccttccagggaaagatctgaccgaaaaagaaatgatccaaaaattagacaaggtaaacattattgcttaaaattgcatctgttagctcctcgttgatgtagtttcacagatacctatggtactgtttcatgttatgctgacagacctatccttcattattctagtcactaatatagtccttttgttgtaatctagtcatacattctaagcttgatttagacacttgccaaaagaagttccaatccagtggtttcgagattccaaaggcacatttctctcatgacccaaaggagtaa

SEQ ID NO: 3370 - DNA, 726 bp, Homo sapiens
  source 1..726: mol_type = unassigned DNA; mol_type = unassigned DNA
gggggagatactgctctaattaggaaataagattttgtcttagatgactttttttttattcctcttgaaccaattttcaaacatagctggaactacaactggccaagaaggaggagaagctgctggagaaggatttcatctatgagcaggtctccaggctcacagacaggctctgcagcaaaactcagggctgcaagcaggacacactgctcttagccaagaagatgaatggctatcaaagaaggatcaaaaatgcaactgagaaaatgatggctcttgttgctgagctgtccatgaaacaagccctaaccattgaactccaaaaggaagtcagggagaaagaagacttcatcttcacttgcaattccaggatagaaaaaggtctgccactcaataaggaaattgagaaagaatggttgaaagtccttcgagatgaagaaatgcacgccttggccatcgctgaaaagtctcaggagttcttggaagcagataatcgccagctgcccaatggtgtttacacaactgcagagcagcgtccgaatgcctacatcccagaagcagatgccactcttcctttgccaaaaccttatggtgctttggctccttttaaacccagtgaacctggagccaatatgaggcacataaggaaacctgttataaagccagttgaaatctgaatatgtgaacaaatccaggcctctcaaggaaaagacttcaaccaggctt

SEQ ID NO: 3371 - DNA, 562 bp, Homo sapiens
  source 1..562: mol_type = unassigned DNA; mol_type = unassigned DNA
ggaagtcagggagaaagaagacttcatcttcacttgcaattccaggatagaaaaaggtctgccactcaataaggaaattgagaaagaatggttgaaagtccttcgagatgaagaaatgcacgccttggccatcgctgaaaagtctcaggagttcttggaagcagataatcgccagctgcccaatggtgtttacacaactgcagagcagcgtccgaatgcctacatcccagaagcagatgccactcttcctttgccaaaaccttatggtgctttggctccttttaaacccagtgaacctggagccaatatgaggcacataaggaaacctgttataaagccagttgaaatctgaatatgtgaacaaatccaggcctctcaaggaaaagacttcaaccaggcttccttgtacccacaggtgaaaaatgagtgagaacacgtcagaaatgtggaaggtaaaggttttatcggtgacttttcacgtcaaggatataatgcaatacagttaagagcatcagagagaagaaatatactttccaggtaatcagaacacctagattttttt

SEQ ID NO: 3372 - DNA, 3431 bp, Homo sapiens
  source 1..3431: mol_type = unassigned DNA; mol_type = unassigned DNA
ccggaggaggggacagcattcaggggtgtaccaggccccagaggcagcggaaagggagactgtggggaactaggagcaacagcaggcatggaccaaagcagtgaaggatgtatgaaaaagattagcagtgtgaatcttgacaaacttataaatgacttctcacagatagaaaagaaaatggtagaaaccaatggaaagaacaatatactggatattcagttggaaaaaagtaattgcctattaaaagtaatgcaagcaaaggaggtctccattaaagaagaatgtgctactcttcataatataataaaagggctacaacagaccattgaatatcaacagaatttgaaaggtgaaaatgaacaactaaaaataagtgctgatcttataaaagagaagttaaagtctcatgaacaggaatataagaataatattgccaaacttgtaagtgaaatgaaaatcaaagaggagggatataagaaagaaataagcaaactttatcaggacatgcagagaaaagttgaattaaatgaagaaaagcacaaagaactaatagagaaaaaggagatggaaatttcagagttaaatgcaaagctaagaagtcaagaaaaagaaaaacaaaatgaaataatcaagctacaactagaatttgatgccaaactagcaagagttcagactaaatcaaaatcatatcaggattctactgttttgccacaaagtatctacagaaggaaacttcagcattttcaagaagaaaaaaacaaggagattgcaattcttcgtaataccattcgcgatttagagcaacgcctttctgttggcaaagattctcaccttaagcgtagacggttttgagcttagcagtaaattcattagttggtatttatttaaaagcaatcgaaagtttcacttctgttttcaatatatgcatacagcctacataacaaacgaagtcagctttaaggtttttattgaatttatttggacaaatccgtactgtatccaattctgtactgcattcttgcttaatagtattaaccataaaggaggtcaggtttatagggtttggtttacctattaaaccatcattgactatggaaatacttactaagcaatatagagacagacaatattatctttccccttatatcttttaagacagccactcaagttttagaagagtatgatacaacattagagaaagaaagatacaaaggctttattcatgtgtgatagtaaaaatcaggatgagtcttagatatacaaaagataaatggatatttaaaatagttatatatgcttttttagcaaaatattcacgtgttaagtatttctggatcttaaaatacaaaatccacttattttattagttaaaagtagaagattgaaaagacaaagtaatattgttttgagagataagtaaagaaaaaaatggaaagcatgtctttgttgttcttcctccattctaaactgctaattatccaacagaaacccctaggtcatagtttacgtttctattctcattaaagcaaatagaacactggaaaaagaaaaaaaaagacatattaaccaaaagctgcaatcacctttcagttgctccatcataaaaaatatggtttgagtcaatatttctatgacataaaatttaaaatctggaagccaattcagtagatttctccatgtttgcacaaatctaatttctatttttggttcactaatttggtagtttataaaaatgctggaaatgaaattgtgtctagactaaattggggagtatgtcctattttaaatatttagtttgaaggtcattctcacttttttgcctgattctttcagcgtcaactggcactggcttctgtgggtataagctgctgacttatttgtcaggcagctggaggcaaacgtcactgacaagattcagttatgttctcctctgcccgaagtccctgtcagctacataaagatgggaggttttctttacactgtcaggtgattgcagaccctgttttttcaaatatcagatgtcgacaatggcagcatcagctcctaggagccaactctgaatctgtgggcaatttacagagtaattgatttatacatctctttcgacagagcttcttttgtaaatcttgtaaatcttcacttgctggcatatctcggttctctgggtgaccctgcctatgctgacccttgtgcttatggtggtgatgaaggcctggaggagcaggatgagtaggagcatttggtgctcctggttgctgattctctgaaagctcactgctgccaaggtgctgatgtccatgattgtgatgatgctcatgatggtaatgaggcgatggagtttcaactgttttatccacagtagccaaagatacacgtttacaaaagtcttcatctttgagagtctggaacaaatttataaatcactttttaacaagcttatagagataggaataatgcgtgaaaaatgatttgtagagctaacatgtgaaattccaactagttaattagaatcgagctggctttgtattatattaatgagaaagagtctgatgttagtctcaacacctagacattttattaaaggcttaaaaagaaagccaaaccactgtacttatatttgcagaagcaaatgaagtaaactggcaaaaggaacttggattgcaggaaagtcaaagtaatatcaaatcctaaattcagttgatctgggccgagcatggtggctcatgcctgtaatcccaccactttgggtggccgaggggggcagattacttgggctcaggagtcggagaccagcctgggcaacatggcgagatcctgtctctgcaaaatatacaaaaattagctgggtgtggtgtcagatgcctgtagtcccagctacttgtgaggctgaggtgggaggatcgtttgagcctgcaagatggaggttgcagtgagctcagatggtgccactgcactccagcctgggtgacagagtcagaccctatctcaaaaaaataaaaaataaataaaaaatcagttgaactatatggaaacttctgtacctgtgtcaacggtgcatcttatctaatactatatgatactgtaatctaatattatctctgataattcaaaaatgctaataaactctgctcaaatgtgttagtttttcatacttcatcctatgccaggaaatgttttgaacttcaccaaagctttgctaatgtctccctaccataaggctgtcagctgaaaatagcaaattactgcccgactcccattgaccataatatccattccgcatgatcctagttctttaatttactggaagtctttactgttttgtggtacctactaatcagagactcaaagcctatagatacagaaatgtaacagtaaatctcaacctaaggctaatttgcaaataaaattacaaaatcaacttagaacccaaa

SEQ ID NO: 3373 - DNA, 1237 bp, Homo sapiens
  source 1..1237: mol_type = unassigned DNA; mol_type = unassigned DNA
attcaggggtgtaccaggccccagaggcagcggaaagggagactgtggggaactaggagcaacagcaggcatggaccaaagcagtgaaggatgtatgaaaaagattagcagtgtgaatcttgacaaacttataaatgacttctcacagatagaaaagaaaatggtagaaaccaatggaaagaacaatatactggatattcagttggaaaaaagtaattgcctattaaaagtaatgcaagcaaaggaggtctccattaaagaagaatgtgctactcttcataatataataaaagggctacaacagaccattgaatatcaacagaatttgaaagttgaattaaatgaagaaaagcacaaagaactaatagagaaaaaggagatggaaatttcagagttaaatgcaaagctaagaagtcaagaaaaagaaaaacaaaatgaaataatcaagctacaactagaatttgatgccaaactagcaagagttcagactaaatcaaaatcatatcaggattctactgttttgccacaaagtatctacagaaggaaacttcagcattttcaagaagaaaaaaacaaggagattgcaattcttcgtaataccattcgcgatttagagcaacgcctttctgttggcaaagattctcaccttaagcgtagacggttttgagcttagcagtaaattcattagttggtatttatttaaaagcaatcgaaagtttcacttctgttttcaatatatgcatacagcctacataacaaacgaagtcagctttaaggtttttattgaatttatttggacaaatccgtactgtatccaattctgtactgcattcttgcttaatagtattaaccataaaggaggtcaggtttatagggtttggtttacctattaaaccatcattgactatggaaatacttactaagcaatatagagacagacaatattatctttccccttatatcttttaagacagccactcaagttttagaagagtatgatacaacattagagaaagaaagatacaaaggctttattcatgtgtgatagtaaaaatcaggatgagtcttagatatacaaaagataaatggatatttaaaatagttatatatgcttttttagcaaaatattcacgtgttaagtatttctggatcttaaaatacaaaatccacttattttattagttaaaagtagaagattgaaaagacaaagtaatattgttttgagagataagtaaag

SEQ ID NO: 3374 - DNA, 2378 bp, Homo sapiens
  source 1..2378: mol_type = unassigned DNA; mol_type = unassigned DNA
ctccttttgctttttctggcgggaaaagctcacgcgcacctcccccaactcaactgccgttcgtcgttcgtggatgtccgttgtgtcccgagactaggacgtggctccaggagtgctcgggccagctggtccttttcccatccctccccatgaaggagggaggctggtagctttgccagcagctgcgccgcggcaggggtggcccatggacctgcccgagggcccggtgggtggccccactgcggaaatgtacctccgggagcggcctgaggaggcaaggctgggaatgccggtcagcttggaggagcaaatactcaactccacgttcgaagcttgtgaccctcagaggacaggcactgtggctgtggcccaggtgctggcctacctggaggctgtgacaggccagggcccccaggatgcacgcctccaaacattggccaacagcctggaccccaatggggagggccctaaggccactgtggacttggacactttcctggttgtcatgcgtgactggattgctgcctgtcaactacatgggggattagagctggaagaggagaccgccttccagggagccctgacctcccggcaactgccatctggatgcccagaagctgaggagccagccaacctggagagcttcggaggcgaagaccccagacccgagctacaagccacagctgacctgctgagcagcctggaggacctggagctcagcaaccgacgtctggttggggagaatgccaaattgcagcggagcatggagacagctgaggaggggtcagcacgccttggggaggagatcttggctctgcgtaagcagcttcacagcacccagcaggccctgcagtttgccaaggccatggatgaggagctggaggacctgaagactctggccaggagcctggaggaacagaatcgcagccttctggcccaagcccggcaggcggaaaaggagcagcagcatctggtggctgagatggagactctgcaggaggagaacgggaagctgcttgccgagcgggatggagtgaaaaagagaagtcaggagctggccatggagaaggacactttgaagcggcagctctttgagtgtgaacacctcatttgccaaagagacaccatcctctctgagcgcactcgcgatgtggagagcctggcccagaccctggaagaatacagagtgacgacgcaggaactgaggctggagatttcacgcctggaggagcagctgagtcagacctatgaggggcccgatgagctacctgaaggggcccagctgagaagagtgggctggaccgagctgctacccccatcgctgggcttggagatcgaggccattcgacagaaacaggaagtggcaactgctgatctctccaaccctctgtgtggggtgtggcagtgggaggaagtcatccatgagaccagtgaggaaactgagtttccatctgaagccccagctgggggacagagaaacttccagggagagccagcgcaccctgaagaaggaaggaaggagccatccatgtggttgaccagaagagaggaagaggaggatgcagagagccaggtcacggctgatctccctgtccctctaggagcccctcgccctggagacatcccagaaaaccctccagagagacctgcgcggcgggaactccagcaagccctggtgcctgtgatgaaaaagctggtcccagtcaggaggagggcctggggccagctctgcctgcccccacagcggctcagagtcactcgacatccactgatcccagctcctgtcctgggcctgctgctgctgctgctgctctctgtcctgctgcttggcccgtccccacctcccacctggccccacctccagctctgctacctccagccccctccagtgtgagaggctctacttgcccctcagagcagtgtctagctcaataaatcccctggccctctctccactgggatccccattgttagtccactgttgcgcaggcttaccctagatagagtacaggggatccacatccctgtatttttatgtgaagtctcctagttttttaatgctgacatttcttaacaatagcaaaactcccccagtaatggattaagcactaaggattattccctcacaaaacaagcctggcgagggcagctgtgggcacacagctaagtctcggttgccttggggtcagggcctcagtgattctcctgtcccctccctcatgctcaggagttggcagttgtagcttcctacatcacatctgcgggaaacggaaatttcttccttcctttttataaagagaggcagtagcctcagtgtgcagtgggtagattcaaatcatattcataataaaagagaagcagttgcctgcccagagcca

SEQ ID NO: 3375 - DNA, 530 bp, Homo sapiens
  source 1..530: mol_type = unassigned DNA; mol_type = unassigned DNA
tccttttgctttttctggcgggaaaagctcacgcgcacctcccccaactcaactgccgttcgtcgttcgtggatgtccgttgtgtcccgagactaggacgtggctccagtgtacctccgggagcggcctgaggaggcaaggctgggaatgccggtcagcttggaggagcaaatactcaactccacgttcgaagcttgtgaccctcagaggacaggtggtgggggcatgaggggtgctggggaccagtgcgggcaggatggggtggaggctgggaactggggagcctcagagagaagactgggctaaggccccctcttgggggtattgtaagaacaaagtgggtgattatgggaagcttcaggaagaagaacgtggataatggggtgaaggccttttagaatgaggaaaacttgggggacgttgatggaagagggcagagttttggggtcgtgggataggggagggaggcagccaccatggtggcgtggggcatggctgatgctgtccctatgtccatcccctttggttta

SEQ ID NO: 3376 - DNA, 570 bp, Homo sapiens
  source 1..570: mol_type = unassigned DNA; mol_type = unassigned DNA
gttcgtggatgtccgttgtgtcccgagactaggacgtggctccaggagtgctcgggccagctggtccttttcccatccctccccatgaaggagggaggctggtagctttgccagcagctgcgccgcggcaggggtggcccatggacctgcccgagggcccggtgggtggccccactgcggaaagaaagaggtaacaccaaccccattttccagaggaagaaactgaggcccaagagaagttgagtccattgccccagtgtacctccgggagcggcctgaggaggcaaggctgggaatgccggtcagcttggaggagcaaatactcaactccacgttcgaagcttgtgaccctcagaggacaggcactgtggctgtggcccaggtgctggcctacctggaggctgtgacaggccagggcccccaggatgcacgcctccaaacattggccaacagcctggaccccaatggggagggccctaaggccactgtggacttggacactttcctggttgtcatgcgtgactggattgctgcctgtcaactacatgggggattagagctggaagagga

SEQ ID NO: 3377 - DNA, 2014 bp, Homo sapiens
  source 1..2014: mol_type = unassigned DNA; mol_type = unassigned DNA
gttcgtggatgtccgttgtgtcccgagactaggacgtggctccagggtgttccagaccctggaagggcctctcttcaaagacccgtgtttccagaacggtggcagcgggctcacgtggcttggggagagcaggcactgggggagctgggtgaggacaggcgagcccaggctcgactggtggccccaaggggcgcccgtgcccgctgtgatgatagcagcgcccaggtctctctctagcccccagagtgcggccactaaggttttgggtcggcctgggtggaatggaggcaggatggggccccccaaactcctgtcactgctgcagggactgcccagagcagctgcaagtggggctggcagggatgaggaggaggtggcctgggcttgggggaccatgtacatcctgagttggaacccaggggagcagcaggtttggggccatgatgaggagagacctaggggttgcccgacggagagaaaagggacaggaagaggcaggagcttcagagactactcaatgccactctagcctgagggactggaacttagtccgggggcattagggagccatgggaggatcaggagcaggggcaagtcaggatcaaactcccatgagaagccagccggccaaatccaggctgatgtggcaagaatggcagctgcccagggctgtgtgggagccagacacggcccctcgcttcccggaagaggccacgtgaagccgaagcaggatgcaggagggcgtcccaggcagagacctgggcatgggagcggtccgcagctcagagtggctggagcatcatgtgcgatttggggtgctgaggagtgctcgggccagctggtccttttcccatccctccccatgaaggagggaggctggtagctttgccagcagctgcgccgcggcaggggtggcccatggacctgcccgagggcccggtgggtggccccactgcggaaatgtacctccgggagcggcctgaggaggcaaggctgggaatgccggtcagcttggaggagcaaatactcaactccacgttcgaagcttgtgaccctcagaggacaggcactgtggctgtggcccaggtgctggcctacctggaggctgtgacaggccagggcccccaggatgcacgcctccaaacattggccaacagcctggaccccaatggggagggccctaaggccactgtggacttggacactttcctggttgtcatgcgtgactggattgctgcctgtcaactacatgggggattagagctggaagaggagaccgccttccagggagccctgacctcccggcaactgccatctggatgcccagaagctgaggagccagccaacctggagagcttcggaggcgaagaccccagacccgagctacaagccacagctgacctgctgagcagcctggaggacctggagctcagcaaccgacgtctggttggggagaatgccaaattgcagcggagcatggagacagctgaggaggggtcagcacgccttggggaggagatcttggctctgcgtaagcagcttcacagcacccagcaggccctgcagtttgccaaggccatggatgaggagctggaggacctgaagactctggccaggagcctggaggaacagaatcgcagccttctggcccaagcccggcaggcggaaaaggagcagcagcatctggtggctgagatggagactctgcaggaggaggtgagcggaggcccagcaccacccccaccccttccccagtccttaaggtcttcttgacaccactcccttctgcccccaacaccccagcagcctgtcttggggagacctcagaatgtcagtagtgtgggaatgtccctgaggttatatcacactgtgagaacagccgtggtttacaagagtgtgaggcatggggtcagcctacatggcttcaggctgaggccacctacataagagtggaccagtgcctcccttctctgtgcctcagttgcctcacctataaagatgaacaaaacaatgg

SEQ ID NO: 3378 - DNA, 570 bp, Homo sapiens
  source 1..570: mol_type = unassigned DNA; mol_type = unassigned DNA
gtggatgtccgttgtgtcccgagactaggacgtggctccaggagtgctcgggccagctggtccttttcccatccctccccatgaaggagggaggctggtagctttgccagcagctgcgccgcggcaggggtggcccatggacctgcccgagggcccggtgggtggccccactgcggaaatgtacctccgggagcggcctgaggaggcaaggctgggaatgccggtcagcttggaggagcaaatactcaactccacgttcgaagcttgtgaccctcagaggacaggtggtgggggcatgaggggtgctggggaccagtgcgggcaggatggggtggaggctgggaactggggagcctcagagagaagactgggctaaggccccctcttgggggtattgtaagaacaaagtgggtgattatgggaagcttcaggaagaagaacgtggataatggggtgaaggccttttagaatgaggaaaacttgggggacgttgatggaagagggcagagttttggggtcgtgggataggggagggaggcagccaccatggtggcgtggggcatggctgat

SEQ ID NO: 3379 - DNA, 473 bp, Homo sapiens
  source 1..473: mol_type = unassigned DNA; mol_type = unassigned DNA
gttgtgtcccgagactaggacgtggctccaggagtgctcgggccagctggtccttttcccatccctccccatgaaggagggaggctggtagctttgccagcagctgcgccgcggcaggggtggcccatggacctgcccgagggcccggtgggtggccccactgcggaaagtgctccagaaggagagactgccctgttggctgggaccccagagcaactcctgactcactgtgggagctcacttactgttgagtgaacggacggatgaaagaggtaacaccaaccccattttccagaggaagaaactgaggcccaagagaagttgagtccattgccccagtgtacctccgggagcggcctgaggaggcaaggctgggaatgccggtcagcttggaggagcaaatactcaactccacgttcgaagcttgtgaccctcagaggacaggcactgtggctgtggcccaggtgctggcc

SEQ ID NO: 3380 - DNA, 564 bp, Homo sapiens
  source 1..564: mol_type = unassigned DNA; mol_type = unassigned DNA
gtgtcccgagactaggacgtggctccaggagtgctcgggccagctggtccttttcccatccctccccatgaaggagggaggctggtagctttgccagcagctgcgccgcggcaggggtggcccatggacctgcccgagggcccggtgggtggccccactgcggaaagaaagaggtaacaccaaccccattttccagaggaagaaactgaggcccaagagaagttgagtccattgccccaggtgccaccacttgtctgaggccaagcctcggttgccccctggatctaccccgtcctgcagcctgtgctcagtgagctgctgcacccagctgttcaaggccagggcagggagcctagaagttcacttccagccctgggagagaggctgggccagcccagtggctcctgcagttgaggatctcttcctatgtcatggagcatttgttgagcacctgccatctgcaggtgttgtggctacaacagtagacaaatagaccccaggacgtgtgtgtgtgtgtgtgtgtgtgtgtgtgtgtgtgtgtacatgcgtgtgcttcacatacac

SEQ ID NO: 3381 - DNA, 531 bp, Homo sapiens
  source 1..531: mol_type = unassigned DNA; mol_type = unassigned DNA
tgtcccgagactaggacgtggctccaggagtgctcgggccagctggtccttttcccatccctccccatgaaggagggaggctggtagctttgccagcagctgcgccgcggcaggggtggcccatggacctgcccgagggcccggtgggtggccccactgcggaaattcaggtgctccagaaggagagactgccctgttggctgggaccccagagcaactcctgactcactgtgggagctcacttactgttgagtgaacggacggattgtacctccgggagcggcctgaggaggcaaggctgggaatgccggtcagcttggaggagcaaatactcaactccacgttcgaagcttgtgaccctcagaggacaggcactgtggctgtggcccaggtgctggcctacctggaggctgtgacaggccagggcccccaggatgcacgcctccaaacattggccaacagcctggaccccaatggggagggccctaaggccactgtggacttggacactttcctggttgtcatgcgtga

SEQ ID NO: 3382 - DNA, 768 bp, Homo sapiens
  source 1..768: mol_type = unassigned DNA; mol_type = unassigned DNA
cgtggctccaggagtgctcgggccagctggtccttttcccatccctccccatgaaggagggaggctggtagctttgccagcagctgcgccgcggcaggggtggcccatggacctgcccgagggcccggtgggtggccccactgcggaaagaaagaggtaacaccaaccccattttccagaggaagaaactgaggcccaagagaatgtacctccgggagcggcctgaggaggcaaggctgggaatgccggtcagcttggaggagcaaatactcaactccacgttcgaagcttgtgaccctcagaggacaggcactgtggctgtggcccaggtgctggcctacctggaggctgtgacaggccagggcccccaggatgcacgcctccaaacattggccaacagcctggaccccaatggggagggccctaaggccactgtggacttggacactttcctggttgtcatgcgtgactggattgctgcctgtcaactacatgggggattagagctggaagaggagaccgccttccagggagccctgacctcccggcaactgccatctggatgcccagaagctgaggagccagccaacctggagagcttcggaggcgaagaccccagacccgagctacaagccacagctgacctgctgagcagcctggaggacctggagctcagcaaccgacgtctggttggggagaatgccaaattgcagcggagcatggagacagctgaggaggggtcagcacgccttggggaggagatcttgg

SEQ ID NO: 3383 - DNA, 776 bp, Homo sapiens
  source 1..776: mol_type = unassigned DNA; mol_type = unassigned DNA
cgaaatcctagcgaagcccccccatattgtgggagagatacccctgcgtcagggccccccagatcctgaccacttgggaggccgaggcgggcggatcacgaggagtgctcgggccagctggtccttttcccatccctccccatgaaggagggaggctggtagctttgccagcagctgcgccgcggcaggggtggcccatggacctgcccgagggcccggtgggtggccccactgcggaaatgtacctccgggagcggcctgaggaggcaaggctgggaatgccggtcagcttggaggagcaaatactcaactccacgttcgaagcttgtgaccctcagaggacaggcactgtggctgtggcccaggtgctggcctacctggaggctgtgacaggccagggcccccaggatgcacgcctccaaacattggccaacagcctggaccccaatggggagggccctaaggccactgtggacttggacactttcctggttgtcatgcgtgactggattgctgcctgtcaactacatgggggattagagctggaagaggagaccgccttccagggagccctgacctcccggcaactgccatctggatgcccagaagctgaggagccagccaacctggagagcttcggaggcgaagaccccagacccgagctacaagccacagctgacctgctgagcagcctggaggacctggagctcagcaaccgacgtctggttggggagaatgccaaattgcagcggagcatggagacagctgaggagggg

SEQ ID NO: 3384 - DNA, 2052 bp, Homo sapiens
  source 1..2052: mol_type = unassigned DNA; mol_type = unassigned DNA
caactccacgttcgaagcttgtgaccctcagaggacaggcactgtggctgtggcccaggtgctggcctacctggaggctgtgacaggccagggcccccaggatgcacgcctccaaacattggccaacagcctggaccccaatggggagggccctaaggccactgtggacttggacactttcctggttgtcatgcgtgactggattgctgcctgtcaactacatgggggattagagctggaagaggagaccgccttccagggagccctgacctcccggcaactgccatctggatgcccagaagctgaggagccagccaacctggagagcttcggaggcgaagaccccagacccgagctacaagccacagctgacctgctgagcagcctggaggacctggagctcagcaaccgacgtctggttggggagaatgccaaattgcagcggagcatggagacagctgaggaggggtcagcacgccttggggaggagatcttggctctgcgtaagcagcttcacagcacccagcaggccctgcagtttgccaaggccatggatgaggagctggaggacctgaagactctggccaggagcctggaggaacagaatcgcagccttctggcccaagcccggcaggcggaaaaggagcagcagcatctggtggctgagatggagactctgcaggaggagaacgggaagctgcttgccgagcgggatggagtgaaaaagagaagtcaggagctggccatggagaaggacactttgaagcggcagctctttgagtgtgaacacctcatttgccaaagagacaccatcctctctgagcgcactcgcgatgtggagagcctggcccagaccctggaagaatacagagtgacgacgcaggaactgaggctggagatttcacgcctggaggagcagctgagtcagacctatgaggggcccgatgagctacctgaaggggcccagctgagaagagtgggctggaccgagctgctacccccatcgctgggcttggagatcgaggccattcgacaggaagtggcaactgctgatctctccaaccctctgtgtggggtgtggcagtgggaggaagtcatccatgagaccagtgaggaaactgagtttccatctgaagccccagctgggggacagagaaacttccagggagagccagcgcaccctgaagaaggaaggaaggagccatccatgtggttgaccagaagagaggaagaggaggatgcagagagccaggtcacggctgatctccctgtccctctaggagcccctcgccctggagacatcccagaaaaccctccagagagacctgcgcggcgggaactccagcaagccctggtgcctgtgatgaaaaagctggtcccagtcaggaggagggcctggggccagctctgcctgcccccacagcggctcagagtcactcgacatccactgatcccagctcctgtcctgggcctgctgctgctgctgctgctctctgtcctgctgcttggcccgtccccacctcccacctggccccacctccagctctgctacctccagccccctccagtgtgagaggctctacttgcccctcagagcagtgtctagctcaataaatcccctggccctctctccactgggatccccattgttagtccactgttgcgcaggcttaccctagatagagtacaggggatccacatccctgtatttttatgtgaagtctcctagttttttaatgctgacatttcttaacaatagcaaaactcccccagtaatggattaagcactaaggattattccctcacaaaacaagcctggcgagggcagctgtgggcacacagctaagtctcggttgccttggggtcagggcctcagtgattctcctgtcccctccctcatgctcaggagttggcagttgtagcttcctacatcacatctgcgggaaacggaaatttcttccttcctttttataaagagaggcagtagcctcagtgtgcagtgggtagattcaaatcatattcataataaaagagaagcagttgcctgcccag

SEQ ID NO: 3385 - DNA, 800 bp, Homo sapiens
  source 1..800: mol_type = unassigned DNA; mol_type = unassigned DNA
gcaatccccctgcctgtggctggtgaggactgaggggcagctacagtggggcgctaagcctcatccctttgatacaggggattagagctggaagaggagaccgccttccagggagccctgacctcccggcaactgccatctggatgcccagaagctgaggagccagccaacctggagagcttcggaggcgaagaccccagacccgagctacaagccacagctgacctgctgagcagcctggaggacctggagctcagcaaccgacgtctggttggggagaatgccaaattgcagcggagcatggagacagctgaggaggggtcagcacgccttggggaggagatcttggctctgcgtaagcagcttcacagcacccagcaggccctgcagtttgccaaggccatggatgaggagctggaggacctgaagactctggccaggagcctggaggaacagaatcgcagccttctggcccaagcccggcaggcggaaaaggagcagcagcatctggtggctgagatggagactctgcaggaggagaacgggaagctgcttgccgagcgggatggagtgaaaaagagaagtcaggagctggccatggagaaggacactttgaagcggcagctctttgagtgtgaacacctcatttgccaaagagacaccatcctctctgagcgcactcgcgatgtggagagcctggcccagaccctggaagaatacagagtgacgacgcaggaactgaggctggagatttcacgcctggaggagcagctgagtcagacctatgaggggcccgatga

SEQ ID NO: 3386 - DNA, 658 bp, Homo sapiens
  source 1..658: mol_type = unassigned DNA; mol_type = unassigned DNA
aatgagtcaggggctgtggacagtgacctgaaccccttccttgcccctagacaagccacagctgacctgctgagcagcctggaggacctggagctcagcaaccgacgtctggttggggagaatgccaaattgcagcggagcatggagacagctgaggaggggtcagcacgccttggggaggagatcttggctctgcgtaagcagcttcacagcacccagcaggccctgcagtttgccaaggccatggatgaggagctggaggacctgaagactctggccaggagcctggaggaacagaatcgcagccttctggcccaagcccggcaggcggtgggtctggcccaggggaaggaaggtgccctctctcttctttgtttcctggagtcagggcggcagagtgtgactatggagtaggaaggggcagaggtcacctggctttctccctctctccaggccctgctcaccctagactttttcaagcttacctgccatccttctcatgacaaaggagacagcaggagccatcagggcttcccagacccattcccccaggccctggttgtgttttcaggggtgggagaagggcaacatgggggcaaggaggctagaaatgaaacctttgtcctctctctggggttggtcaggaaaaggagcagca

SEQ ID NO: 3387 - DNA, 1039 bp, Homo sapiens
  source 1..1039: mol_type = unassigned DNA; mol_type = unassigned DNA
cccagaccctggaagaatacagagtgacgacgcaggaactgaggctggagatttcacgcctggaggagcagctgagtcagacctatgaggggcccgatgagctacctgaaggggcccagctgagaagagtgggctggaccgagctgctacccccatcgctgggcttggagatcgaggccattcgacagaaacaggaagtggcaactgctgatctctccaaccctctgtgtggggtgtggcagtgggaggaagtcatccatgagaccagtgaggaaactgagtttccatctgaagccccagctgggggacagagaaacttccagggagagccagcgcaccctgaagaaggaaggaaggagccatccatgtggttgaccagaagagaggaagaggaggatgcagagagccaggtcacggtaggcagtccccagcacccctccccagtccccatccactccacacccacagaggctgagtcgtttcaactcttcccaagccccagcctcacactccaactcctcaggagcagagagaaaaatcatttggccaagagataacaaggcctttgctgtagctaatgagagcgatggtgaggtggggggaggcctggaggctagtgggcggccaggctgctcccaggggaccctcccagccacacacacagggctgcagccaccacaccgcaggcctcatagacgtggctacacccccggattgcataaatgcacacgcacatgcgcccacactcgggagaggttgggccggccctccccagccagcctcagaactccctgggggcgtagtgcccgcagcccccctgcctgcagccacacaggccagttcctctgctcctcagagcccagtgcccggtgggggttaagatttccattctcaggcaaggacggggaaagaaacttggtaaggagaggtgaggagccctcagttgtgagctgaggaatgcaggagctgggctggagtctgcctgttgtgggtcaggcactgtcagggcccctggggctcttcagggtccaaaccggcc

SEQ ID NO: 3388 - DNA, 452 bp, Homo sapiens
  source 1..452: mol_type = unassigned DNA; mol_type = unassigned DNA
aggtctaggctgtctgtctccctaggaactgaggctggagatttcacgcctggaggagcagctgagtcagacctatgaggggcccgatgagtgagtggaatttcaaggggtaggaggaggcaggaggggagcctaagggcagggacaccctggcctccagccccaaggtgggcagggaagggaggccagcatgagctgactgagtggccaccaggcacagaggccatcttcctccctccttcctgtgtggccaggctacctgaaggggcccagctgagaagagtgggctggaccgagctgctacccccatcgctgggcttggagatcgaggccattcgacagaaacaggaagtggcaactgctgatctctccaaccctctgtgtggggtgtggcagtgggaggaagtcatccatgagaccagtgaggaaactgagtttccatctgaagcccc

SEQ ID NO: 3389 - DNA, 326 bp, Homo sapiens
  source 1..326: mol_type = unassigned DNA; mol_type = unassigned DNA
atggctacgagggagtcttgaagggctgcgtttgcttgtggaacaggaatcaccaatggaccttcttaagaagaagaaacacattcgtacaagggttcatttcccagtggttaaatgtactgagaaaaatacattaacaaagtaactcaaggatacaactgctgtgaattcaaaagacagactactacaggaaaagaacaataatccaaacaaatcttgaaccaatctataaacagaaaacctgttatataaattattatctatttttgcaatacatcaaaatactgtattgatgaaaataaatagataacaaaaaacaatataca

SEQ ID NO: 3390 - DNA, 2616 bp, Homo sapiens
  source 1..2616: mol_type = unassigned DNA; mol_type = unassigned DNA
gtggcaaccggcaatccttggctctggcttaggaggcgctcaagtagagcggcaaaatggccctgagcccctggaccccagggctgggcgctggcgagaagctggtgcaggcggctgccgtctccactggcccctccctggagttatgcaccttaccctccaccctgggctcctcggtcgcggtcgaggcgctggagcagctgtttgttgtggaacaatcactgcaaagtgactattttaaatgtaatgaagaagctaagatctttcttaaggacattgctgtagctgttaagaaattggaagaaatgagaaaagccacaatcgatcttttggagattgaaagcatggaactcaacaaactatactatctattggaaactcttcccaatagcattaagagggaattggaagaatgtgtccgagacgctcgcagattaaatctttttgagataaatacaataaaaatgagaattacaaggacagagaatgaaatagagcttctgaagaagaaaataactgacctgacaaaatataatgaagctctgggggagaagcaggaagagctagcaaggaagcatgcaaggtttgtcctgtcactcaaccaaactatggagaaaaaagccaccaccactgtttacataaatgagacttataccaaaataaacttgaagagagaagacatagcattgcaaaaaaaatgtattcaagaggcagaggagctaatggaaaaagaaagggcagaatatctaataagaaaacaagagttgactgcacagattaatgaatttgaaaatacccgtgaagtaaagagaatggagacttatcaaaagaagaaagaattggataaattacaaactaaaatgtcaaaaataaaagaaacagttactgtttccgcagcggttcttagtgatcacaatttagagatagcacgactacacgaatcaataaggtattgggaacaagaggtcagtgagctaaagaaagaccttgcaattctggaggcgaaactgtgttttttcacagataacaaagaaaaactagatgatatatctaatgatgaaaaaaatgaattcctgaacaagataaaacagctggttgaaacactgcatgctgctcgtatggaatacaaagacctacgagagaaaatgaaaactcttgccagacaatataagattgttttaagtgaggaagaaaaagcttttttgcaaaaacaaaagattcatgatgaaaatcagaaacagctgacatttatttctcagaaagaatactttctgtcacaaaagagagtagacatcaaaaatatggaagaaggactcatcacactccaggaacttcaacaagcaacaaaaacagtgtatcagcaacaaatcaaaatcctgagtgctaacctggaaagagaaagtcagagatgtgttataactcagtggaaaatggcttgcttgagaaaaaagcatgcacgttggacagccaagataaaagctgaaatacaagctattacagaaaaaattcagaatgcagaagttagacgaattgaattacttaacgagaccagtttcagacaacaggagatcagtggatttgtggcacagattgaaaaacttacaacagaattaaaagaagaggagaaagcatttgttaacaaagaaaaaatgttaatgaaagagttaagcaagtatgaggaaatatttgttaaggaaacacaaattaacaaagaaaaggaagaagaactagttgagtatcttccacaacttcaggtggcagaacaagagtataaagagaaaagaagaaagttagaagagctcagtaatattattacagcacaaagacaggaggaagatttactgaacaatcacatttttctgtttacaagggacttttcaagatacattagcaacatggaagatgtaaaacaagaattacaacaattacgagatcaagaaagcaaaaaaaacaaagatcattttgaaactctaaagaacttagaaaatggattctatataaatgaccaaaaagcagatcttctgctcctggaaaataaaaaattaaaagaatatattttatacttgaagaataacatagagaaatacagagaaggacaagaagccctcatgcacacctcaagcgacttgtctcggcaactaatagctcaggaggcacaatataaggatttgtgggctgaatttcagaccacagttaagatcttggtggacaatggtgaagagaccttgcaagacataaacaatctaacagacaagctgcgtgaaagagatgaaaaaatgcagcatgtcagtacatggctacgagggagtcttgaagggctgcgtttgcttgtggaacaggaatcaccaatggaccttcttaagaagaagaaacacattcgtacaagggttcatttcccagtggttaaatgtactgagaaaaatacattaacaaagtaactcaaggatacaactgctgtgaattcaaaagacagactactacaggaaaagtgagtgcacttactttcatattttgcagctgttaatagaagtcttaaacatttaaaatttaactaattcacacaacctccaccaagtatcagtaaataaacttctaaacaataaaaatggataaaca

SEQ ID NO: 3391 - DNA, 573 bp, Homo sapiens
  source 1..573: mol_type = unassigned DNA; mol_type = unassigned DNA
cttccttgttctgctctggttgactgggggagaggtggttttgataagagggtgacatcgttcattagggtctaacaagtggcactgtgataaaatgattaatgaatttgaaaatacccgtgaagtaaagagaatggagacttatcaaaagaagaaagaattggataaattacaaactaaaatgtcaaaaataaaagaaacagttactgtttccgcagcggttcttagtgatcacaatttagagatagcacgactacacgaatcaataaggtattgggaacaagaggtcagtgagctaaagaaagaccttgcaattctggaggcgaaactataacaaagaaaaactagatgatatatctaatgatgaaaaaaatgaattcctgaacaagataaaacagaaatcagaaacagctgacatttatttctcagaaagaatactttctgtcacaaaagagagtagacatcaaaaatatggaagaaggactcatcacactccaggaacttcaacaagcaacaaaaacagtgtatcagcaacaaatcaaaatcctgagtgctaacctggaaagagaaagt

SEQ ID NO: 3392 - DNA, 631 bp, Homo sapiens
  source 1..631: mol_type = unassigned DNA; mol_type = unassigned DNA
aattaaaattcagcatcagatctgttatgattgtttcttccttgttctgctctggttgactgggggagaggtggttttgataagagggtgacatcgttcattagggtctaacaagtggcactgtgataaaatgattaatgaatttgaaaatacccgtgaagtaaagagaatggagacttatcaaaagaagaaagaattggataaattacaaactaaaatgtcaaaaataaaagaaacagttactgtttccgcagcggttcttagtgatcacaatttagagatagcacgactacacgaatcaataaggtattgggaacaagaggtcagtgagctaaagaaagaccttgcaattctggaggcgaaactgtgttttttcacagataacaaagaaaaactagatgatatatctaatgatgaaaaaaatgaattcctgaacaagataaaacaggtaagaaggcagaagtcatgacttttacattataattacatttcatttttagttaatgtttaaaatatgtgagaaatatagaatttttcaaaaggatgtttttcattgaccaataatatggttgtttgtagtaatttaaaaaattttatctcctcccaaagtactttaattatatcaaagagc

SEQ ID NO: 3393 - DNA, 2487 bp, Homo sapiens
  source 1..2487: mol_type = unassigned DNA; mol_type = unassigned DNA
atggccctgagcccctggaccccagggctgggcgctggcgagaagctggtgcaggcggctgccgtctccactggcccctccctggagttatgcaccttaccctccaccctgggctcctcggtcgcggtcgaggcgctggagcagctgtttgttgtggaacaatcactgcaaagtgactattttaaatgtaatgaagaagctaagatctttcttaaggacattgctgtagctgttaagaaattggaagaaatgagaaaagccacaatcgatcttttggagattgaaagcatggaactcaacaaactatactatctattggaaactcttcccaatagcattaagagggaattggaagaatgtgtccgagacgctcgcagattaaatctttttgagataaatacaataaaaatgagaattacaaggacagagaatgaaatagagcttctgaagaagaaaataactgacctgacaaaatataatgaagctctgggggagaagcaggaagagctagcaaggaagcatgcaaggtttgtcctgtcactcaaccaaactatggagaaaaaagccaccaccactgtttacataaatgagacttataccaaaataaacttgaagagagaagacatagcattgcaaaaaaaatgtattcaagaggcagaggagctaatggaaaaagaaagggcagaatatctaataagaaaacaagagttgactgcacagattaatgaatttgaaaatacccgtgaagtaaagagaatggagacttatcaaaagaagaaagaattggataaattacaaactaaaatgtcaaaaataaaagaaacagttactgtttccgcagcggttcttagtgatcacaatttagagatagcacgactacacgaatcaataaggtattgggaacaagaggtcagtgagctaaagaaagaccttgcaattctggaggcgaaactgtgttttttcacagataacaaagaaaaactagatgatatatctaatgatgaaaaaaatgaattcctgaacaagataaaacagctggttgaaacactgcatgctgctcgtatggaatacaaagacctacgagagaaaatgaaaactcttgccagacaatataagattgttttaagtgaggaagaaaaagcttttttgcaaaaacaaaagattcatgatgaaaatcagaaacagctgacatttatttctcagaaagaatactttctgtcacaaaagagagtagacatcaaaaatatggaagaaggactcatcacactccaggaacttcaacaagcaacaaaaacagtgtatcagcaacaaatcaaaatcctgagtgctaacctggaaagagaaagtcagagatgtgttataactcagtggaaaatggcttgcttgagaaaaaagcatgcacgttggacagccaagataaaagctgaaatacaagctattacagaaaaaattcagaatgcagaagttagacgaattgaattacttaacgagaccagtttcagacaacaggagatcagtggatttgtggcacagattgaaaaacttacaacagaattaaaagaagaggagaaagcatttgttaacaaagaaaaaatgttaatgaaagagttaagcaagtatgaggaaatatttgttaaggaaacacaaattaacaaagaaaaggaagaagaactagttgagtatcttccacaacttcaggtggcagaacaagagtataaagagaaaagaagaaagttagaagagctcagtaatattattacagcacaaagacaggaggaagatttactgaacaatcacatttttctgtttacaagggacttttcaagatacattagcaacatggaagatgtaaaacaagaattacaacaattacgagatcaagaaagcaaaaaaaacaaagatcattttgaaactctaaagaacttagaaaatggattctatataaatgaccaaaaagcagatcttctgctcctggaaaataaaaaattaaaagaatatattttatacttgaagaataacatagagaaatacagagaaggacaagaagccctcatgcacacctcaagcgacttgtctcggcaactaatagctcaggaggcacaatataaggatttgtgggctgaatttcagaccacagttaagatcttggtggacaatggtgaagagaccttgcaagacataaacaatctaacagacaagctgcgtgaaagagatgaaaaaatgcagcatgtcagtacatggctacgagggagtcttgaagggctgcgtttgcttgtggaacaggaatcaccaatggaccttcttagtaagcaacagcttagagctttgctggtaacatcaaaagaagaaaaaacgtgtcaactaagtgacttagttatccccaattatgccacaaacattcaattgaacattgatacttatttggggttgaatactcttgtagtgttatccaattctgcctttcacctaagagaattttctagataa

SEQ ID NO: 3394 - DNA, 545 bp, Homo sapiens
  source 1..545: mol_type = unassigned DNA; mol_type = unassigned DNA
gcgttgccttggagaccatgggcgtccagctgcagttgtcgctggaccggccctggctgccttgagagagtcccttcggatttgcgccatgcgcggcggggagaaccggcctcctgctcgagttcagagctcatctgaggttagtttcatcgtttcgttgaaagttaaaaccctaagtcgacgttccccagccgcctaccccccagcagagagtccttccccggggagtcctgccctggggtgccgcctcgaggccagacgtcgtcccgcctggacctgaacctgagtttgggacgggcgatttcccaacctcaggaattggaattgagacaccaaagcctagacgcgtttcctggacgacggcttcccggcaggggcatccagccagcggccaagatgtcgtcagtggggaaggtgacccaggttccgaatgggaaagcctaccagcagatcttccaggctgaggtgcagctggtccactccctggcggccaccaggaagcgggctgcagagcgttctgtgaccctgaagagtggcaggatacc

SEQ ID NO: 3395 - DNA, 2781 bp, Homo sapiens
  source 1..2781: mol_type = unassigned DNA; mol_type = unassigned DNA
atgggcgtccagctgcagttgtcgctggaccggccctggctgccttgagagagtcccttcggatttgcgccatgcgcggcggggagaaccggcctcctgctcgagttcagagctcatctgaggaattggaattgagacaccaaagcctagacgcgtttcctggacgacggcttcccggcaggggcatccagccagcggccaagatgtcgtcagtggggaaggtgacccaggttccgaatgggaaagcctaccagcagatcttccaggctgaggtgcagctggtccactccctggcggccaccaggaagcgggctgcagagcgttctgtgaccctgaagagtggcaggatacccatgatgaagaaggtggagactcctgaaggggaggtgatgtctccccgacagcagaagtggatgcacagcctccccaacgactggatcatggaaaaccctgttctccacagggaaaaggaaagagccaagagggaaaaagcccgagagagtgagaacaccatcgctgcccgagaagtgcggggtctcatggatactatagttcctgagaagataagcaccagcacctttcaaaggcaagcagaacacaagaggaagagctacgagagcgctctggccagctttcaggaggagattgcgcaggtgggaaaggaaatggaacctctcatcgtggacacagggggactttttttgaagaagctgactgagtctgatgaagaaatgaaccgtctcttcctaaaggtggaaaatgacaccaaccttgaggactacaccatccaagccctgctggagctgtgggataaggtggccgggcggttactgctccggaagcaggagattaaggagctggatgaggccctgcactcgctggagttctcccgaaccgataaactaaaaagcgtgttgaagaaatatgcagaagtcatagagaaaacttcctacctcatgcggcccgaagtgtacaggctgataaatgaagaagccatggtcatgaactatgccctgctgggcaaccggaaggctctcgcccagctgtttgtcaacctgatggagtccaccctgcagcaggagctggacagccgccaccgctggcaaggcttggtggacacctggaaggctctcaagaaggaggccctgctgcagagtttcagtgagttcatggccagtgagagtatccatactcccccggctgtgacgaaggagctagaggtcatgctgaagacccagaacgtcctgcagcaaaggcggctgaagcatctctgcaccatctgtgacctcctgccccccagttacagcaaaactcagctgactgagtggcattcttccctcaactccctgaacaaggagctagacacctaccacgtggactgcatgatgcggatccgcctgctgtatgagaagacatggcaggagtgcctgatgcatgtgcagaattgtaagaagcagctgctggactggaaagccttcactgaggaggaggcagagaccctggtgaaccagttcttcttccagatggtgggagcactccagggcaaagtggaggaggacctggagctcttggacaaatccttcgagactctggcagatcagacagagtggcagagttcacacctcttcaagtatttccaggaggtggtacaactgtgggaggcacaccagagcgagctgttggtgcaggagctggagctggagaagaggatggagcagcaccggcagaagcacagcctggagagccaggtgcaggaggcccacctcgataggctcttggaccaactgaggcagcaaagtgacaaagaaacactggcgtttcacctggaaaaggtcaaagattatctgaagaacatgaaatccaggtatgaatgttttcacaccctcctgacaaaggaagtgatggagtacccagcgatcatgctgaaagaactcaactcctacagctctgccctcagccaatacttctttgtgcgtgaaatctttgaacagaacttggctggagaagtcattttcaaattcaggcaaccagaagcacatgaaaaaccctcccagaagagagtgaaaaaactgaggaagaagcaagggtctaaagaggacatgaccagaagtgaggaaagcataagtagtgggacaagtactgccaggtcagtagaagaggtggaagaagaaaacgatcaagaaatggagtccttcataactgaagaggtgctggggcagcagaaaaaatctccactgcatgctaagatggatgagtccaaagaaggctctattcagggactggaagaaatgcaggttgaaagagagggctccttaaacccatccctgaatgaggagaatgtgaagggtcaaggagaaaagaaggaggagtcagaggaggaagatgagaaggaggaagaggaggaggaggagaagctggaggaagagaaggaggagaaggaggcacaggaagagcaagagagtttatctgtgggtgaggaagaagacaaggaagagggtctagaggagatatactatgaggacatggagtccttcacaatctccagtggaaacacttattttgtctttgtacccctggaagaagagcattgtaggaagtcccattccaccttctcagccatgttcatcaacgacacttccagtgccaagttcatagaacaagtgacaattccatcgagactaattttagaaattaagaaacagtgagtaaaaaactattttattctcatcctgttgttctgagttttgtaaacaaggtgaaatattaaaaaaaaaaaaagga

SEQ ID NO: 3396 - DNA, 3040 bp, Homo sapiens
  source 1..3040: mol_type = unassigned DNA; mol_type = unassigned DNA
tgccttgagaggtgctttctgcaggcggggacgcggccaggccggacgcaaggcctccctccaatctaccgggctcagggggacggccaggggctgctcagtctacttggcgggctagggagggggatggcagaggctggttgggtcttctcagcacacagtaggcgcctaattagcgtgacctgaatcagagtcccttcggatttgcgccatgcgcggcggggagaaccggcctcctgctcgagttcagagctcatctgaggaattggaattgagacaccaaagcctagacgcgtttcctggacgacggcttcccggcaggggcatccagccagcggccaagatgtcgtcagtggggaaggtgacccaggttccgaatgggaaagcctaccagcagatcttccaggctgaggtgcagctggtccactccctggcggccaccaggaagcgggctgcagagcgttctgtgaccctgaagagtggcaggatacccatgatgaagaaggtggagactcctgaaggggaggtgatgtctccccgacagcagaagtggatgcacagcctccccaacgactggatcatggaaaaccctgttctccacagggaaaaggaaagagccaagagggaaaaagcccgagagagtgagaacaccatcgctgcccgagaagtgcggggtctcatggatactatagttcctgagaagataagcaccagcacctttcaaaggcaagcagaacacaagaggaagagctacgagagcgctctggccagctttcaggaggagattgcgcaggaaatggaacctctcatcgtggacacagggggactttttttgaagaagctgactgagtctgatgaagaaatgaaccgtctcttcctaaaggtggaaaatgacaccaaccttgaggactacaccatccaagccctgctggagctgtgggataaggtggccgggcggttactgctccggaagcaggagattaaggagctggatgaggccctgcactcgctggagttctcccgaaccgataaactaaaaagcgtgttgaagaaatatgcagaagtcatagagaaaacttcctacctcatgcggcccgaagtgtacaggctgataaatgaagaagccatggtcatgaactatgccctgctgggcaaccggaaggctctcgcccagctgtttgtcaacctgatggagtccaccctgcagcaggagctggacagccgccaccgctggcaaggcttggtggacacctggaaggctctcaagaaggaggccctgctgcagagtttcagtgagttcatggccagtgagagtatccatactcccccggctgtgacgaaggagctagaggtcatgctgaagacccagaacgtcctgcagcaaaggcggctgaagcatctctgcaccatctgtgacctcctgccccccagttacagcaaaactcagctgactgagtggcattcttccctcaactccctgaacaaggagctagacacctaccacgtggactgcatgatgcggatccgcctgctgtatgagaagacatggcaggagtgcctgatgcatgtgcagaattgtaagaagcagctgctggactggaaagccttcactgaggaggaggcagagaccctggtgaaccagttcttcttccagatggtgggagcactccagggcaaagtggaggaggacctggagctcttggacaaatccttcgagactctggcagatcagacagagtggcagagttcacacctcttcaagtatttccaggaggtggtacaactgtgggaggcacaccagagcgagctgttggtgcaggagctggagctggagaagaggatggagcagcaccggcagaagcacagcctggagagccaggtgcaggaggcccacctcgataggctcttggaccaactgaggcagcaaagtgacaaagaaacactggcgtttcacctggaaaaggtcaaagattatctgaagaacatgaaatccaggtatgaatgttttcacaccctcctgacaaaggaagtgatggagtacccagcgatcatgctgaaagaactcaactcctacagctctgccctcagccaatacttctttgtgcgtgaaatctttgaacagaacttggctggagaagtcattttcaaattcaggcaaccagaagcacatgaaaaaccctcccagaagagagtgaaaaaactgaggaagaagcaagggtctaaagaggacatgaccagaagtgaggaaagcataagtagtgggacaagtactgccaggtcagtagaagaggtggaagaagaaaacgatcaagaaatggagtccttcataactgaagaggtgctggggcagcagaaaaaatctccactgcatgctaagatggatgagtccaaagaaggctctattcagggactggaagaaatgcaggttgaaagagagggctccttaaacccatccctgaatgaggagaatgtgaagggtcaaggagaaaagaaggaggagtcagaggaggaagatgagaaggaggaagaggaggaggaggagaagctggaggaagagaaggaggagaaggaggcacaggaagagcaagagagtttatctgtgggtgaggaagaagacaaggaagagggtctagaggagatatactatgaggacatggagtccttcacaatctccagtggaaacacttattttgtctttgtacccctggaagaagagcattgtaggaagtcccattccaccttctcagccatgttcatcaacgacacttccagtgccaagttcatagaacaagtgacaattccatcgagactaattttagaaattaagaaacaccgggcatggtggtgtgtgcctgtaattccagctactcaagaggctgaagcaggagaatcgcctgaacccaggaggcggaggttacagtgaaccaagagagtgctgctgcactcctgactgggagacagagtgaaactccgtctcaaaaaaaaattaaattatatattctatataaggctttgtcagataaataaatggcaaatgttc

SEQ ID NO: 3397 - DNA, 5242 bp, Homo sapiens
  source 1..5242: mol_type = unassigned DNA; mol_type = unassigned DNA
gagcgccgttaacttttccccgaagagcatggcagagtgaagcacaagcaataatcctgtattattcgcgttcccagagtcccttcggatttgcgccatgcgcggcggggagaaccggcctcctgctcgagttcagagctcatctgaggaattggaattgagacaccaaagcctagacgcgtttcctggacgacggcttcccggcaggggcatccagccagcggccaagatgtcgtcagtggggaaggtgacccaggttccgaatgggaaagcctaccagcagatcttccaggctgaggtgcagctggtccactccctggcggccaccaggaagcgggctgcagagcgttctgtgaccctgaagagtggcaggatacccatgatgaagaaggtggagactcctgaaggggaggtgatgtctccccgacagcagaagtggatgcacagcctccccaacgactggatcatggaaaaccctgttctccacagggaaaaggaaagagccaagagggaaaaagcccgagagagtgagaacaccatcgctgcccgagaagtgcggggtctcatggatactatagttcctgagaagataagcaccagcacctttcaaaggcaagcagaacacaagaggaagagctacgagagcgctctggccagctttcaggaggagattgcgcaggtgggaaaggaaatggaacctctcatcgtggacacagggggactttttttgaagaagctgactgagtctgatgaagaaatgaaccgtctcttcctaaaggtggaaaatgacaccaaccttgaggactacaccatccaagccctgctggagctgtgggataaggtggccgggcggttactgctccggaagcaggagattaaggagctggatgaggccctgcactcgctggagttctcccgaaccgataaactaaaaagcgtgttgaagaaatatgcagaagtcatagagaaaacttcctacctcatgcggcccgaagtgtacaggctgataaatgaagaagccatggtcatgaactatgccctgctgggcaaccggaaggctctcgcccagctgtttgtcaacctgatggagtccaccctgcagcaggagctggacagccgccaccgctggcaaggcttggtggacacctggaaggctctcaagaaggaggccctgctgcagagtttcagtgagttcatggccagtgagagtatccatactcccccggctgtgacgaaggagctagaggtcatgctgaagacccagaacgtcctgcagcaaaggcggctgaagcatctctgcaccatctgtgacctcctgccccccagttacagcaaaactcagctgactgagtggcattcttccctcaactccctgaacaaggagctagacacctaccacgtggactgcatgatgcggatccgcctgctgtatgagaagacatggcaggagtgcctgatgcatgtgcagaattgtaagaagcagctgctggactggaaagccttcactgaggaggaggcagagaccctggtgaaccagttcttcttccagatggtgggagcactccagggcaaagtggaggaggacctggagctcttggacaaatccttcgagactctggcagatcagacagagtggcagagttcacacctcttcaagtatttccaggaggtggtacaactgtgggaggcacaccagagcgagctgttggtgcaggagctggagctggagaagaggatggagcagcaccggcagaagcacagcctggagagccaggtgcaggaggcccacctcgataggctcttggaccaactgaggcagcaaagtgacaaagaaacactggcgtttcacctggaaaaggtcaaagattatctgaagaacatgaaatccaggtatgaatgttttcacaccctcctgacaaaggaagtgatggagtacccagcgatcatgctgaaagaactcaactcctacagctctgccctcagccaatacttctttgtgcgtgaaatctttgaacagaacttggctggagaagtcattttcaaattcaggcaaccagaagcacatgaaaaaccctcccagaagagagtgaaaaaactgaggaagaagcaagggtctaaagaggacatgaccagaagtgaggaaagcataagtagtgggacaagtactgccaggtcagtagaagaggtggaagaagaaaacgatcaagaaatggagtccttcataactgaagaggtgctggggcagcagaaaaaatctccactgcatgctaagatggatgagtccaaagaaggctctattcagggactggaagaaatgcaggttgaaagagagggctccttaaacccatccctgaatgaggagaatgtgaagggtcaaggagaaaagaaggaggagtcagaggaggaagatgagaaggaggaagaggaggaggaggagaagctggaggaagagaaggaggagaaggaggcacaggaagagcaagagagtttatctgtgggtgaggaagaagacaaggaagagggtctagaggagatatactatgaggacatggagtccttcacaatctccagtggaaacacttattttgtctttgtacccctggaagaagagcattgtaggaagtcccattccaccttctcagccatgttcatcaacgacacttccagtgccaagttcatagaacaagtgacaattccatcgagactaattttagaaattaagaaacaacttcgagctggcttcttcgagcaccttgagaagtggtttgaccagtgttccctcaacacccgggtcaccgtggccaccaaaatcaatgagctggattcagaactggagctgcatctgcacctgcaccagccaagagcccagcagattgaaaaagacatccacaacgtcagggcagccgagcttttgcttcatcaagagcagttggacagccactgtgctggggtgaccgagacgctgaagaagaagcggctgatgttctgccagttccaagaagagcaaaacgtgaggagcaaaaacttccgccttaagatctatgacatggagcacatcttcttgaatgccaccaggagccaaaagctggtcactctcagcaacacactgcaccaggagttgcttagctatgttgatgtcacccaggtgtccctgcgcagcttccggcagtacttggaggagagtctgggcaaactccgctactcaaatattgagttcatcaaacactgcagattgttttcagagggaggcaacttttctcctaaagaaatcaattcactgtgttcccgactggagaaggaagctgcccggatagagttggttgaaagtgtcatcatgctcaacatggagaagttggagaatgagtacctggaccaggccaatgatgtcatcaacaagtttgaaagcaaattccataacctgtctgtggaccttattttcatagagaaaatccagcggttgctgacgaatctgcaagtgaaaatcaagtgccaggtggcaaaatccaattcgcaaacaaatggattaaatttctctctgcaacagcttcagaacaagataaaaacttgtcaagagtccaggggagagaaaaccacagtgaccacagaagaactcctcagcttcgtccaaacttggaaggaaaaactgagccagaggattcagtaccttaactgcagcctggacagggtgtccatgactgaactggtctttaccaacaccatcctgaaggaccaggaggaagacagtgacatcctgacatcttcagaagcccttgaagaggaggccaagctggacgtggtcacccctgagtccttcacccagctgagccgcgtggggaagcccctgattgaggacccagctgtggatgtgatcaggaagctcctgcaacttcccaacacaaaatggccaacccaccattgtgacaaagatccgtcccagacaggtagaggcgcatgggcctgtgggtctcggggcagcagtgaggcaggggctggtggtgctgtgtgctcacctcctgtcctctgctcctgtcctgggccctcgtcacccaaaggcttcaagcgacatcggtgccagccagaaaactctgggaagaaggctgtacccagtgccagtgctacctctgcaggcagcttcacaccgcaccccaagcccaacaaaatggagagaaagtaccgggtgcttggggacaagcctccccctgctgccgaggattttaaggggatcatcttgaccctcctctgggagagcagtgagaacctgctgacagtcgcagaggagttctaccgtaaagaaaaacgcccagtcaccaggcctgactgcatgtgtgacacctttgaccagtgcgccgagaacattagcaaaaagatcctggagtatcagagccaggcaaataagtaccacaactcctgcctcatagaattacggatccagatcaggagatttgaggagctgctgccccaagtgtgttggctggtgatggagaatttcaaggaacaccactggaaaaagtttttcacctctgtgaaggagatccgaggacagttcgaggaacagcagaagcggctggagaaaagaaaggacaaaaatgcccagaagctccatctaaatcttggacaccccgtacatttccaagaaatggagtctctacacttaagtgaagaggaaaggcaggaagagctggacagcatgattaggatgaacaaggagaagctggaggaatgtaccagaaggaatggccaggttttcataaccaacttggccaccttcaccgagaagttcctactgcagttggatgaggtggtcaccattgacgatgtccaggttgcaaggatggagccccccaaacagaaattatcaatgctcatacgaaggaaactcgctgggctctccctgaaggaagagagtgagaaacccctgattgaacgtggaagcaggaagtggccagggatcaaacccaccgaagtcaccatccaaaacaagattcttctccagccaacatcatcgatttccaccaccaaaaccaccctgggccacctggcggccgtggaagcccgagatgctgtgtacctgaaatatttagcatcatttgaggaggagctaaagaggatccaggatgactgtacatctcagataaaggaggctcagcgctggaaggacagctggaagcagtccctgcacactatccaaggcctgtatgtgtgaccctccgccccaccatgaataaacactttcttatacaga

SEQ ID NO: 3398 - DNA, 689 bp, Homo sapiens
  source 1..689: mol_type = unassigned DNA; mol_type = unassigned DNA
aagtgaggaaagcataagtagtgggacaagtactgccaggtcagtagaagaggtggaagaagaaaacgatcaagaaatggagtccttcataactgaagaggtgctggggcagcagaaaaaatctccactgcatgctaagatggatgagtccaaagaaggctctattcagggactggaagaaatgcaggttgaaagagagggctccttaaacccatccctgaatgaggagaatgtgaagggtcaaggagaaaagaaggaggagtcagaggaggaagatgagaaggaggaagaggaggaggaggagaagctggaggaagagaaggaggagaaggaggcacaggaagagcaagagagtttatctgtgggtgaggaagaagacaaggaagagggtctagaggagatatactatgaggacatggagtccttcacaatctccagtggaaacacttattttgtctttgtacccctggaagaagagcattgtaggaagtcccattccaccttctcagccatgttcatcaacgacacttccagtgccaagttcatagaacaagtgacaattccatcgagactaattttagaaattaagaaacagctggtcactctcagcaacacactgcaccaggagttgcttagctatgttgatgtcacccaggtgtccctgcgcagcttccggcagtacttggagg

SEQ ID NO: 3399 - DNA, 562 bp, Homo sapiens
  source 1..562: mol_type = unassigned DNA; mol_type = unassigned DNA
taagatggatgagtccaaagaaggctctattcagggactggaagaaatgcaggttgaaagagagggctccttaaacccatccctgaatgaggagaatgtgaagggtcaaggagaaaagaaggaggagtcagaggaggaagatgagaaggaggaagaggaggaggaggagaagctggaggaagagaaggaggagaaggaggcacaggaagagcaagagagtttatctgtgggtgagccgagcttttgcttcatcaagagcagttggacagccactgtgctggggtgaccgagacgctgaagaagaagcggctgatgttctgccagttccaagaagagcaaaacgtgaggagcaaaaacttccgccttaagatctatgacatggagcacatcttcttgaatgccaccaggagccaaaagctggtcactctcagcaacacactgcaccaggagttgcttagctatgttgatgtcacccaggtgtccctgcgcagcttccggcagtacttggaggagagtctgggcaaactccgctactcaaatattgagttcatcaaacactgca

SEQ ID NO: 3400 - DNA, 614 bp, Homo sapiens
  source 1..614: mol_type = unassigned DNA; mol_type = unassigned DNA
gtgttcccgactggagaaggaagctgcccggatagagttggttgaaagtgtcatcatgctcaacatggagaagttggagaatgagtacctggaccaggccaatgatgtcatcaacaagtttgaaagcaaattccataacctgtctgtggaccttattttcatagagaaaatccagcggttgctgacgaatctgcaagtgaaaatcaagtgccaggtggcaaaatccaattcgcaaacaaatggattaaatttctctctgcaacagcttcagaacaagataaaaacttgtcaagagtccaggggagagaaaaccgtaagtgttcaatagattctgcatgtgaataataaagatatatcatgctaaagtcataaatgtgaaataaatttacctgtgtgtataggatttctccagcacaaggttggcggggtggggggacatctctgagccttcctacttaacccctgtttcatggaatgaagaaaggaacaaaagagaaagcagccactgttcacctccaacccctcccaggcaagcatggagcagcgtctagtgttgggggaggcctgagtctggcttcctctgacctcactcccttgggatgtcaccaggtgtc

SEQ ID NO: 3401 - DNA, 479 bp, Homo sapiens
  source 1..479: mol_type = unassigned DNA; mol_type = unassigned DNA
aggggctggtggtgctgtgtgctcacctcctgtcctctgctcctgtcctgggccctcgtcacccaaaggcttcaagcgacatcggtgccagccagaaaactctgggaagaaggctgtacccagtgccagtgctacctctgcaggcaggggcagcaaatgtgactcagctgaggggaaaaatcagaaaggggaaaggcaggtccaagcagaggaggggtgagaggagatagcaaggtcaagtgctttcccccatttctcttttcctttattgtaactccagtgattaaaacaaaagctgttcaacttagtatagcttcattgcaagcaaacaagcaaaattccaaggtcagaaaacaaaaagccttcggagaaagtcaagcaccacaaaggagctcccactcccactatgtcagagatccccccagacagcggccccctctcatcagccctctcaccctggagacctcgtctctgggggt

SEQ ID NO: 3402 - DNA, 740 bp, Homo sapiens
  source 1..740: mol_type = unassigned DNA; mol_type = unassigned DNA
gattggttaagcttacatttcattttcctagactatgaccattcattctgagttacgtttgttttctagctagaaactccaggcactggaaccgtgtcagcctgatggcctcctgtttatgatcttaaacacctggtggcctttacagtctgctgggagagatggaggttaatcagccagtcacacaaatcaatcccaaatccacctgattagcatgtcataaggctgagggggcattaatccaagatcattaaagccaggtggtcagaaattgcagctgagctggggtctgaggaagggcaggaacaaatacaaccaagaagagaagaaagttagctgctgttatggagtggaatcagagtgtgcagaggtcctggggcagcagtgagtaatttcaaggagtgtcacggccaaaacagagcacttggaaagttctgttcatgtggttttgtccatgtttgtgtgtctagaccaggcccctcagggatctgtctcgtgtgtgttgcagggattttaaggggatcatcttgaccctcctctgggagagcagtgagaacctgctgacagtcgcagaggagttctaccgtaaagaaaaacgcccagtcaccaggcctgactgcatgtgtgacacctttgaccagtgcgccgagaacattagcaaaaagatcctggagtatcagagccaggcaaataagtaccacaactcctgcctcatagaattacggatccagatcaggaga

SEQ ID NO: 3403 - DNA, 7884 bp, Homo sapiens
  source 1..7884: mol_type = unassigned DNA; mol_type = unassigned DNA
gggagacctagaatcaaggcaatagttgaaataatggatgagaacttgcccaaaatgccaagagacacagtgcattttaaatgagatgagaagtccgcagagtatataggagaagccctttgaatttatttaagcctttattttatgttatgttatgttatgttatgttatgttatgttatgttatgttatgttatgttagaaagagggtcttgctctgtggcccaggctagagtgtggtgcaattatagttcaccatagcctcaaactcctgggcttaagcaatcctcccacttcagcctcctgagtagctggcatgtaccaccatgcctggctaatgtttaaatatttttttagagacagggtcttgcccaagctggtcttgaactcctggcctcaagcaatcctcccacctcagcctcccaaagtgctgggattacaggtgtaagccactgcagctggctaaccctgtattttctatactggtttgacctcaggacctcttttgatggaatagctcttaccacgttggagaccaagattttctctttgggaagctgctttgggcctttgttgtagagatcgcctctgcaagttgattctaatctgttccctcccttggcctcttacccgcacttctggcagaattacggatccagatcaggagatttgaggagctgctgccccaagtgtgttggctggtgatggagaatttcaaggaacaccactggaaaaagtttttcacctctgtgaaggagatccgaggacagttcgaggaacagcagaagcggctggagaaaagaaaggacaaaaatgcccagaagctccatctaaatcttggacaccccgtacatttccaagaaatggagtctctacacttaagtgaagaggaaaggcaggaagagctggacagcatgattaggatgaacaaggagaagctggaggtcagtgataccattgattcgccagtccaggcatgctccaaatatagcccgatggacagccactgacagtgccaggtgcagccctttcttggtatcttgcccaaagcaggcatgatcgtggttgggttttgtaggtaaaaatggccattattggctgttttaacttgtatacttttttttttttttttttttttttgagacggagtctcgctctgtcgcccaggccggactgcggactgcagtggcgcaatctcggctcactgcaagctccgcttcccgggttcacgccattctcctgcctcagcctcccgagtagctgggactacaggcgcccgccaccgcgcccggctaatttttttgtatttttagtagagacggggtttcaccgtgttagccaggatggtctcgatctcctgacctcatgatccacccgcctcggcctcccaaagtgctgggattacaggcgtgagccaccgcgcccggcctaacttgtatactttttgacttctaaattaattaattacaaaattactgacgataacttttatttagtgatccatgtctagttttatttcctcttctgtgaattgtctgtgtgtgtcccttggccgtttctgaatcatttattatgtttaaaccagatcacatcttgggagaggcctcctggctgagggccagatgctggttacttggacacagtggatataatggcttgggtccccagatctccctgcagagttcacccatcccctcttcagctggccttggagggatgatcctctcctagcagcactgtgctcaccatgttttttccaggaatgtaccagaaggaatggccaggttttcataaccaacttggccaccttcaccgagaagttcctactgcagttggatgaggtggtcaccattgacgatgtccaggttgcaagtaagaggcaccaccagccttgtgtcatggccctggggggctggtgagggctaggttgggcaggggtctgctttccccaactctatcaaagtgaaaacaagtgatccattgaggggactgattaatttttgttttccttaaaaataattttttgattaaaaagcaaatgccagatggctcaacgtttatatataaaaaatgaaaccctattaagtaaacactcccatactcttggggttagggataccttttctaagtatgacaggagagctagaagccatagagggaatggctggctctttgtagccaaaaaaatcccgaaaaatgtcaaaagatggaaagacaaaccacaaactggaaaagtattcctcacaacttacagatcagagaaagggttaatatccttgtggtacaaagaactctcacaggtcaaatttttaaagagacgaaggacaaacacatgctcttcaaaagagaagcagttcatatggctagtcactgtaaaaaatgctcaacttcactgatgatgaaaaatgaaaatctaagcattatttagatatcatttctcaccaatagcctggcaaagtttttacatttggtaacaacgtaaaagaatgtcaagaaacagagactctgcagagactcttggtagagcgtacatggataccgctgtcatagggaacaatttgtcagtccctgtcaaaattctgagtgtgtagacgtttggcctagcacgtctaattctaggaatttatctgagagaaatacttggacactttttcaaaggtatatgttcaaaaatgttcacagcactgtttgaaatggcaaagaattggaagcaacactaacattgatatacagaaaattcaatgggccaggcacagtggcccacacctgcagtcccagcacttgagaggctgaggtgggtggatctcttgagcccaggagtttgagacaagcctgggcaacatgacaaaacctcatctctactaaaaatttaaagattagctcggtgtggtggtgtgcacgtgtagttccagctcctagaggtggagggcggttgggagggtgctgaggtgggaggattgcttaagtctttaagtcgagactgctgtgagctttgatcataccactgcactccagcctggtgagagagcaagaccgtgactcaaaaataacgaaaattggatgcataaatgagggtgccagatgtgcaggtaaataccacacagctgttaaagtaggtctgcatgtgctgacatggaaagacatgaaggagggctgttgtgtgaaaaaacaaatggacaaacaggacatgtctgtgatcccatcttttaaaacacatgcatgatatcaacatgcatactcacatctgtttaaatgaatctgtgtgagagacagagacagagagacaggtaccaaactgctgatgatcacctctgctgggtgggactgagagagatccctaaaaccttttttctcatcatgaagtgatgtttacatttttaataatgtgcatattacttttataaatataagattaaaatcatacattaaatgttatccatttatcactgatctataaagtaattaaaatgcatcctttttatttgtaaaggtttttaattacaaaaacaataaatgttcattccagtaaaacaagaaaatcagtataaaccaagaagcaagtgaagaacacagtccttccgccctgaaagcagcgccctttgcacttgctgttcatcctgccaggcctttccctttgggcacaggcctgtgtgtcagggtggctggggaagattacagggcttgggcgcttttgcgacctgatttccctgcaggtgaaccttggctgggctggccagtcaacactcctcctcttcagcattttcagttgctgcacaccataatgtaataagcattgtaacttactaattagtccctttgctattgaactttggaccatttccaatttcccactcctgtaattgtgctgaagagaatctctgcatccatgcatctctagagcaacagactcctagaagtgcgatgtctggatcaaagtgtgtacagatttttgaagtgttggtcacttttctctatcagaggtctctgtcaaaggtgagccttgtttgggaaatcagcgccttgcagagatgctggggtcgagaccccagggagaacaggcaggtgagctggtagtggagcagatcacagtgccttgcaaggaacccctgagccaggaagactccctgcaccaggccctaggaggcctctgcctactctgcaactcggcttctgagccaggccaccgggccctgccattcatggcagaggagtgtacatgttacctgctggctctctgcacacagagccccccaccccctcgcccctgatctagaaagaacatcagagcatcaaagattggattattgagctagatagtcaagggacaaccttgaacgtgtttgttccaggggaggttcttagttcggaacccatatgagctagcctaagccaaagaagtctctatgaaccatatccggggactcatggaaactgcagcaacgtcagagcatcaggcttgggtttggagctgggaacagcacccacaccaccgcttagattcctccatccatgaccccctgcccctgtcaccaccccgagctgtgtggctggtgcattcagcttctccatggagagggctcagcctgccataactccaagtgggaggaggggtgccagtcctcccttttctaagtgtaatgccaggggaaatccctcgatctcaggctgtcggtgaggctgcagtcactagcctgtcttttgcctctagggatggagccccccaaacagaaattatcaatgctcatacgaaggaaactcgctgggctctccctgaaggaagagagtgagaaacccctgattgaacgtggaagcaggaagtggccagggatcaaacccaccgaagtcaccatccaaaacaagattcttctccagccaacatcatcgatttccaccaccaaaaccaccctgggccacctggcggccgtggaagcccgagatgctgtgtacctggtgagacagggtggagtgggcgtgtcccagggagcacagctcaggtcggctgccttgggaagggggagcttcccatcacccggcacccaacatttggctggtgcagcaggcaacacatgtcagcacaccccagagctgcaggtctcaacactcaggacagtcaccattcacaggcacgaggacattaatgtgggtctgaggcgtgatcccaatgctgtgggagcccagctgagggacatcccacccagattaggggtgaaggctttccaaaggcacagtagtgtcacagctagggaacattgtcaccaggcacggaagcaatggtagccgtaggctcaggggggacacagcagcaggagcagtcacagctcctgagaacttactgggaagtacttactgagagcttctgctcttgacatgaggcatctcactgaatcctcctaacaactccacaagggaggtaaaattattatcatttcattgatgaggacactgaggcttaaagaaacttgtcccttctatgccactacagagtggcagagccaggatttgatcccagtgcctgtcagaccccctggggacagcctgatgaggaggctacacccagttgccacttgagggacctcttggctttgaagatctgtggacctttggtcctgatgtccagagagaaaccttgtcctgcccagagaccagctggcccccttactgggagaggctgaagtgcccagggtcagccctcccccagcttcccctccaagccccaggcagagggtgcagttcggcctgctgagttcagtgagggtgggaggcctggaaggcccagcctaccaaaaaatcgggagccctgagctcccgagaggccacagtgtgggacagagctcaggaaggagtgctgagcctagagtcagatagacacaggtcctagtccctgctcagcctccttctagctgggtgaccccaggccaggctctgagcctcagttttcctgtcttgtaaaatggggaaaacaactaggactacctggtttctacctgagaagtgacttggagaactcttgccagtgcctggaatgggttaaaaaccacctgccagcaagttacagcattgccctaggggagagggtccagatgtctctcctcatgtggacccctcctgctaccttccttctagaaatatttagcatcatttgaggaggagctaaagaggatccaggatgactgtacatctcagataaaggaggctcagcgctggaaggacagctggaagcagtccctgcacactatccaaggcctgtatgtgtgaccctccgccccaccatgaataaacactttcttatacagactccttccctgtccatctacctgcctacctactttccgtccatccctccctcccttcatccctccacccctgctctgtgccgggcactgtagctttaccagcgaacaggacacagcatggtccctgcccacgtggagccctcttcccatgaggaaggcaagcatgaaaggggaattccacgtggttagcagggagggtgagtaccaggaatcagtcacttcaaataggcaccagagcttcaaaggacatcacctccaaacagcatgctgggcagggcacgtcatcttgaaaaatgaaataaaggtcatgggaaaatgatattttaatttaacagaataaacaagtatgggttataattgcaactctgcactggttcctagacccaacaaataactaatccaatgttgattggtatttgtgccacaatttgtctgagcaaattgcaatattttggaaaaaaaaaaatcttccaggctcctttagtcctgtgttgcccagatcattctcttggagtcctccagcctgccagtctcttgttcgtcaactctcttcttcaattacatggcgtgagcgtacagccttcatttgtcggtagctgtgtgtgtcatctggacaggtttcctcagccatagacctaggaggccccagctcccaaatttccagcccctgaaagctgtgtgaccctccaagtgcagttccctcacctggggacactcactctgctctcctggtttgctccacccagtgaggccctgcttggttagcttggttagcttggtggcctttgtgcactgaagccaggagagtgaggagtccccttccatcaaggcaaaagcaatctcctgttcttttctgtgctccccccacccccaccccaatgtgctacctttcattgcttattattccgaaaggaatatatgcgcattgtagaaaaaagaatttatgaaaccagcaaaaggataactttaaaatcctgagccgggcgcggtggctcacgcctgtaatcctagcactttgggaggccaaggcgagcagatcatctgagctcaggagttcggggccagctgaggcaacatgacgaaaccccatatctactaaaaatacaaaaagttagccaggcatggtggcacacacctgtaatcccagctactggggaggctgaggcatgagaatcgctttaacctgggaggtggaggttgcagtgagccaagatcatgccacttcactctggcctgagcaacagaatgagactctgtctcaaataaacgaataaataaataataaaatcctggaatctagagacagtcactgtccatagcatctttccatgtatgtgagttatttttataaaatggaatcataacatgcattaggttccataaactgcttggtaaatgttaactggataaaccctatgccatatccttcagtattcatttacatcattggttttcatacttttctgactctgacccactgtataaacatgttctaaacacacggtccttgcacacatacacaacttgagaccaacaggtcacaggacagcacttaaccttactagaaaggctgctttctaatattttctccc

SEQ ID NO: 3404 - DNA, 589 bp, Homo sapiens
  source 1..589: mol_type = unassigned DNA; mol_type = unassigned DNA
gtttttcacctctgtgaaggagatccgaggacagttcgaggaacagcagaagcggctggagaaaagaaaggacaaaaatgcccagaagctccatctaaatcttggacaccccgtacatttccaagaaatggagtctctacacttaagtgaagaggaaaggcaggaagagctggacagcatgattaggatgaacaaggagaagctggaggaatgtaccagaaggaatggccaggttttcataaccaacttggccaccttcaccgagaagttcctactgcagttggatgaggtggtcaccattgacgatgtccaggttgcaagtaagaggcaccaccagccttgtgtcatggccctggggggctggtgagggctaggttgggcaggggtctgctttccccaactctatcaaagtgaaaacaagtgatccattgaggggactgattaatttttgttttccttaaaaataattttttgattaaaaagcaaatgccagatggctcaacgtttatatataaaaaatgaaaccctattaagtaaacactcccatactcttggggttagggataccttttctaagtatgacaggaga

SEQ ID NO: 3405 - DNA, 665 bp, Homo sapiens
  source 1..665: mol_type = unassigned DNA; mol_type = unassigned DNA
tctagttttatttcctcttctgtgaattgtctgtgtgtgtcccttggccgtttctgaatcatttattatgtttaaaccagatcacatcttgggagaggcctcctggctgagggccagatgctggttacttggacacagtggatataatggcttgggtccccagatctccctgcagagttcacccatcccctcttcagctggccttggagggatgatcctctcctagcagcactgtgctcaccatgttttttccaggaatgtaccagaaggaatggccaggttttcataaccaacttggccaccttcaccgagaagttcctactgcagttggatgaggtggtcaccattgacgatgtccaggttgcaaggatggagccccccaaacagaaattatcaatgctcatacgaaggaaactcgctgggctctccctgaaggaagagagtgagaaacccctgattgaacgtggaagcaggaagtggccagggatcaaacccaccgaagtcaccatccaaaacaagattcttctccagccaacatcatcgatttccaccaccaaaaccaccctgggccacctggcggccgtggaagcccgagatgctgtgtacctgaaatatttagcatcatttgaggaggagctaaagaggatccaggatgactgtacatc

SEQ ID NO: 3406 - DNA, 3084 bp, Homo sapiens
  source 1..3084: mol_type = unassigned DNA; mol_type = unassigned DNA
aatgccagatggctcaacgtttatatataaaaaatgaaaccctattaagtaaacactcccatactcttggggttagggataccttttctaagtatgacaggagagctagaagccatagagggaatggctggctctttgtagccaaaaaaatcccgaaaaatgtcaaaagatggaaagacaaaccacaaactggaaaagtattcctcacaacttacagatcagagaaagggttaatatccttgtggtacaaagaactctcacaggtcaaatttttaaagagacgaaggacaaacacatgctcttcaaaagagaagcagttcatatggctagtcactgtaaaaaatgctcaacttcactgatgatgaaaaatgaaaatctaagcattatttagatatcatttctcaccaatagcctggcaaagtttttacatttggtaacaacgtaaaagaatgtcaagaaacagagactctgcagagactcttggtagagcgtacatggataccgctgtcatagggaacaatttgtcagtccctgtcaaaattctgagtgtgtagacgtttggcctagcacgtctaattctaggaatttatctgagagaaatacttggacactttttcaaaggtatatgttcaaaaatgttcacagcactgtttgaaatggcaaagaattggaagcaacactaacattgatatacagaaaattcaatgggccaggcacagtggcccacacctgcagtcccagcacttgagaggctgaggtgggtggatctcttgagcccaggagtttgagacaagcctgggcaacatgacaaaacctcatctctactaaaaatttaaagattagctcggtgtggtggtgtgcacgtgtagttccagctcctagaggtggagggcggttgggagggtgctgaggtgggaggattgcttaagtctttaagtcgagactgctgtgagctttgatcataccactgcactccagcctggtgagagagcaagaccgtgactcaaaaataacgaaaattggatgcataaatgagggtgccagatgtgcaggtaaataccacacagctgttaaagtaggtctgcatgtgctgacatggaaagacatgaaggagggctgttgtgtgaaaaaacaaatggacaaacaggacatgtctgtgatcccatcttttaaaacacatgcatgatatcaacatgcatactcacatctgtttaaatgaatctgtgtgagagacagagacagagagacaggtaccaaactgctgatgatcacctctgctgggtgggactgagagagatccctaaaaccttttttctcatcatgaagtgatgtttacatttttaataatgtgcatattacttttataaatataagattaaaatcatacattaaatgttatccatttatcactgatctataaagtaattaaaatgcatcctttttatttgtaaaggtttttaattacaaaaacaataaatgttcattccagtaaaacaagaaaatcagtataaaccaagaagcaagtgaagaacacagtccttccgccctgaaagcagcgccctttgcacttgctgttcatcctgccaggcctttccctttgggcacaggcctgtgtgtcagggtggctggggaagattacagggcttgggcgcttttgcgacctgatttccctgcaggtgaaccttggctgggctggccagtcaacactcctcctcttcagcattttcagttgctgcacaccataatgtaataagcattgtaacttactaattagtccctttgctattgaactttggaccatttccaatttcccactcctgtaattgtgctgaagagaatctctgcatccatgcatctctagagcaacagactcctagaagtgcgatgtctggatcaaagtgtgtacagatttttgaagtgttggtcacttttctctatcagaggtctctgtcaaaggtgagccttgtttgggaaatcagcgccttgcagagatgctggggtcgagaccccagggagaacaggcaggtgagctggtagtggagcagatcacagtgccttgcaaggaacccctgagccaggaagactccctgcaccaggccctaggaggcctctgcctactctgcaactcggcttctgagccaggccaccgggccctgccattcatggcagaggagtgtacatgttacctgctggctctctgcacacagagccccccaccccctcgcccctgatctagaaagaacatcagagcatcaaagattggattattgagctagatagtcaagggacaaccttgaacgtgtttgttccaggggaggttcttagttcggaacccatatgagctagcctaagccaaagaagtctctatgaaccatatccggggactcatggaaactgcagcaacgtcagagcatcaggcttgggtttggagctgggaacagcacccacaccaccgcttagattcctccatccatgaccccctgcccctgtcaccaccccgagctgtgtggctggtgcattcagcttctccatggagagggctcagcctgccataactccaagtgggaggaggggtgccagtcctcccttttctaagtgtaatgccaggggaaatccctcgatctcaggctgtcggtgaggctgcagtcactagcctgtcttttgcctctagggatggagccccccaaacagaaattatcaatgctcatacgaaggaaactcgctgggctctccctgaaggaagagagtgagaaacccctgattgaacgtggaagcaggaagtggccagggatcaaacccaccgaagtcaccatccaaaacaagattcttctccagccaacatcatcgatttccaccaccaaaaccaccctgggccacctggcggccgtggaagcccgagatgctgtgtacctgaaatatttagcatcatttgaggaggagctaaagaggatccaggatgactgtacatctcagataaaggaggctcagcgctggaaggacagctggaagcagtccctgcacactatccaaggcctgtatgtgtgaccctccgccccaccatgaataaacactttcttatacaga

SEQ ID NO: 3407 - DNA, 574 bp, Homo sapiens
  source 1..574: mol_type = unassigned DNA; mol_type = unassigned DNA
agttgaaccgctcgcgaggagggttgctagtggagaagcaaccttggccatggaccagccggctggcctgcaggtggactacgtcttccggggtgtggagcatgccgtgcgggtgatggtttctgggcaggtgctggagctggaggtggaggaccggatgacggctgaccagtggcggggcgagttcgatgctggctgtgagtgtgcctgcctggggtgggctcacctttcctctcctgggatcagcttctcccagaatatcaggccaccctgaatcctgcccacctgcctcttctttgtcaccagaaactctccagtgtggggaggggtgtaggtcttgttgctcaagccagagacactggagtcgggtagaattgcagagcttaggtgcattgccctggggctgggcaagcggtcagacctcaggagagacttttctccccacccagtcattgaagatttgactcacaagacagggaacttcaaacagttcaacatcttctgtcatatgctggagtcagccctcactcaggtagggcccgggttggcgggttggggtgggaggggggttctg

SEQ ID NO: 3408 - DNA, 1817 bp, Homo sapiens
  source 1..1817: mol_type = unassigned DNA; mol_type = unassigned DNA
agttgaaccgctcgcgaggagggttgctagtggagaagcaaccttggccatggaccagccggctggcctgcaggtggactacgtcttccggggtgtggagcatgccgtgcgggtgatggtttctgggcaggtgctggagctggaggtggaggaccggatgacggctgaccagtggcggggcgagttcgatgctggcttcattgaagatttgactcacaagacagggaacttcaaacagttcaacatcttctgtcatatgctggagtcagccctcactcagagtagtgagtcagtcaccctggacctgctgacctacacagacctggagtccctgcggaaccgcaagatggggggccgcccaggctccttggcccccaggtcggcccagctcaactccaagcgctacctgatcctcatctactccgtggagtttgacaggattcactacccgctgcccctcccgtaccagggcaagccagaccccgtggttctgcagggcatcatccggtcactgaaggaggaactgggccgcctgcaagggctggatggccagaacactcgggacacccgggagaatgagatctggcatctgcgggagcaggtgtcgcgcctggcgtccgagaagcgggagctggaggcgcagctgggccgatcgcgcgaggaggcgctggccgggcgcgcggcacgccaggaggccgaggcgctgcgcgggctggtgcgcgggctggagctggagctgcggcaggagcgcggcctcgggcacagggtggccggccgtcgcggccaggactgccgccgtctggccaaggagctcgaggaggcgaaggcatcggagcggagcctgcgcgcccggctgaagacgctgaccagcgagctggcattgtacaagagggggaggcggactccgccggtgcagccgcccccgacgcgggaggaccgggcctcatcgtcccgggagcgctccgcgtcgcgaggccgcggcgccgcgcgctcctcatcccgggagagcggccgcgggagccggggtcggggccgccctgcgcgcccctcgccctcgcccacaggtggtcgcgcgctccgcttcgaccccacggcctttgtgaaagccaaggaaaggaagcagagagagatccagatgaagcagcagcagcggaaccgcttaggcagtgggggaagcggggacggtccgtccgtctcctggtctcgccagacccagccccctgctgccttgactggccgaggggacgcccctaaccgctcccgaaaccgcagctcctcagtggacagtttccgcagccgctgctcgtctgccagctcctgcagcgatttggaggatttctctgagtcgctctccagagggggtcaccgccgccgtgggaagcctcccagcccaacgccctggagtgggtccaatatgaagtctccccccgtggaacgcagccaccatcagaaatctctggccaactccgggggctgggtccccatcaaagagtacagctcggagcaccaggcggctgacatggccgaaatagacgcacgcctgaaggccttgcaggagtacatgaaccgactggacatgcggtcataacgtggagaaggggtactacccctccatcccccacccacttgctgggtatggtgtggggggtggggccagggtggcctccagccctgcccagtccctgccctggccccgtccctcctgctgcccctggggtctcaggtgtgtgaggccctgaccctgccctctccccaggcagtgcatgctgggagggaggatgtgtgcattttgtaaataaacatatttgccctgggga

SEQ ID NO: 3409 - DNA, 433 bp, Homo sapiens
  source 1..433: mol_type = unassigned DNA; mol_type = unassigned DNA
gaaccgctcgcgaggagggttgctagtggagaagcctggatctctgccctgaactccagactcatatcatggccgactcttctctctttggaagttcatctgacattcagacataaacttgtcccaaaccaatcttgcgatttcttcctttcaacctccaaacccagttgatgggacattcatcctgccagcaaccttggccatggaccagccggctggcctgcaggtggactacgtcttccggggtgtggagcatgccgtgcgggtgatggtttctgggcaggtgctggagctggaggtggaggaccggatgacggctgaccagtggcggggcgagttcgatgctggcttcattgaagatttgactcacaagacagggaacttcaaacagttcaacatcttctgtcatatgctggagtcagccctcactcag

SEQ ID NO: 3410 - DNA, 800 bp, Homo sapiens
  source 1..800: mol_type = unassigned DNA; mol_type = unassigned DNA
cgcgaggagggttgctagtggagaagcaaccttggccatggaccagccggctggcctgcaggtggactacgtcttccggggtgtggagcatgccgtgcgggtgatggtttctgggcaggtgctggagctggaggtggaggaccggatgacggctgaccagtggcggggcgagttcgatgctggctagtagtgagtcagtcaccctggacctgctgacctacacagacctggagtccctgcggaaccgcaagatggggggccgcccaggctccttggcccccaggtcggcccagctcaactccaagcgctacctgatcctcatctactccgtggagtttgacaggattcactacccgctgcccctcccgtaccagggcaagccagaccccgtggttctgcagggcatcatccggtcactgaaggaggaactgggccgcctgcaagggctggatggccagaacactcgggacacccgggagaatgagatctggcatctgcgggagcaggtgtcgcgcctggcgtccgagaagcgggagctggaggcgcagctgggccgatcgcgcgaggaggcgctggccgggcgcgcggcacgccaggaggccgaggcgctgcgcgggctggtgcgcgggctggagctggagctgcggcaggagcgcggcctcgggcacagggtggccggccgtcgcggccaggactgccgccgtctggccaaggagctcgaggaggcgaaggcatcggagcggagcctgcgcgcccggctgaagacgctgaccagcgagctggcattgtacaagaggggg

SEQ ID NO: 3411 - DNA, 849 bp, Homo sapiens
  source 1..849: mol_type = unassigned DNA; mol_type = unassigned DNA
agcaaccttggccatggaccagccggctggcctgcaggtggactacgtcttccggggtgtggagcatgccgtgcgggtgatggtttctgggcaggtgctggagctggaggtggaggaccggatgacggctgaccagtggcggggcgagttcgatgctggcttcattgaagatttgactcacaagacagggaacttcaaacagttcaacatcttctgtcatatgctggagtcagccctcactcagagtagtgagtcagtcaccctggacctgctgacctacacagacctggagtccctgcggaaccgcaagatggggggccgcccaggctccttggcccccaggtcggcccagctcaactccaagcgctacctgatcctcatctactccgtggagtttgacaggattcactacccgctgcccctcccgtaccagggcaagccagaccccgtggttctgcagggcatcatccggtcactgaaggaggaactgggccgcctgcaagggctggatggccagaacactcgggacacccgggagaatgagatctggcatctgcgggagcaggtgtcgcgcctggcgtccgagaagcgggagctggaggcgcagctgggccgatcgcgcgaggaggcgctggccgggcgcgcggcacgccaggaggccgaggcgctgcgcgggctggtgcgcgggctggagctggagctgcggcaggagcgcggcctcgggcacagggtggccggccgtcgcggccaggactgccgccgtctggccaaggaggtgagcagcgggggcccggggcggccagcgaggcgcggacctcggcctcagcctggacctccgcgcccctctcc

SEQ ID NO: 3412 - DNA, 1017 bp, Homo sapiens
  source 1..1017: mol_type = unassigned DNA; mol_type = unassigned DNA
agcaaccttggccatggaccagccggctggcctgcaggtggactacgtcttccggggtgtggagcatgccgtgcgggtgatggtttctgggcaggtgctggagctggaggtggaggaccggatgacggctgaccagtggcggggcgagttcgatgctggcttcattgaagatttgactcacaagacagggaacttcaaacagttcaacatcttctgtcatatgctggagtcagccctcactcagagtagtgagtcagtcaccctggacctgctgacctacacagacctggagtccctgcggaaccgcaagatggggggccgcccaggctccttggcccccaggtcggcccagctcaactccaagcgctacctgatcctcatctactccgtggagtttgacaggattcactacccgctgcccctcccgtaccagggcaagccagaccccgtggttctgcagggcatcatccggtcactgaaggaggaactgggccgcctgcaagggctggatggccagaacactcgggacacccgggagaatgagatctggcatctgcgggagcagcagcagcagcggaaccgcttaggcagtgggggaagcggggacggtccgtccgtctcctggtctcgccagacccagccccctgctgccttgactggccgaggggacgcccctaaccgctcccgaaaccgcagctcctcagtggacagtttccgcagccgctgctcgtctgccagctcctgcagcgatttggaggatttctctgagtcgctctccagagggggtcaccgccgccgtgggaagcctcccagcccaacgccctggagtgggtccaatatgaagtctccccccgtggaacgcagccaccatcagaaatctctggccaactccgggggctgggtccccatcaaagagtacagctcggagcaccaggcggctgacatggccgaaatagacgcacgcctgaaggccttgcaggagtacatgaaccgactggacatgcggtcataacgtgg

SEQ ID NO: 3413 - DNA, 291 bp, Homo sapiens
  source 1..291: mol_type = unassigned DNA; mol_type = unassigned DNA
cggtcataacgtggagaaggggtactacccctccatcccccacccacttgctgggtgaagaaacgaggctcagagagagaaggtgacgtgacatggaaaggggattcagaacgttagaaccagattcggaatcctaaaagctgagggccagacagcggctgcttctgtatgtggtgatgtggacccgaggctcgggccttcgtgacctcatgggaacacttaggatcagagcgcctgagtcttggaaacaaaatgttgaagttggagtctttgataaaatcttgaactgga

SEQ ID NO: 3414 - DNA, 1282 bp, Homo sapiens
  source 1..1282: mol_type = unassigned DNA; mol_type = unassigned DNA
ttcgtcagttgaaccgctcgcgaggagggttgctagtggagaagcaaccttggccatggaccagccggctggcctgcaggtggactacgtcttccggggtgtggagcatgccgtgcgggtgatggtttctgggcaggtgctggagctggaggtggaggaccggatgacggctgaccagtggcggggcgagttcgatgctggcttcattgaagatttgactcacaagacagggaacttcaaacagttcaacatcttctgtcatatgctggagtcagccctcactcagagtagtgagtcagtcaccctggacctgctgacctacacagacctggagtccctgcggaaccgcaagatggggggccgcccaggctccttggcccccaggtcggcccagctcaactccaagcgctacctgatcctcatctactccgtggagtttgacaggattcactacccgctgcccctcccgtaccagggcaagccagaccccgtggttctgcagggcatcatccggtcactgaaggaggaactgggccgcctgcaagggctggatggccagaacactcgggacacccgggagaatgagatctggcatctgcgggagcagcagcagcagcggaaccgcttaggcagtgggggaagcggggacggtccgtccgtctcctggtctcgccagacccagccccctgctgccttgactggccgaggggacgcccctaaccgctcccgaaaccgcagctcctcagtggacagtttccgcagccgctgctcgtctgccagctcctgcagcgatttggaggatttctctgagtcgctctccagagggggtcaccgccgccgtgggaagcctcccagcccaacgccctggagtgggtccaatatgaagtctccccccgtggaacgcagccaccatcagaaatctctggccaactccgggggctgggtccccatcaaagagtacagctcggagcaccaggcggctgacatggccgaaatagacgcacgcctgaaggccttgcaggagtacatgaaccgactggacatgcggtcataacgtggagaaggggtactacccctccatcccccacccacttgctgggtatggtgtggggggtggggccagggtggcctccagccctgcccagtccctgccctggccccgtccctcctgctgcccctggggtctcaggtgtgtgaggccctgaccctgccctctccccaggcagtgcatgctgggagggaggatgtgtgcattttgtaaataaacatatttgccctgggg

SEQ ID NO: 3415 - DNA, 12430 bp, Homo sapiens
  source 1..12430: mol_type = unassigned DNA; mol_type = unassigned DNA
gaacagactggaagagaagttaccccgatgacttggtttggaaggggttaaggcaccagtcatcctcttctaaagtgatttatgatgatgtgtggagtttaaaaactttaccccaccccaaagaacagccttctcactcctcactgagtccactctgaacgtgctaaaatgggaaggaggcggtgttttgctgatctgttaaattcttagtgaagtttccttgatttccagtggctgctgttgtttgagtttggtttggagcaaaactgaggtagtcctaacatttctgggactgaatccaggcaagagaaagaagaaaaagaagaagaaaaagaggaggaaaaaggtagggagaaataaagggaggagagaagcacagtgaaagaaaaaaaaagtcccttttcgacatcacattcctgtgttttccctcagcctggaaaacatattaatcccagtgcttttacgcccggaaacaaagagactaagccagactatgggggaaagggagataagaaggatcctggaactttaaagagggaaagagtgagattcagaaatcgccaggactggactttaagggacgtcctgtgtcagcacaagggactggcacacacagacacacgagaccgaggagaaactgcagacaaatggagatacaaagacttagaaggacagctcctttcacctcatcctacttgtccagaaggtaaaaagacacagccagaaagaaaaggcatcggctcagctctcagatcaggacaggctgtggatctgtggcggtactctgaaagctggagctgcagcacaccccttttgtattgctcaccctcggtaaagagagagagggctgggaggaaaagtagttcatctaggaaactgtcctgggaaccaaacttctgatttcttttgcaaccctctgcattccatctctatgagccaccattggattacacaatgacatggagaatgggaccccgtttcactatgctgttggccatgtggctagtgtgtggatcagaaccccacccccatgccactattagaggcagccacggaggacggaaagtgcctttggtttctccggacagcagtaggccagctcggtttctgaggcacactgggaggtctcgcggaattgagagatccactctggaggaaccaaaccttcagcctctccagagaaggaggagtgtgcccgtgttgagactagctcgcccaacagagccgccagcccgctcggacatcaatggggccgccgtgagacctgagcaaagaccagcagccaggggctctccgcgtgagatgatcagagatgaggggtcctcagctcggtcaagaatgttgcgtttcccttcggggtccagctctcccaacatccttgccagctttgcagggaagaacagagtatgggtcatctcagcccctcatgcctcggaaggctactaccgcctcatgatgagcctgctgaaggacgatgtgtactgtgagctggcggagaggcacatccaacagattgtgctcttccaccaggcaggtgaggaaggaggcaaggtgagaaggatcaccagcgagggccagatcctggagcagcccctggaccctagcctcatccctaagctgatgagcttcctgaagctggagaagggcaagtttggcatggtgctgctgaagaagacgctgcaggtggaggagcgctatccatatcccgttaggctggaagccatgtacgaggtcatcgaccaaggccccatccgtaggatcgagaagatcaggcagaagggctttgtccagaaatgtaaggcctctggtgtagagggccaggtggtggcggaggggaatgacggtggagggggagcaggaaggccaagcctgggcagcgagaagaagaaagaggacccaaggagagcacaagtcccaccaaccagagagagtcgggtgaaggtcctgagaaaactggccgccactgcaccagctttgccccaacctccctcaacccccagagccaccacccttcctcctgccccagccacaacagtgactcggtccacgtcccgggcggtaacagttgctgcaagacctatgaccaccactgcctttcccaccacgcagaggccctggaccccctcaccctcccacaggccccctacaaccactgaggtgatcactgccaggagaccctcagtttcagagaatctttaccctccatcccggaaggatcagcacagggagaggccacagacaaccaggaggcccagcaaggccaccagcttggagagcttcacaaatgcccctcccaccaccatctcagaacccagcacaagggctgctggcccaggccgtttccgggacaaccgcatggacaggcgggaacatggccaccgagacccaaatgtggtgccaggtcctcccaagccagcaaaggagaaacctcccaaaaagaaggcccaggacaaaattcttagtaatgagtatgaggagaagtatgacctcagccggcctactgcctctcagctggaggacgagctgcaggtggggaatgttccccttaaaaaagcaaaggagtctaaaaagcatgaaaagcttgagaaaccagagaaggagaagaaaaaaaagatgaagaatgagaacgcagacaagttacttaagagtgaaaagcaaatgaagaagtctgagaaaaagagcaagcaagagaaagagaagagcaagaagaaaaaaggaggtaaaacagaacaggatggctatcagaaacccaccaacaaacacttcacgcagagtcccaagaagtcagtggccgacctgctggggtcctttgaaggcaaacgaagactccttctgatcactgctcccaaggctgagaacaatatgtatgtgcaacaacgtgatgaatatctggaaagtttctgcaagatggctaccaggaaaatctctgtgatcaccatcttcggccctgtcaacaacagcaccatgaaaatcgaccactttcagctagataatgagaagcccatgcgagtggtggatgatgaagacttggtagaccagcgtctcatcagcgagctgaggaaagagtacggaatgacctacaatgacttcttcatggtgctaacagatgtggatctgagagtcaagcaatactatgaggtaccaataacaatgaagtctgtgtttgatctgatcgatactttccagtcccgaatcaaagatatggagaagcagaagaaggagggcattgtttgcaaagaggacaaaaagcagtccctggagaacttcctatccaggttccggtggaggaggaggttgctggtgatctctgctcctaacgatgaagactgggcctattcacagcagctctctgccctcagtggtcaggcgtgcaattttggtctgcgccacataaccattctgaagcttttaggcgttggagaggaagttgggggagtgttagaactgttcccaattaatgggagctctgttgttgagcgagaagacgtaccagcccatttggtgaaagacattcgtaactattttcaagtgagcccggagtacttctccatgcttctagtcggaaaagacggaaatgtcaaatcctggtatccttccccaatgtggtccatggtgattgtgtacgatttaattgattcgatgcaacttcggagacaggaaatggcgattcagcagtcactggggatgcgctgcccagaagatgagtatgcaggctatggttaccatagttaccaccaaggataccaggatggttaccaggatgactaccgtcatcatgagagttatcaccatggatacccttactgagcagaaatatgtaaccttagactcagccagtttcctctgcagctgctaaaactacatgtggccagctccattcttccacactgcgtactacatttcctgcctttttctttcagtgtttttctaagactaaataaatagcaaactttcacctattcatgagttattattgaaacctcaaatcataaagacatttaaaagaattgtttttctaactggaggggctctagtgctaaataatagtactgaaaattgatattattttccttttcttatatgaaggaccttatttggcatataaaattttataaaatatgtatttaaagctttttcttattttttgtattaattggtaagtgaaaactctgttaaagatcacaccacaatgttttcaagaaacatctgaaaagataaaacaaagaacaaataacttataatacttacttaaattgacactttttgaaatgccagtctgaaaataattaagatatctctgctttgtatgagtttcttttatgaaacttgataccacgggagtccagtaatattggccacaaaagccagagaaagtaccaagcccagctttgttatcatagccacttcctgccctgcttctgttatttttagtgttttttcagatataaatcggggtccaggaaatcctcaccagaatctggcactgcagccaaaggcgatacttccagagttctagtaggctgctatggaatttctggcatgaaaattcttgacccctcacactttaccccctgtacagcacaggcataccatggagatattacaggatcagttccagaccaccataataaagtggatatcgcaataaagtgagtcacacaaaatttttggtttctcagtgcatataaaagttatgtttacactctttagtagtctattaagtgtataatagctttatgtccaaaaaatgtacatgttttattttaaaaatactttattgctaaaaattgctaatgatcataatctttttgcattgatgttgatggctgctgaatgatcagggtggtggttactgaaggttgggggtgatggtggcaatttcttaaaataagacagcaatgaagtttgccacttcgattgactttttcttcatgaaagatttctctgcagcatgtgatgctgtatgatagcattttaccagtagtacaacttcttttgaaattggagccaatcctctcaaaccctgttgctgctttattaatgaaatttatgtaatgttgtaaatcctttgttgtcatttcaataatgtacatagcaacttacgcgagtagattccatctcaagaaatcactttcttcgttcattcataagaagcaagtcttcatctattaaacttttgtaatgagattgcagcaattcagtcacatcttcaggctccacttctaattccagttctcttgctatttccactatgtctatagcagagcttcctccaatgaagtcttgggcctcttaaaatcatccatgagggatggaatcagtttccgaactcattgatcttcctattttgaccttctcccatgaatcacgatgttcttaacagcatctagaatggtgaatcctttccaggtttttaatttgctttgcccagatccattagcgggatcacaatctgtgacagttatagtcttacgaaaagtgcaaatgactccttgattcctgtgctgcacaataggtattgtgttagcaggcacgaaaatattaatctccttgtatatctctatccaagttcttgggtgactgggtatattgtcagtgaacagctatatatatatatattatagtggtctggaactgatcatttatatatatattttatatacatatataaaatatataatatatattatatatatatatatttttttcgagatggagtctcgctctgtcacccaggctggagtgcagtggtgcgatcttggctcactgcaacctctgcctccggggttcaagtgattctcctgcctcagacccctgagtagctggatttacaggcgcccaccactacacccagcttatttttgtatttttagtagagatggggtttcaccatgttagtcagggtggtctcgaactactgactttggcctcggcctcccaaagtgctgggattacaggcatgagccactgcgcccggcccgaacagcaatatttttaaaagattctttttttttctgagcagtaagactcaaaaagtgagcttaaaatgtccagtaaaccatgctgtccatagacatgctgtcattcaggctttgttgctccatttatagagcacaggcagattagatttagcataattctgaaaagtcgtaggatttggggaaatggtaaatgagcattgatttcaacttaaaatcaccagctgcgttaacttctaacaaggagtaagcctgttggttgaagctttgaagtgaggcattgactactcctctctagatacgtaagtctgagatggcatcttcttccaatataaggctgtttcatctcttttgaaaatctattgtttagtgtagccactttcattaattatcttaactagatcttctggataacttactgcagcttctacatcaacatttgctgctttactttgcacttttatggatgcacaaggcttcttttcttcaaactcatgaaccagactctgctaccttcaaactttttttctgaagcttcctcacctccctttagctttcatagaattgaagagagttagggccttgctctgaactaggctttggcttaagggaattttgtggctggcttgatcttctattcagatgactcaaagtttctccatatcagcagtaaggctgttttacttttttatcattcatgcattcacaaagtagcacttttaatttccttcaagaacttttcctttgcatttacaacttggttgtttggcataagaggcttagctttcagcctgtctcagcttttgacacaccttcctcactaagcttattcatttctagcttttgatttaaagtgaaagattgcaacttcctctcacttgaaatacctggaggctattttagggttattaattgatctactttcaatattgtgtctcagggactaaggaggcctgagaagaaggagaaagattggagaaaggttggttgttggagcaatcagaacatacacacatttattaagtttactgtgttatataagtgtggttcatggtgcccccagtaattataatagcaacatcaaagatcgttgactacagattttaataacagagataataatgaaacagtgtgaaatatggcaagaattaccaaaatgtgacacagagacataaagtgagtacatactattgcaaaaatgatgtcaacagacttccttgatgcagggttgccacaaaccttcaatttgtaaaaaatgcagtatctgagaagtataataaaataagatgtgcctgtacttacttgctaatggacctattaccatactggcatcttataaaaaaaattacaaggaaggagattatatccagggattctttttgttttcaaggcaaaggttaccaagttacaatggaccaaagtagctggaatgcaaaggagtataatccttgtctttgaaaaaagagcatttgtttcaatcatatggcatatcaaagtaaactttctcccttcctccctcctttcgttgctgctgcttcttttttttctctttttttttttctttttttggagagggtctcactctgtcacccaggctgcagtgcagtagtgcaatcttggctcactgcaaactcagcttccctcaaacaatcctcccacctcagcatcccaagttagctgggaccacagccatgctccaccatgcccagccatccttgcttctttactacatttcttttttcaacaaatatttatcaagtaatattgtcaagtaatatttatgagcttcccctcagataggcatttagcatcatgatggcaccatcctctaacaataatgggaaggctattttccactgttattaatcattaattctccaaatcattttagtattattattaattctaataagtacagagattaataaatgcattcaaaccacatgtgaatatttgctataggtttatctgtgcctactgtatgttcagatttttctttatatctgaactttgttataaataaatgacagtaaaaatggaatttatagttcaatgaacttgacaaatcacttattctgccattcattttccataaagaccattcattcttccttgttttacaggtaactgagctccagaaagctcaagtgactttagaactcagttcttagtgtgtgaattatgctcccatctcatccctcttccttgatggagcactttcctcctcattttttcttggatagtctgtacaagctgcctgaggtgtgcaggaaagtgagccacgtcgaagtgtactgcttttaaatttttgccaggatgaagcatagcccaaagttgccaataaaaatggatttctttacctttctgaaattgtgtgatgacaatttctaagtaaaggacccaaatcatgtcaacttcaggaaatataataatgagggagccaggagcagtgaggggctcacacctgtaatcccagcactttgggaggccaaggtgagcgggtcgcttgagcccaggacttcgagaccagcctgggcaacacggcaaaaccctgtctctacaaaaaaatacaaaaaattagctgggtaaggtggtgtgtgtctgtggtcccagctattcaggaggctgaagtgagagaatcgcttgagcctaggaggtcgaggcttcagtgtgccgtgatcgtgccacagcactccatcatcatcatcctgggtgacaaagtgagaccctgtctccccaccaaaaaaaagagggagtttcatctcccaagaaaatgaattagataggaataatagaaaatttactctcagaataatagggttctagctcctgcaaccaaaaaaagatagttcttttttacaacctgagattactttttcaagcatttctccagttccactggcattgaaataatagttagcaatgcatctgagcttttcttcctctaatgagcaggcagagaagtcatagatcatcatttggaggactataaaataagacatagcttagcaaaaggaccaaaatacattcagaggaggatgctattggtgaatgtcctcaaagcctataatctggaaaaatacaaggcatatctctgaaactgtgaggattagcaaactagctaacctgaatctctgtcttctggtagtataaactaggtagtttcaaatctgagtagtttctccataaaagcatttcttcccaaacgtttcttaccaaactcccaaataaatgagaaaaataaaatacagttttataatttttgagaaagattatgggattatggtatttaaaaagaaaagcattctgtagagttggggaaatctggaagactcttgaggacatagctttgccgaaattgctggttgtcacaagactcttcaaaaactacttttcatcagacatctcccagggctctgaggtgaatattaattcagcagaaagatccttttctgctacataggcaggaggtccagacacaggggagtgggtgcaacccagctggtcccattttctgtaatataattaacaatgaagctcatactttctcaacttctagaagcctggaggatggaagcagcccgagagtagggtgaatgatggcctcagtgggcccttcttaatgtgtctcagtactgaatgtgtggagattgtagaaaaatagaaggcccttggaaaaaacctctgttcgtttctctgttcgtttcgctccctgatctccctgccggattgcttttctttcctttctcttccttggctgtcctttacctcatggtgtggggtgtgcagatagcaggttgtggcttggtgagtgctcttcacttcaggtcaaggtgaggcacagttaacatgctaactactttcctcagttctctctgagttgtgtaaagctcccgatgccagacttcctcttaattttgcacattattaaagtccaaagagttaagatttggtgatgaggggcaaagggccagctgtcacagaaatcaatgaaatgatacacagaaatgggtatcatgaaaaggccactggacttgggaaaactgggtgcctgtccttgccctgccatgtacttacctgtgtgactggaggtgagatgttttacctatgggcctcagtttctcattacaaaatgacagagaagactagatacctaagttcctaagtttgtgacatttgtgaatttttcttggccctctgtgagtagagtgctaaatttagaggcttcctgtggttgaactgatgtccaattctcagggaacccagacttctcagttcagaacccagttccagatttttgtgggaatagggaaaggtattaaataactccattgaattctttcctgcataatgccctgctgtggctgagactcaatgaggtcatcacctccaacacacagaacccctcatcatctccttacagccagactggagcttccaaggacatcaggttggcaaggattgtgagtaccctaaacatctaaagaggccctctaataagggacatatttgttcttcaacagtttcctaacttgagaccacaaatgcgtaatctctctaatatcctaaagcttggacaaactgggcagcccctgagcagaccgcacagagcttaaatgtcagtgctttccttccagaaagaaaaagaatggtcctacacctcccaatccatgggctgatacatatgccaagggagccggatgaagaagtgggtgattttaaatagctaagactgcccatgggcaaacgttctttggcttttctcctctgcaataagtataccttcctctctcctggtccttttctcctttcccaggcccctctatcaataataattctggctctcagatgactacagttgattaggtggaactgataggataaaggtgacacccttcccaaggctatctataatgcaaaaagatatccaagaaaaagagaggtagggaacaccttgggaaaccatttctggaagacagccagtccctgctgtagacaagcctcattttccttcccccaaatgttaaagagtaaattcctcctgtagccttagctctcttttctatctttggcttgctttttatgaactatctttagagtgccaaattagaacagggtaggcagaggcaggaatatgcccaaatttgggaagacctggttgggaatagtcgaaagccttgatatgtgcaaagaaagaaccatttgatcaacccagttcttaatacaggatactaacttaaaatttagactcaagttatacgataattcaaacatttattgtatttatactattctatatgtacttttccaggaaccaggaatacaaaactgacatttctctgtacagaggctcagactagtagagaacagttaggtacgccgttaattataaactaatatgtatcatcaattatgggtttttatgggggtttggcaggtggaagggaccagggagagatgatgagtgatgatggttatgtagtctttaggaggatgcaattataacattgctcttcctttcacgcaccacatgatttagcaagtacttcatattggctccaccattaacatggtcaatggcttctggatactcacagttcaggcacagtttctcctgaagattttttacctctcccatctttaagaaattgtctggatgtccatgaaagatgctgacacttgtattaattcattaaaaaacaccaccccctccctgaaataaactaaaaagtaatgaattcatagaaaaaaatttcaccaagattgaaactagagaatatacctagacttgcactttgagctttgagaaatgtgtacctattcaccattccaacgtgaagaagctctgcagtaggaaaaataattaacacacttatagtctactgcccatgtaaggatcagctccggctaagaggccaaagatgggtgacatcgttatgctctgcctttattttttctttcttacccacttagcttcctaattggaggaaggaggcgtggtaaaggtatatgaagactatggtttaattagaccagaaaacactgtcataatctctggggtcatcagaatgtccagttttgtctttgggccaagataagggcagtgggatttatgatgtgttgtttatagtctgaaactactctggtgatcaccagggtcagtttctttaatgatggtttccaactggcctaatacattaagtaagactggctgataacatgaccagacagacataaagaccctgttgggaatgacattgaactctcaaagtcaagatttcttacacaaatctatcagctggagaaaatgaaggcagtgtggtatatgtgtgcaaataaggacattatgaagcttaaatatggaatgtctcttggacccccgatgtcatctgtattctctttttcttcttgtactatatcctttgcctgtaaataaaaggtttatttgatta

SEQ ID NO: 3416 - DNA, 3557 bp, Homo sapiens
  source 1..3557: mol_type = unassigned DNA; mol_type = unassigned DNA
gagaattttctccttccaaagtacagtgtaagaacagactggaagagaagttaccccgatgacttggtttggaaggggttaaggcaccagtcatcctcttctaaagtgatttatgatgatgtgtggagtttaaaaactttaccccaccccaaagaacagccttctcactcctcactgagtccactctgaacgtgctaaaatgggaaggaggcggtgttttgctgatctgttaaattcttagtgaagtttccttgatttccagtggctgctgttgtttgagtttggtttggagcaaaactgaggtagtcctaacatttctgggactgaatccaggcaagagaaagaagaaaaagaagaagaaaaagaggaggaaaaagtggattacacaatgacatggagaatgggaccccgtttcactatgctgttggccatgtggctagtgtgtggatcagaaccccacccccatgccactattagaggcagccacggaggacggaaagtgcctttggtttctccggacagcagtaggccagctcggtttctgaggcacactgggaggtctcgcggaattgagagatccactctggaggaaccaaaccttcagcctctccagagaaggaggagtgtgcccgtgttgagactagctcgcccaacagagccgccagcccgctcggacatcaatggggccgccgtgagacctgagcaaagaccagcagccaggggctctccgcgtgagatgatcagagatgaggggtcctcagctcggtcaagaatgttgcgtttcccttcggggtccagctctcccaacatccttgccagctttgcagggaagaacagagtatgggtcatctcagcccctcatgcctcggaaggctactaccgcctcatgatgagcctgctgaaggacgatgtgtactgtgagctggcggagaggcacatccaacagattgtgctcttccaccaggcaggtgaggaaggaggcaaggtgagaaggatcaccagcgagggccagatcctggagcagcccctggaccctagcctcatccctaagctgatgagcttcctgaagctggagaagggcaagtttggcatggtgctgctgaagaagacgctgcaggtggaggagcgctatccatatcccgttaggctggaagccatgtacgaggtcatcgaccaaggccccatccgtaggatcgagaagatcaggcagaagggctttgtccagaaatgtaaggcctctggtgtagagggccaggtggtggcggaggggaatgacggtggagggggagcaggaaggccaagcctgggcagcgagaagaagaaagaggacccaaggagagcacaagtcccaccaaccagagagagtcgggtgaaggtcctgagaaaactggccgccactgcaccagctttgccccaacctccctcaacccccagagccaccacccttcctcctgccccagccacaacagtgactcggtccacgtcccgggcggtaacagttgctgcaagacctatgaccaccactgcctttcccaccacgcagaggccctggaccccctcaccctcccacaggccccctacaaccactgaggtgatcactgccaggagaccctcagtttcagagaatctttaccctccatcccggaaggatcagcacagggagaggccacagacaaccaggaggcccagcaaggccaccagcttggagagcttcacaaatgcccctcccaccaccatctcagaacccagcacaagggctgctggcccaggccgtttccgggacaaccgcatggacaggcgggaacatggccaccgagacccaaatgtggtgccaggtcctcccaagccagcaaaggagaaacctcccaaaaagaaggcccaggacaaaattcttagtaatgagtatgaggagaagtatgacctcagccggcctactgcctctcagctggaggacgagctgcaggtggggaatgttccccttaaaaaagcaaaggagtctaaaaagcatgaaaagcttgagaaaccagagaaggagaagaaaaaaaagatgaagaatgagaacgcagacaagttacttaagagtgaaaagcaaatgaagaagtctgagaaaaagagcaagcaagagaaagagaagagcaagaagaaaaaaggaggtaaaacagaacaggatggctatcagaaacccaccaacaaacacttcacgcagagtcccaagaagtcagtggccgacctgctggggtcctttgaaggcaaacgaagactccttctgatcactgctcccaaggctgagaacaatatgtatgtgcaacaacgtgatgaatatctggaaagtttctgcaagatggctaccaggaaaatctctgtgatcaccatcttcggccctgtcaacaacagcaccatgaaaatcgaccactttcagctagataatgagaagcccatgcgagtggtggatgatgaagacttggtagaccagcgtctcatcagcgagctgaggaaagagtacggaatgacctacaatgacttcttcatggtgctaacagatgtggatctgagagtcaagcaatactatgaggtaccaataacaatgaagtctgtgtttgatctgatcgatactttccagtcccgaatcaaagatatggagaagcagaagaaggagggcattgtttgcaaagaggacaaaaagcagtccctggagaacttcctatccaggttccggtggaggaggaggttgctggtgatctctgctcctaacgatgaagactgggcctattcacagcagctctctgccctcagtggtcaggcgtgcaattttggtctgcgccacataaccattctgaagcttttaggcgttggagaggaagttgggggagtgttagaactgttcccaattaatgggagctctgttgttgagcgagaagacgtaccagcccatttggtgaaagacattcgtaactattttcaagtgagcccggagtacttctccatgcttctagtcggaaaagacggaaatgtcaaatcctggtatccttccccaatgtggtccatggtgattgtgtacgatttaattgattcgatgcaacttcggagacaggaaatggcgattcagcagtcactggggatgcgctgcccagaagatgagtatgcaggctatggttaccatagttaccaccaaggataccaggatggttaccaggatgactaccgtcatcatgagagttatcaccatggatacccttactgagcagaaatatgtaaccttagactcagccagtttcctctgcagctgctaaaactacatgtggccagctccattcttccacactgcgtactacatttcctgcctttttctttcagtgtttttctaagactaaataaatagcaaactttcacctattcatgagttattattgaaacctcaaatcataaagacatttaaaagaattgtttttctaactggaggggctctagtgctaaataatagtactgaaaattgatattattttccttttcttatatgaaggaccttatttggcatataaaattttataaaatatgta

SEQ ID NO: 3417 - DNA, 681 bp, Homo sapiens
  source 1..681: mol_type = unassigned DNA; mol_type = unassigned DNA
gaagttacaacagaaaaactacaggagtgtagcaatgcagtttaatggctttgagaagcatgggacagttctctgtttttttctttttttttttctgggcacagaaaaaaattgctagcctaagtcactctggtttcctacattggtttttattgtttgaagcagtaagcagtaatggtgtcctgctttttttttccaggttccggtggaggaggaggttgctggtgatctctgctcctaacgatgaagactgggcctattcacagcagctctctgccctcagtggtcaggcgtgcaattttggtctgcgccacataaccattctgaagcttttaggcgttggagaggaagttgggggagtgttagaactgttcccaattaatgggagctctgttgttgagcgagaagacgtaccagcccatttggtgaaagacattcgtaactattttcaagtgagcccggagtacttctccatgcttctagtcggaaaagacggaaatgtcaaatcctggtatccttccccaatgtggtccatggtgattgtgtacgatttaattgattcgatgcaacttcggagacaggaaatggcgattcagcagtcactggggatgcgctgcccagaagatgagtatgcaggctatggttaccatagttaccaccaaggataccaggatggttacc

SEQ ID NO: 3418 - DNA, 781 bp, Homo sapiens
  source 1..781: mol_type = unassigned DNA; mol_type = unassigned DNA
cttcacgcagagtcccaagaagtcagtggccgacctgctggggtcctttgaaggcaaacgaagactccttctgatcactgctcccaaggctgagaacaatatgtatgtgcaacaacgtgatgaatatctggaaagtttctgcaagatggctaccaggaaaatctctgtgatcaccatcttcggccctgtcaacaacagcaccatgaaaatcgaccactttcagctagataatgagaagcccatgcgagtggtggatgatgaagacttggtagaccagcgtctcatcagcgagctgaggaaagagtacggaatgacctacaatgacttcttcatggtgctaacagatgtggatctgagagtcaagcaatactatgaggtaccaataacaatgaagtctgtgtttgatctgatcgatactttccagtcccgaatcaaagatatggagaagcagaagaaggagggcattgtttgcaaagaggacaaaaagcagtccctggagaacttcctatccaggttccggtggaggaggaggttgctggtgatctctgctcctaacgatgaagactgggcctattcacagcagctctctgccctcagtggtcaggcgtgcaattttgggagctctgttgttgagcgagaagacgtaccagcccatttggtgaaagacattcgtaactattttcaagtgagcccggagtacttctccatgcttctagtcggaaaagacggaaatgtcaaatcctggtatccttccccaatgtggtccatggtgattgtgtac

SEQ ID NO: 3419 - DNA, 1010 bp, Homo sapiens
  source 1..1010: mol_type = unassigned DNA; mol_type = unassigned DNA
agtttccttgatttccagtggctgctgttgtttgagtttggtttggagcaaaactgaggtagtcctaacatttctgggactgaatccaggcaagagaaagaagaaaaagaagaagaaaaagaggaggaaaaaggtagggagaaataaagggaggagagaagcacagtgaaagaaaaaaaaagtcccttttcgacatcacattcctgtgttttccctcagcctggaaaacatattaatcccagtgcttttacgcccggaaacaaagagactaagccagactatgggggaaagggagataagaaggatcctggaactttaaagagggaaagagtgagattcagaaatcgccaggactggactttaagggacgtcctgtgtcagcacaagggactggcacacacagacacacgagaccgaggagaaactgcagacaaatggagatacaaagacttagaaggacagctcctttcacctcatcctacttgtccagaagtggattacacaatgacatggagaatgggaccccgtttcactatgctgttggccatgtggctagtgtgtggatcagaaccccacccccatgccactattagaggcagccacggaggacggaaagtgcctttggtttctccggacagcagtaggccagctcggtttctgaggcacactgggaggtctcgcggaattgagagatccactctggaggaaccaaaccttcagcctctccagagaaggaggagtgtgcccgtgttgagactagctcgcccaacagagccgccagcccgctcggacatcaatggggccgccgtgagacctgagcaaagaccagcagccaggggctctccgcgtgagatgatcagagatgaggggtcctcagctcggtcaagaatgttgcgtttcccttcggggtccagctctcccaacatccttgccagctttgcagggaagaacagagtatgggtcatctcagcccctcatgcctcggaaggctactaccgcctcatgatgag

SEQ ID NO: 3420 - DNA, 626 bp, Homo sapiens
  source 1..626: mol_type = unassigned DNA; mol_type = unassigned DNA
agccttctcactcctcactgagtccactctgaacgtgctaaaatgggaaggaggcggtgttttgctgatctgttaaattcttagtgaagtttccttgatttccagtggctgctgttgtttgagtttggtttggagcaaaactgaggtagtcctaacatttctgggactgaatccaggcaagagaaagaagaaaaagaagaagaaaaagaggaggaaaaagcctggaaaacatattaatcccagtgcttttacgcccggaaacaaagagactaagccagactatgggggaaagggagataagaaggatcctggaactttaaagagggaaagagtgagattcagaaatcgccaggactggactttaagggacgtcctgtgtcagcacaagggactggcacacacagacacacgagaccgaggagaaactgcagacaaatggagatacaaagacttagaaggacagctcctttcacctcatcctacttgtccagaaggtaaaaagacacagccagaaagaaaaggcatcggctcagctctcagatcaggacaggctgtggatctgtggcggtactctgaaagctggagctgcagcacaccccttttgtattgctcaccctcggtaaaga

SEQ ID NO: 3421 - DNA, 560 bp, Homo sapiens
  source 1..560: mol_type = unassigned DNA; mol_type = unassigned DNA
aaaattatagtgatggccactggaggatggattagagaggatgagtctgttggctggaagaccaactggaacatattgccctggcttctgatttcatgacaaattggcatggtaatacttaatacttaacagttgcagaaaaatagaaagatctaaatggaggacttacaaaatatggagctcttaaataacggacttgaaattgagaattattacaagccattaatcattatagatctccccggaaatgaatgaatgagaatttatcattgctcttattaggtacgtgcctccaatacttcttcaggaggattttctgaagccccagtggctgctgttgtttgagtttggtttggagcaaaactgaggtagtcctaacatttctgggactgaatccaggcaagagaaagaagaaaaagaagaagaaaaagaggaggaaaaagcctggaaaacatattaatcccagtgcttttacgcccggaaacaaagagactaagccagactatgggggaaagggagataagaaggatcctggaactttaaagagggaaagagtgaga

SEQ ID NO: 3422 - DNA, 684 bp, Homo sapiens
  source 1..684: mol_type = unassigned DNA; mol_type = unassigned DNA
attaagatgctgaaatgtaacttgagggcaataagaaaactgttgaggaatttgccacaggaatgaaacactgatattttaggaaaattatagtgatggccactggaggatggattagagaggatgagtctgttggctggaagaccaactggaacatattgccctggcttctgatttcatgacaaattggcatggtaatacttaatacttaacagttgcagaaaaatagaaagatctaaatggaggacttacaaaatatggagctcttaaataacggacttgaaattgagaattattacaagccattaatcattatagatctccccggaaatgaatgaatgagaatttatcattgctcttattaggtacgtgcctccaatacttcttcaggaggattttctgaagccccagtggctgctgttgtttgagtttggtttggagcaaaactgaggtagtcctaacatttctgggactgaatccaggcaagagaaagaagaaaaagaagaagaaaaagaggaggaaaaaggtagggagaaataaagggaggagagaagcacagtgaaagaaaaaaaaagtcccttttcgacatcacattcctgtgttttccctcagcctggaaaacatattaatcccagtgcttttacgcccggaaacaaagagactaagccagactatgggggaaag

SEQ ID NO: 3423 - DNA, 3982 bp, Homo sapiens
  source 1..3982: mol_type = unassigned DNA; mol_type = unassigned DNA
gcgccgcggtgcccggcgcgccctccaagctaggagaggggagaagccgggggctgcagctgggcaagggggaggaaagtgcgtgtgcgtgcacgcctgtgtgcagggcagagagtgcggggggcgacagtctcggcttagggcggaggagagggcaggggaacggcggtgcagctcccccgctgtccccgaggatttcccgcggcagccccgggctccccagtgcccctcaccatggacttgcgcggagttgggacgggcctcggcagcagcaagcggctggctgccgggccctgggggagcgcgggcgcgcgcgcggggatggcgaggtaggatggccacccagcgcgacccccgccgccccaacccagcggcccctgggcggtgccgctgactcgccggagcgcacaggggtgtgggcggaggcggcctcgccgcgcccgcgccttcgggagtcgcctcgcctcttccacccacttgcacctgccaccccgcggataccatgtcgaaggcggccggaggcgcggcggcggctgcggcggcggcggaaagttgttccccagccccggccggctcgtccgcggccccgcccgcgccggtggaggacctgtccaaagtgtcggacgaggagctgctgcagtggagcaaggaggagctgatccgcagcctgcggcgcgccgaggcggagaaggtgagcgcgatgctggaccacagcaacctcatccgcgaggtgaaccgccgcctgcagctgcacctcggcgagatccgcggcctcaaggatatcaaccagaaactccaggaagacaaccaggaactgagggacctctgctgtttcctggatgatgaccggcagaaaggcaagagggtgtctcgggagtggcagagactgggtcgctacactgccggggtgatgcacaaggaagtggccttatacctgcagaagctgaaagacctggaggtgaagcaggaggaagtggtgaaggagaacatggagctcaaggagctctgtgtgctactagatgaggagaagggtgcaggctgcgcaggcagccgctgctccatcgacagccaggccagcctgtgccaactcacagcctccaccgcaccctacgtgcgggatgtgggtgacggcagcagcacctccagcactggcagcactgacagcccggaccaccacaagcaccacgcgagcagtggcagcccggagcacctgcagaagccccggagcgagggcagcccggagcactccaagcacaggagcgccagccccgagcatccacagaaacccagagcctgtggaaccccagatcgccccaaagcactcaaaggacctagcccggagcaccacaaacccttgtgcaagggcagccccgaacagcaaaggcacccgcatccagggagcagccccgaaacgctgcccaagcacgtgctgagtgggagcccggaacacttccagaagcaccggtcagggagcagccctgaacacgccaggcacagtggagggagcccggagcatcttcagaaacacgctcttggggggagcctagagcatctccccagagccaggggcaccagcccggagcacctcaaacaacattatggagggagccctgatcacaaacacggaggaggcagtggaggaagtggaggcagcggcggaggcagcagggagggcaccctcagacggcaggcacaggaggacgggtcaccccatcaccggaatgtctacagtggcatgaacgaatcaaccttgtcctatgttaggcagctggaggcaagagtaagacagctggaggaagaaaatcgcatgctgccccaggccagccagaatagaaggcaacctccaactagaaacagctcaaatatggagaaaggctgggggtccagagcccggcgggtcttgcagtggtggcaagggtgccgaggaataggacgatgcctgcctactctcccgggttcttttaggttgtcatcaggggctgatgggagtaacagttcacccaactctgcagctagcttcagtggacatgccacaccttcccagcagcctgaacctgtggtacattctcttaaggttgtgtggaggaaacttggagatgctgcaggttcgtgtcctggaattaggcaacatttgtcaggaaaccagtacaaaggaccaatgtgagatgcactctttttcaaacaggagatcaccactgccagaaagtgatagaagacaagaagaaaaaggaaagagtgggtttccacaaacctggactcatggaataacatggagtgattgtacattgcacatatctcccctctaaaacctgtagtacaacttctcccctcaagctgatattctgtgtctctcacctcaatgtccacaacagtcaatctcaaacaaggtagctttgaacatctcaaacagagtagctttgaaaatcaacattttggtaccagtgttttcattagaaataagtgtttttaactccccagatataatattgtaattgggaaacctgaatagttttaagagtccagtggagcctcagtgttttgaatagagatgactcattacacataatggtaggagttttctaccatatcatattgaagatatgaagaggtattttccagcttcccaagtttgagagttgggcatttacctcttacacttcagtcaacaaacaaactagtaattcctaatgcataattaatttggatgcaagataagattaagtttctggagttttgttttgacttctgaggtgctaaaaaataccatgtaaattctccctaccagctagaagggtagcaagacgttgtagagtgcttatcagagagtaccatttacttcaattgatcaatataaatatatctttttttttcatcttaatgagtttctcataaagacacatcttggggcataccaaccttcatattcattcagtgtatccattggtgttaatattaacaatttcaactaaaaacaacaaacataatttttctaagtgtttcgagctgtgagatgtcaatttctacaatttagtttctagacatgctgtatatttaataaactttatgtaaactttaaaatattgcactgcatttatgaaaaaagctttctttgcctactgcagctatctaacattttatgaaactgacgcatgtccttcattattgaggctaaaagctcttgttcagattgcttgaggtttgaaaaagaggtgtgctagctttgcttagtttatttcttatttttggtatacatatacatatatataacattagaatgtgtgtactggaaatgctatgataggtattttgtgttaatccaaatgcaatgatagtttcttgtatgaatgtgcaagaggcctgtgaccgaatgctacgtttttatggtagtttaagattataaaagtagaaatgcaacaattcccagtttttggataggttctaaatttctgagatttgattcatggcagatattctctgttgttgttgttttagatgggctcattacataacgagttaattgtcactagtaggagactgtgaaggaattttgttatactttcaaaaatgttactgtgatgaaaaatcatctattttcagaaaatatttatgaattaatttactatagaattatctctctaattatcataattgggttacaatttaagctccccttttaaatgttatattttaaaatgttattactctataaaagaaaattgcttgctatatttacaccttctttcctaggaaagctttcatccttaaattgttgtattcctaccctctgaagacatttaaaataagcttttgtgcctgcagcagagcctgcagaagctaatacaagggacactggtcttttgacaaaataaacttgtgtaaattttgatactgtattaaaactatttttttaaagttctgcataaaattgagtattaagtatatgtgttcatcttagcaatggtaataaattatttaatctcac

SEQ ID NO: 3424 - DNA, 9505 bp, Homo sapiens
  source 1..9505: mol_type = unassigned DNA; mol_type = unassigned DNA
cgggcagtggaggctccgcgggtcgaaagcggctccatgcccatcggtgggtggaacgtgtagaggtcggaacgccgaggtcgagtctggtggcgcctcggtatccttaacgtggtctctgtttaacgtatttcatttagcccccgttgggattgattcattgggagcagtttcgctggtctggatcctccaggagctggacaaccttgacgggctttttgtcttgggttccagccccctttcccttcctcctcctccagatgccttttctctgcccctcctcgcccggtacagacatttccagcgcaggctgctgctcgtggtgtccgtcgtcgaagccacttcttgggatttcggctcgtttcactctggggtgttttttgaggagggagagtgcccccctcctccacgatgggatttttctcccttgccgaaatggactttcattgatttctacttacttccacgtttagtgaccaattccctaggcgtatttttgtggtagttccttttttcaaatacatactctgtaaaatggagaacgaaatttttactccccttctggagcagttcatgaccagccctttggtcacttgggttaaaacgtttggacctctggccgcaggaaatgggaccaaccttgatgaatatgtggctttggtggatggggtattcttgaaccaggtcatgctccaaattaatcctaaattggagagtcagagagtaaataaaaaagtcaataatgatgcctcacttagaatgcacaatctatccattttggtgagacagataaaattttattaccaggagactttgcagcaattgatcatgatgtcgttgccaaatgtcttaatcattggcaaaaatcccttttctgaacaaggcacagaagaagttaaaaaactgcttttacttttattgggttgtgcagttcagtgtcagaaaaaagaggaatttattgaaagaattcaaggtttagattttgatacaaaagcagcggttgccgcacatattcaagaggtaactcataatcaggaaaatgtgtttgacctgcaatggatggaagtgactgatatgtcgcaggaggacatagaaccactcttgaaaaatatggcattgcatctaaaaagacttatagatgagagagatgaacattcagagactatcatagaactctctgaagagcgggatggtctccattttctaccccatgcctcttcatctgcacagtcaccctgtggttctccaggcatgaagcgaacagaaagtcgacaacatctgtcggtggaactggcagatgctaaagccaagataagaaggcttaggcaggaattggaggaaaagactgagcagttgttggattgtaaacaagaacttgagcaaatggaaatagaactcaaaaggctgcaacaagagaacatgaatttgctttcggatgctcgctctgccagaatgtaccgagatgaattagatgcacttcgagagaaagcagtcagagtcgataagcttgaaagtgaagtcagcagatataaagagagactacatgatattgaattttataaggcaagagttgaggaattaaaagaagacaatcaagttttattagaaacaaaaaccatgttggaagaccaactagagggaactcgtgctcgttctgataaattacatgaattagaaaaagagaacttacaactgaaagctaaacttcatgatatggaaatggaacgagatatggatagaaaaaagattgaagaattaatggaagaaaatatgactttggaaatggcacagaaacaaagtatggatgaatcattacatcttggctgggaactggaacagatatccagaactagtgaactttccgaagcaccccagaaatccctgggccatgaggtgaatgagttgacatcaagtagattattgaagctagagatggaaaatcaaagtttgacaaaaaccgtagaagagcttcggactactgtggattctgtagaaggcaatgcttccaaaatcctgaaaatggaaaaagaaaatcaaaggctcagtaaaaaggttgagattcttgaaaatgagattgttcaagaaaagcaaagtcttcagaattgtcagaatttaagcaaggatctaatgaaggagaaagctcagcttgaaaaaacaatagaaacactgagagaaaattcagagagacagattaagatactggaacaggaaaatgaacatctgaatcaaacagtgtcttccttaaggcagcggtcccagataagtgcagaagcaagagtgaaagacattgaaaaagaaaacaaaattcttcatgaatctatcaaagaaacaagtagcaagctaagcaagattgaatttgaaaaaagacaaattaaaaaagaattggaacattataaagaaaaaggagaacgagctgaagaacttgaaaatgaattgcatcatcttgaaaaagaaaatgaattattacagaaaaaaataactaatttaaaaattacttgtgaaaaaattgaggccttagaacaagaaaattcagagctagaaagagaaaatagaaaattaaaaaaaacattggatagctttaaaaatctgacctttcagttagaatccctagaaaaagagaattcccaacttgatgaggaaaacttagaactgcgaaggaatgtagaatctttgaagtgtgcaagcatgaaaatggctcagctacagctagaaaacaaagaactggaaagtgaaaaagagcaacttaagaagggtttggagctcctgaaagcatctttcaagaaaacagaacgcttagaagttagctaccagggtttagatatagaaaatcaaagactgcaaaaaactttagagaacagcaataaaaaaatccagcaattagagagtgaactacaagacttagagatggaaaatcaaacattgcagaaaaacctagaagaactaaaaatatctagcaaaagactagaacagctggaaaaagaaaataaatcattagagcaagagacttctcaactggaaaaggataagaaacaattggagaaggaaaataagagactccgacaacaagcagaaattaaagataccacattagaagaaaataatgtgaagattggaaatttggaaaaagaaaacaaaaccctatccaaagaaattggtatatataaagaatcttgtgtccgtctgaaagaactagaaaaagaaaataaggagcttgtgaaaagagcaactattgatataaaaacgttggttacactacgtgaggatttggtgagtgaaaagttgaagacccaacagatgaacaatgatctcgaaaaattaactcatgagcttgagaagatagggttaaataaggagcgactcttacatgatgaacaaagtactgatgacaggtataaacttttggaatcaaaattagaatccactcttaagaagtctcttgaaataaaagaagaaaaaattgctgctttagaagctcgattagaagaatccacgaattataaccagcaattgcgccaagaacttaaaacagtgaaaaaaaattatgaagctctcaaacagagacaagatgaggaaaggatggtacagagctctcctccaatatctggtgaagacaacaaatgggagcgagaaagtcaagaaacgactagagaacttctgaaagttaaagacagattaattgaagtagaaagaaataatgctacactgcaagcagagaagcaagcgttgaaaactcaactgaagcaacttgagacacagaacaataatttgcaggctcagattcttgcacttcagaggcagacagtgtcattacaagaacagaataccactcttcaaacacagaatgccaagcttcaggttgaaaattccacccttaattcccaaagtacctcactcatgaaccagaatgcccaactcctaatccagcagtcttccttagaaaatgaaaatgaatctgtaatcaaagagcgagaagacctaaaatctctctatgattctctgatcaaagatcatgaaaagctggaacttcttcatgaacgtcaggcttcagagtatgaatctcttatctctaaacatggaactctgaagtctgcccacaaaaatcttgaggtggaacatagagaccttgaagaccgttacaatcagttattaaaacagaaaggacagttggaagatttggaaaaaatgctcaaagtagaacaggaaaaaatgctgcttgaaaataaaaatcatgaaacagtagctgcagaatacaagaaactttgtggtgaaaatgataggctgaatcatacctatagtcaacttttaaaagagactgaagttttacaaactgaccataaaaatttgaaaagtcttctgaataattccaaactggaacaaacaagattagaagctgaattttcaaaactaaaggaacaataccaacaattggatattacatcaaccaagctgaataaccagtgtgagttgctaagccaacttaaaggaaatttagaagaagaaaatcggcatctactagatcaaattcagacattaatgctacagaacagaacacttttggagcagaatatggaaagcaaggatctttttcatgttgaacaaagacagtacattgataagttaaatgaattaagacgtcagaaggagaaactagaagagaaaattatggatcaatacaaattttatgacccatctcctcctagaaggagaggcaactggattactctaaaaatgagaaaattgataaagtctaagaaagatattaatcgggaacgccagaaatctctaacattaacacccacccgctcagactccagtgaaggatttcttcagctccctcatcaagacagtcaagatagttcttcagtaggttcaaactctttagaagatggccagaccttggggaccaagaaaagcagcatggttgcactgaaaagactgccctttttgaggaacagaccgaaggataaagacaaaatgaaggcctgctaccgtcgttccatgtccatgaatgacctggtgcagtccatggtcctagcaggacagtggacaggtagtactgagaatttggaggttcctgatgatatttcaacgggtaaaaggagaaaagaattgggagctatggccttctctactacagccatcaacttttcaactgtcaactcttctgcaggcttcagatccaagcagttggttaataataaagatactacatcctttgaagacataagtccacaaggtgttagtgatgattctagtacgggatcaagagttcatgcttcaagaccagccagccttgatagtggcagaacatccactagcaatagcaataataatgcttcactacatgaagtcaaagcaggtgcagttaataaccaaagcaggccacaaagccacagcagtggagaatttagcctgcttcatgaccatgaggcttggtccagcagtggtagcagtccaatccagtacttgaaaagacagaccagatcaagcccagtgctccagcacaaaatatctgaaacactggagagtcgacatcacaagatcaaaactggttcccctggaagtgaagttgttactctacaacagtttttggaagaaagcaataagcttacctcagtacagataaagtcctcaagtcaagagaatcttttagatgaagtaatgaaaagtttgtctgtctcttctgactttttgggaaaagacaaaccagttagctgtggtctggccaggtcagtaagtggaaaaaccccaggggacttctatgatagacggacaactaagcctgagtttttgagacctggtcctcgaaaaactgaagatacctacttcattagttctgcgggaaaacctacaccaggcactcaaggaaaaataaaattagtaaaagaatcttctctgtcacgacaatcaaaagatagtaacccttatgcaactttacctcgtgcaagcagcgtgatctcaactgccgaaggaactacacgaaggacaagcatccatgattttttgaccaaggacagtagactgcctatatcagttgattcaccaccagctgctgctgacagcaacaccactgcagcatctaatgtggacaaagtacaagaaagcagaaattcaaaaagcaggtctagggagcaacaaagctcctaattctattacccactacatgacatgtgggccaagtgagagaaaagtgtccttcagtttctcagtatgaagcctttatttctgaagtaacaagacacctagcaactataggaatcatttttaaaaatctttaaggagacttttaacagtccttcgtgaatagagcaggcaagaaatacaaaccttcattccttgaatcaaggagcactactggattcaactgccaaaattttttaaaggttttaggacttactataccttgtactgttaagatctactgaataaaggacgttctctcactaaggaccaggtgttttaaggttaagtgtttaaagaagtactccaagaacaatctgcttttttcatcatttgttttatgaatttatccatgtttgcttaatgcttctgctaagtgttagccaaaatctagccatttatatttagttgtgtaaacctaaattaaatgctgtagtattttgtggaatgtactatatagcaagatacagagaaaattgttttggcatgtcagagccttatttggttagcagactgcatgtgttgatactttttttttcttaaagccaattattttgatgcaaaagaaattcagtttataagataaatctgaaaaatccataatgaaataggagttataaaaaatttatagtgatattaatctttccatatttcccattaagcaacactaagcattcataagttaacccatggtaaagagtgtttttctgaaacttttttttagtaagatggtttttcagcaaatggcattcccaagataaagctgttgtgctttaactcatttcttttctttggtattgggttatgtatgcgtgtgcatttttttaacttgagagctgactgttgcttaagaagttttcttatggcaaaaataatgtaaataagttactatgatctgcattttgccagaaactcatttataattaaggctatcatttattaatgatttttttctcctttatgatattacattaaagttgataactgttattggtacttttgaaatatttgtatgcatttgttacctttaaacatttggaagaagcacaaaaaaatagatttagttaacccagggaaacatcaatttttttagtagttccaattttatatcacagttttattttcttatgaaatcaaaaaatgcattgatactcattaatgcaaattcattatttaacatcaatatcagagtaatcttcaaggtctgaaatgagaaacatactgactttttaaaattttaacagtgtacttcttaggctttcattaccagctctgaagaactttttggaataattccatattccatagtgtgtggtttatgagttgtgggtttcatcactaacccagtaaccataagaaaagtctctctctctctctctctctctctctctttctctctccctctttctctctctctttcgtaggccagtagcaatgttgtgttcacagtctaatttccaaaagaccatcaataaaaaagagagcatgtttaaattgaaatggaacttagagaacttgagcttacttacgtacttcaatgccaccggtaacttaggttttaccaccaaatgctgttaacgttaaatcattttgaaaatcttggatgaaaggtgctatgtaaatggaaatacaaaggattcttactaacatacaaaaataatgcacaacagaaatatctaaaaccttttccgtagactttgaaacatctctctctctcataactccctggattcaagtagcacattggtaataggtatcagagcagtctagagacaattgcatgtcaaaaaatgtacattcatttttaggtggataaaagtaaacatagaaattatgttatggctaaatacagttagtgggtaacttagatttatattagctagcatctaatttgcacaactagaacacatcccagaacaattactgaaaagctgaaatttaatgggtggtgatgtagcccaatgagggcgaatgacattacagcttgacctctccagaacactaatatcctaaaatacagaacatgctgggttaagtgcattagtgcttcaagcagaaaatgctgaaaacaacgtgtaaagtactgaatctgagtaggctgaccctgagaagggacaattaaagagacaaccaagggaacacattgagactacaaaaatatgaataatctcaattatattcatcacacttttttcataccatttcaagaaacgactagacagtagtaaccacatgaatattttactttctccagtataccttgagaagcaaactttgtaggaagccactcttctcccctaaacaacttctgccaaacaataataaagccaactggaaacgaatcggagccattttcattttcctaaccggggcctgacatgctttaaattatctggctgtattctaaatcaacacctaacccctcaaggaaactgaagaatcaatatacagggtaatagctttggctcagagctccaataatgtgcttcagatctgtccatgtggaaatgctttcatccaaatttttaaattggtggttaccaaagagttcacaaaacaggtttgtatgtagcacctttcatgcaaggcatgcaaaaagcctattttaaaatcactgtgcatattatagagttgtagccacctcacaatgaagtactacagcctgtgctgtcttaatggtttatgtcaggaaatgaaaaagatactgtaccaaatctggaattacaatggggagtaataatgtatactaaatgacttttgtattttaagttactttttgtgagtggtgaatttttgtgtttttcttttcagctacacttagtcctgagatgtattttttctttaagtcttgaatgaatacaaaaggagcccattttataatataaaccttgatgtacatgttgagatatttggacaatgaaaatgccttaaaaggaatgcatatggataaagttgcacttataacacccttcaacaaaatctaattttaaattgtctttttcttttctattaagggttttctttttcagtgtctaccattgtacttataactgttattaaataccaaatcaaataatataaaagctgtaacatttcctttaaaactaatgctaataagggatttagagttgaatggcaaaatgtttattacttggcaatacctgatgtcagtcacaggcatccaactcatgacaagagataccactgtttgttttttaaaaaacatttttcattttgtttctccttcaaaaattaagttggactaacattcacgtatcaaactaatataaaaagaaataaaaccaagaggtgatttttgtaacaa

SEQ ID NO: 3425 - DNA, 9667 bp, Homo sapiens
  source 1..9667: mol_type = unassigned DNA; mol_type = unassigned DNA
gttactccggcttctccatagagggcggagaaggctggagcgcggcggtgattttgtgccagggattcccagagacgcgctgaaaggctggcagggcttaggaagctggggggttagggacacacattcaagcccccacccccgggaggggaagggggctggaggcgaggcttgagggcggcggaggaatggtgtctgctcggggggaaggggcgagccctgcctgttggtactgaggggctgcgggcagtggaggctccgcgggtcgaaagcggctccatgcccatcggtgggtggaacgtgtagaggtcggaacgccgaggtcgagtctggtggcgcctcggtatccttaacgtggtctctgtttaacgtatttcatttagcccccgttgggattgattcattgggagcagtttcgctggtctggatcctccaggagctggacaaccttgacgggctttttgtcttgggttccagccccctttcccttcctcctcctccagatgccttttctctgcccctcctcgcccggtacagacatttccagcgcaggctgctgctcgtggtgtccgtcgtcgaagccacttcttgggatttcggctcgtttcactctggggtgttttttgaggagggagagtgcccccctcctccacgatgggatttttctcccttgccgaaatggactttcattgatttctacttacttccacgtttagtgaccaattccctaggcgtatttttgtggtagttccttttttcaaatacatactctgtaaaatggagaacgaaatttttactccccttctggagcagttcatgaccagccctttggtcacttgggttaaaacgtttggacctctggccgcaggaaatgggaccaaccttgatgaatatgtggctttggtggatggggtattcttgaaccaggtcatgctccaaattaatcctaaattggagagtcagagagtaaataaaaaagtcaataatgatgcctcacttagaatgcacaatctatccattttggtgagacagataaaattttattaccaggagactttgcagcaattgatcatgatgtcgttgccaaatgtcttaatcattggcaaaaatcccttttctgaacaaggcacagaagaagttaaaaaactgcttttacttttattgggttgtgcagttcagtgtcagaaaaaagaggaatttattgaaagaattcaaggtttagattttgatacaaaagcagcggttgccgcacatattcaagaggtaactcataatcaggaaaatgtgtttgacctgcaatggatggaagtgactgatatgtcgcaggaggacatagaaccactcttgaaaaatatggcattgcatctaaaaagacttatagatgagagagatgaacattcagagactatcatagaactctctgaagagcgggatggtctccattttctaccccatgcctcttcatctgcacagtcaccctgtggttctccaggcatgaagcgaacagaaagtcgacaacatctgtcggtggaactggcagatgctaaagccaagataagaaggcttaggcaggaattggaggaaaagactgagcagttgttggattgtaaacaagaacttgagcaaatggaaatagaactcaaaaggctgcaacaagagaacatgaatttgctttcggatgctcgctctgccagaatgtaccgagatgaattagatgcacttcgagagaaagcagtcagagtcgataagcttgaaagtgaagtcagcagatataaagagagactacatgatattgaattttataaggcaagagttgaggaattaaaagaagacaatcaagttttattagaaacaaaaaccatgttggaagaccaactagagggaactcgtgctcgttctgataaattacatgaattagaaaaagagaacttacaactgaaagctaaacttcatgatatggaaatggaacgagatatggatagaaaaaagattgaagaattaatggaagaaaatatgactttggaaatggcacagaaacaaagtatggatgaatcattacatcttggctgggaactggaacagatatccagaactagtgaactttccgaagcaccccagaaatccctgggccatgaggtgaatgagttgacatcaagtagattattgaagctagagatggaaaatcaaagtttgacaaaaaccgtagaagagcttcggactactgtggattctgtagaaggcaatgcttccaaaatcctgaaaatggaaaaagaaaatcaaaggctcagtaaaaaggttgagattcttgaaaatgagattgttcaagaaaagcaaagtcttcagaattgtcagaatttaagcaaggatctaatgaaggagaaagctcagcttgaaaaaacaatagaaacactgagagaaaattcagagagacagattaagatactggaacaggaaaatgaacatctgaatcaaacagtgtcttccttaaggcagcggtcccagataagtgcagaagcaagagtgaaagacattgaaaaagaaaacaaaattcttcatgaatctatcaaagaaacaagtagcaagctaagcaagattgaatttgaaaaaagacaaattaaaaaagaattggaacattataaagaaaaaggagaacgagctgaagaacttgaaaatgaattgcatcatcttgaaaaagaaaatgaattattacagaaaaaaataactaatttaaaaattacttgtgaaaaaattgaggccttagaacaagaaaattcagagctagaaagagaaaatagaaaattaaaaaaaacattggatagctttaaaaatctgacctttcagttagaatccctagaaaaagagaattcccaacttgatgaggaaaacttagaactgcgaaggaatgtagaatctttgaagtgtgcaagcatgaaaatggctcagctacagctagaaaacaaagaactggaaagtgaaaaagagcaacttaagaagggtttggagctcctgaaagcatctttcaagaaaacagaacgcttagaagttagctaccagggtttagatatagaaaatcaaagactgcaaaaaactttagagaacagcaataaaaaaatccagcaattagagagtgaactacaagacttagagatggaaaatcaaacattgcagaaaaacctagaagaactaaaaatatctagcaaaagactagaacagctggaaaaagaaaataaatcattagagcaagagacttctcaactggaaaaggataagaaacaattggagaaggaaaataagagactccgacaacaagcagaaattaaagataccacattagaagaaaataatgtgaagattggaaatttggaaaaagaaaacaaaaccctatccaaagaaattggtatatataaagaatcttgtgtccgtctgaaagaactagaaaaagaaaataaggagcttgtgaaaagagcaactattgatataaaaacgttggttacactacgtgaggatttggtgagtgaaaagttgaagacccaacagatgaacaatgatctcgaaaaattaactcatgagcttgagaagatagggttaaataaggagcgactcttacatgatgaacaaagtactgatgacagtaggtataaacttttggaatcaaaattagaatccactcttaagaagtctcttgaaataaaagaagaaaaaattgctgctttagaagctcgattagaagaatccacgaattataaccagcaattgcgccaagaacttaaaacagtgaaaaaaaattatgaagctctcaaacagagacaagatgaggaaaggatggtacagagctctcctccaatatctggtgaagacaacaaatgggagcgagaaagtcaagaaacgactagagaacttctgaaagttaaagacagattaattgaagtagaaagaaataatgctacactgcaagcagagaagcaagcgttgaaaactcaactgaagcaacttgagacacagaacaataatttgcaggctcagattcttgcacttcagaggcagacagtgtcattacaagaacagaataccactcttcaaacacagaatgccaagcttcaggttgaaaattccacccttaattcccaaagtacctcactcatgaaccagaatgcccaactcctaatccagcagtcttccttagaaaatgaaaatgaatctgtaatcaaagagcgagaagacctaaaatctctctatgattctctgatcaaagatcatgaaaagctggaacttcttcatgaacgtcaggcttcagagtatgaatctcttatctctaaacatggaactctgaagtctgcccacaaaaatcttgaggtggaacatagagaccttgaagaccgttacaatcagttattaaaacagaaaggacagttggaagatttggaaaaaatgctcaaagtagaacaggaaaaaatgctgcttgaaaataaaaatcatgaaacagtagctgcagaatacaagaaactttgtggtgaaaatgataggctgaatcatacctatagtcaacttttaaaagagactgaagttttacaaactgaccataaaaatttgaaaagtcttctgaataattccaaactggaacaaacaagattagaagctgaattttcaaaactaaaggaacaataccaacaattggatattacatcaaccaagctgaataaccagtgtgagttgctaagccaacttaaaggaaatttagaagaagaaaatcggcatctactagatcaaattcagacattaatgctacagaacagaacacttttggagcagaatatggaaagcaaggatctttttcatgttgaacaaagacagtacattgataagttaaatgaattaagacgtcagaaggagaaactagaagagaaaattatggatcaatacaaattttatgacccatctcctcctagaaggagaggcaactggattactctaaaaatgagaaaattgataaagtctaagaaagatattaatcgggaacgccagaaatctctaacattaacacccacccgctcagactccagtgaaggatttcttcagctccctcatcaagacagtcaagatagttcttcagtaggttcaaactctttagaagatggccagaccttggggaccaagaaaagcagcaccatgaatgacctggtgcagtccatggtcctagcaggacagtggacaggtagtactgagaatttggaggttcctgatgatatttcaacgggtaaaaggagaaaagaattgggagctatggccttctctactacagccatcaacttttcaactgtcaactcttctgcaggcttcagatccaagcagttggttaataataaagatactacatcctttgaagacataagtccacaaggtgttagtgatgattctagtacgggatcaagagttcatgcttcaagaccagccagccttgatagtggcagaacatccactagcaatagcaataataatgcttcactacatgaagtcaaagcaggtgcagttaataaccaaagcaggccacaaagccacagcagtggagaatttagcctgcttcatgaccatgaggcttggtccagcagtggtagcagtccaatccagtacttgaaaagacagaccagatcaagcccagtgctccagcacaaaatatctgaaacactggagagtcgacatcacaagatcaaaactggttcccctggaagtgaagttgttactctacaacagtttttggaagaaagcaataagcttacctcagtacagataaagtcctcaagtcaagagaatcttttagatgaagtaatgaaaagtttgtctgtctcttctgactttttgggaaaagacaaaccagttagctgtggtctggccaggtcagtaagtggaaaaaccccaggggacttctatgatagacggacaactaagcctgagtttttgagacctggtcctcgaaaaactgaagatacctacttcattagttctgcgggaaaacctacaccaggcactcaaggaaaaataaaattagtaaaagaatcttctctgtcacgacaatcaaaagatagtaacccttatgcaactttacctcgtgcaagcagcgtgatctcaactgccgaaggaactacacgaaggacaagcatccatgattttttgaccaaggacagtagactgcctatatcagttgattcaccaccagctgctgctgacagcaacaccactgcagcatctaatgtggacaaagtacaagaaagcagaaattcaaaaagcaggtctagggagcaacaaagctcctaattctattacccactacatgacatgtgggccaagtgagagaaaagtgtccttcagtttctcagtatgaagcctttatttctgaagtaacaagacacctagcaactataggaatcatttttaaaaatctttaaggagacttttaacagtccttcgtgaatagagcaggcaagaaatacaaaccttcattccttgaatcaaggagcactactggattcaactgccaaaattttttaaaggttttaggacttactataccttgtactgttaagatctactgaataaaggacgttctctcactaaggaccaggtgttttaaggttaagtgtttaaagaagtactccaagaacaatctgcttttttcatcatttgttttatgaatttatccatgtttgcttaatgcttctgctaagtgttagccaaaatctagccatttatatttagttgtgtaaacctaaattaaatgctgtagtattttgtggaatgtactatatagcaagatacagagaaaattgttttggcatgtcagagccttatttggttagcagactgcatgtgttgatactttttttttcttaaagccaattattttgatgcaaaagaaattcagtttataagataaatctgaaaaatccataatgaaataggagttataaaaaatttatagtgatattaatctttccatatttcccattaagcaacactaagcattcataagttaacccatggtaaagagtgtttttctgaaacttttttttagtaagatggtttttcagcaaatggcattcccaagataaagctgttgtgctttaactcatttcttttctttggtattgggttatgtatgcgtgtgcatttttttaacttgagagctgactgttgcttaagaagttttcttatggcaaaaataatgtaaataagttactatgatctgcattttgccagaaactcatttataattaaggctatcatttattaatgatttttttctcctttatgatattacattaaagttgataactgttattggtacttttgaaatatttgtatgcatttgttacctttaaacatttggaagaagcacaaaaaaatagatttagttaacccagggaaacatcaatttttttagtagttccaattttatatcacagttttattttcttatgaaatcaaaaaatgcattgatactcattaatgcaaattcattatttaacatcaatatcagagtaatcttcaaggtctgaaatgagaaacatactgactttttaaaattttaacagtgtacttcttaggctttcattaccagctctgaagaactttttggaataattccatattccatagtgtgtggtttatgagttgtgggtttcatcactaacccagtaaccataagaaaagtctctctctctctctctctctctctctctttctctctccctctttctctctctctttcgtaggccagtagcaatgttgtgttcacagtctaatttccaaaagaccatcaataaaaaagagagcatgtttaaattgaaatggaacttagagaacttgagcttacttacgtacttcaatgccaccggtaacttaggttttaccaccaaatgctgttaacgttaaatcattttgaaaatcttggatgaaaggtgctatgtaaatggaaatacaaaggattcttactaacatacaaaaataatgcacaacagaaatatctaaaaccttttccgtagactttgaaacatctctctctctcataactccctggattcaagtagcacattggtaataggtatcagagcagtctagagacaattgcatgtcaaaaaatgtacattcatttttaggtggataaaagtaaacatagaaattatgttatggctaaatacagttagtgggtaacttagatttatattagctagcatctaatttgcacaactagaacacatcccagaacaattactgaaaagctgaaatttaatgggtggtgatgtagcccaatgagggcgaatgacattacagcttgacctctccagaacactaatatcctaaaatacagaacatgctgggttaagtgcattagtgcttcaagcagaaaatgctgaaaacaacgtgtaaagtactgaatctgagtaggctgaccctgagaagggacaattaaagagacaaccaagggaacacattgagactacaaaaatatgaataatctcaattatattcatcacacttttttcataccatttcaagaaacgactagacagtagtaaccacatgaatattttactttctccagtataccttgagaagcaaactttgtaggaagccactcttctcccctaaacaacttctgccaaacaataataaagccaactggaaacgaatcggagccattttcattttcctaaccggggcctgacatgctttaaattatctggctgtattctaaatcaacacctaacccctcaaggaaactgaagaatcaatatacagggtaatagctttggctcagagctccaataatgtgcttcagatctgtccatgtggaaatgctttcatccaaatttttaaattggtggttaccaaagagttcacaaaacaggtttgtatgtagcacctttcatgcaaggcatgcaaaaagcctattttaaaatcactgtgcatattatagagttgtagccacctcacaatgaagtactacagcctgtgctgtcttaatggtttatgtcaggaaatgaaaaagatactgtaccaaatctggaattacaatggggagtaataatgtatactaaatgacttttgtattttaagttactttttgtgagtggtgaatttttgtgtttttcttttcagctacacttagtcctgagatgtattttttctttaagtcttgaatgaatacaaaaggagcccattttataatataaaccttgatgtacatgttgagatatttggacaatgaaaatgccttaaaaggaatgcatatggataaagttgcacttataacacccttcaacaaaatctaattttaaattgtctttttcttttctattaagggttttctttttcagtgtctaccattgtacttataactgttattaaataccaaatcaaataatataaaagctgtaacatttcctttaaaactaatgctaataagggatttagagttgaatggcaaaatgtttattacttggcaatacctgatgtcagtcacaggcatccaactcatgacaagagataccactgtttgttttttaaaaaacatttttcattttgtttctccttcaaaaattaagttggactaacattcacgtatcaaactaatataaaaagaaataaaaccaagaggtgatttttgtaacaa

SEQ ID NO: 3426 - DNA, 4236 bp, Homo sapiens
  source 1..4236: mol_type = unassigned DNA; mol_type = unassigned DNA
aaattatggatcaatacaaattttatgacccatctcctcctagaaggagaggcaactggattactctaaaaatgagaaaattgataaagtctaagaaagatattaatcgggaacgccagaaatctctaacattaacacccacccgctcagactccagtgaaggatttcttcagctccctcatcaagacagtcaagatagttcttcagtaggttcaaactctttagaagatggccagaccttggggaccaagaaaagcagcaatactacatcctttgaagacataagtccacaaggtgttagtgatgattctagtacgggatcaagagttcatgcaggtgcagttaataaccaaagcaggccacaaagccacagcagtggagaatttagcctgcttcatgaccatgaggcttggtccagcagtggtagcagtccaatccagtacttgaaaagacagaccagatcaagcccagtgctccagcacaaaatatctgaaacactggagagtcgacatcacaagatcaaaactggttcccctggaagtgaagttgttactctacaacagtttttggaagaaagcaataagcttacctcagtacagataaagtcctcaagtcaagagaatcttttagatgaagtaatgaaaagtttgtctgtctcttctgactttttgggaaaagacaaaccagttagctgtggtctggccaggtcagtaagtggaaaaaccccaggggacttctatgatagacggacaactaagcctgagtttttgagacctggtcctcgaaaaactgaagatacctacttcattagttctgcgggaaaacctacaccaggcactcaaggaaaaataaaattagtaaaagaatcttctctgtcacgacaatcaaaagatagtaacccttatgcaactttacctcgtgcaagcagcgtgatctcaactgccgaaggaactacacgaaggacaagcatccatgattttttgaccaaggacagtagactgcctatatcagttgattcaccaccagctgctgctgacagcaacaccactgcagcatctaatgtggacaaagtacaagaaagcagaaattcaaaaagcaggtctagggagcaacaaagctcctaattctattacccactacatgacatgtgggccaagtgagagaaaagtgtccttcagtttctcagtatgaagcctttatttctgaagtaacaagacacctagcaactataggaatcatttttaaaaatctttaaggagacttttaacagtccttcgtgaatagagcaggcaagaaatacaaaccttcattccttgaatcaaggagcactactggattcaactgccaaaattttttaaaggttttaggacttactataccttgtactgttaagatctactgaataaaggacgttctctcactaaggaccaggtgttttaaggttaagtgtttaaagaagtactccaagaacaatctgcttttttcatcatttgttttatgaatttatccatgtttgcttaatgcttctgctaagtgttagccaaaatctagccatttatatttagttgtgtaaacctaaattaaatgctgtagtattttgtggaatgtactatatagcaagatacagagaaaattgttttggcatgtcagagccttatttggttagcagactgcatgtgttgatactttttttttcttaaagccaattattttgatgcaaaagaaattcagtttataagataaatctgaaaaatccataatgaaataggagttataaaaaatttatagtgatattaatctttccatatttcccattaagcaacactaagcattcataagttaacccatggtaaagagtgtttttctgaaacttttttttagtaagatggtttttcagcaaatggcattcccaagataaagctgttgtgctttaactcatttcttttctttggtattgggttatgtatgcgtgtgcatttttttaacttgagagctgactgttgcttaagaagttttcttatggcaaaaataatgtaaataagttactatgatctgcattttgccagaaactcatttataattaaggctatcatttattaatgatttttttctcctttatgatattacattaaagttgataactgttattggtacttttgaaatatttgtatgcatttgttacctttaaacatttggaagaagcacaaaaaaatagatttagttaacccagggaaacatcaatttttttagtagttccaattttatatcacagttttattttcttatgaaatcaaaaaatgcattgatactcattaatgcaaattcattatttaacatcaatatcagagtaatcttcaaggtctgaaatgagaaacatactgactttttaaaattttaacagtgtacttcttaggctttcattaccagctctgaagaactttttggaataattccatattccatagtgtgtggtttatgagttgtgggtttcatcactaacccagtaaccataagaaaagtctctctctctctctctctctctctctctttctctctccctctttctctctctctttcgtaggccagtagcaatgttgtgttcacagtctaatttccaaaagaccatcaataaaaaagagagcatgtttaaattgaaatggaacttagagaacttgagcttacttacgtacttcaatgccaccggtaacttaggttttaccaccaaatgctgttaacgttaaatcattttgaaaatcttggatgaaaggtgctatgtaaatggaaatacaaaggattcttactaacatacaaaaataatgcacaacagaaatatctaaaaccttttccgtagactttgaaacatctctctctctcataactccctggattcaagtagcacattggtaataggtatcagagcagtctagagacaattgcatgtcaaaaaatgtacattcatttttaggtggataaaagtaaacatagaaattatgttatggctaaatacagttagtgggtaacttagatttatattagctagcatctaatttgcacaactagaacacatcccagaacaattactgaaaagctgaaatttaatgggtggtgatgtagcccaatgagggcgaatgacattacagcttgacctctccagaacactaatatcctaaaatacagaacatgctgggttaagtgcattagtgcttcaagcagaaaatgctgaaaacaacgtgtaaagtactgaatctgagtaggctgaccctgagaagggacaattaaagagacaaccaagggaacacattgagactacaaaaatatgaataatctcaattatattcatcacacttttttcataccatttcaagaaacgactagacagtagtaaccacatgaatattttactttctccagtataccttgagaagcaaactttgtaggaagccactcttctcccctaaacaacttctgccaaacaataataaagccaactggaaacgaatcggagccattttcattttcctaaccggggcctgacatgctttaaattatctggctgtattctaaatcaacacctaacccctcaaggaaactgaagaatcaatatacagggtaatagctttggctcagagctccaataatgtgcttcagatctgtccatgtggaaatgctttcatccaaatttttaaattggtggttaccaaagagttcacaaaacaggtttgtatgtagcacctttcatgcaaggcatgcaaaaagcctattttaaaatcactgtgcatattatagagttgtagccacctcacaatgaagtactacagcctgtgctgtcttaatggtttatgtcaggaaatgaaaaagatactgtaccaaatctggaattacaatggggagtaataatgtatactaaatgacttttgtattttaagttactttttgtgagtggtgaatttttgtgtttttcttttcagctacacttagtcctgagatgtattttttctttaagtcttgaatgaatacaaaaggagcccattttataatataaaccttgatgtacatgttgagatatttggacaatgaaaatgccttaaaaggaatgcatatggataaagttgcacttataacacccttcaacaaaatctaattttaaattgtctttttcttttctattaagggttttctttttcagtgtctaccattgtacttataactgttattaaataccaaatcaaataatat

SEQ ID NO: 3427 - DNA, 2880 bp, Homo sapiens
  source 1..2880: mol_type = unassigned DNA; mol_type = unassigned DNA
cttttggaatcaaaattagaatccactcttaagaagtctcttgaaataaaagaagaaaaaattgctgctttagaagctcgattagaagaatccacgaattataaccagcaattgcgccaagaacttaaaacagtgaaaaaaaattatgaagctctcaaacagagacaagatgaggaaaggatggtacagagctctcctccaatatctggtgaagacaacaaatgggagcgagaaagtcaagaaacgactagagaacttctgaaagttaaagacagattaattgaagtagaaagaaataatgctacactgcaagcagagaagcaagcgttgaaaactcaactgaagcaacttgagacacagaacaataatttgcaggctcagattcttgcacttcagaggcagacagtgtcattacaagaacagaataccactcttcaaacacagaatgccaagcttcaggttgaaaattccacccttaattcccaaagtacctcactcatgaaccagaatgcccaactcctaatccagcagtcttccttagaaaatgaaaatgaatctgtaatcaaagagcgagaagacctaaaatctctctatgattctctgatcaaagatcatgaaaagctggaacttcttcatgaacgtcaggcttcagagtatgaatctcttatctctaaacatggaactctgaagtctgcccacaaaaatcttgaggtggaacatagagaccttgaagaccgttacaatcagttattaaaacagaaaggacagttggaagatttggaaaaaatgctcaaagtagaacaggaaaaaatgctgcttgaaaataaaaatcatgaaacagtagctgcagaatacaagaaactttgtggtgaaaatgataggctgaatcatacctatagtcaacttttaaaagagactgaagttttacaaactgaccataaaaatttgaaaagtcttctgaataattccaaactggaacaaacaagattagaagctgaattttcaaaactaaaggaacaataccaacaattggatattacatcaaccaagctgaataaccagtgtgagttgctaagccaacttaaaggaaatttagaagaagaaaatcggcatctactagatcaaattcagacattaatgctacagaacagaacacttttggagcagaatatggaaagcaaggatctttttcatgttgaacaaagacagtacattgataagttaaatgaattaagacgtcagaaggagaaactagaagagaaaattatggatcaatacaaattttatgacccatctcctcctagaaggagaggcaactggattactctaaaaatgagaaaattgataaagtctaagaaagatattaatcgggaacgccagaaatctctaacattaacacccacccgctcagactccagtgaaggatttcttcagctccctcatcaagacagtcaagatagttcttcagtaggttcaaactctttagaagatggccagaccttggggaccaagaaaagcagcaccatgaatgacctggtgcagtccatggtcctagcaggacagtggacaggtagtactgagaatttggaggttcctgatgatatttcaacgggtaaaaggagaaaagaattgggagctatggccttctctactacagccatcaacttttcaactgtcaactcttctgcaggcttcagatccaagcagttggttaataataaagatactacatcctttgaagacataagtccacaaggtgttagtgatgattctagtacgggatcaagagttcatgcttcaagaccagccagccttgatagtggcagaacatccactagcaatagcaataataatgcttcactacatgaagtcaaagcaggtgcagttaataaccaaagcaggccacaaagccacagcagtggagaatttagcctgcttcatgaccatgaggcttggtccagcagtggtagcagtccaatccagtacttgaaaagacagaccagatcaagcccagtgctccagcacaaaatatctgaaacactggagagtcgacatcacaagatcaaaactggttcccctggaagtgaagttgttactctacaacagtttttggaagaaagcaataagcttacctcagtacagataaagtcctcaagtcaagagaatcttttagatgaagtaatgaaaagtttgtctgtctcttctgactttttgggaaaagacaaaccagttagctgtggtctggccaggtcagtaagtggaaaaaccccaggggacttctatgatagacggacaactaagcctgagtttttgagacctggtcctcgaaaaactgaagatacctacttcattagttctgcgggaaaacctacaccaggcactcaaggaaaaataaaattagtaaaagaatcttctctgtcacgacaatcaaaagatagtaacccttatgcaactttacctcgtgcaagcagcgtgatctcaactgccgaaggaactacacgaaggacaagcatccatgattttttgaccaaggacagtagactgcctatatcagttgattcaccaccagctgctgctgacagcaacaccactgcagcatctaatgtggacaaagtacaagaaagcagaaattcaaaaagcaggtctagggagcaacaaagctcctaattctattacccactacatgacatgtgggccaagtgctacacttagtcctgagatgtattttttctttaagtcttgaatgaatacaaaaggagcccattttataatataaaccttgatgtacatgttgagatatttggacaatgaaaatgccttaaaaggaatgcatatggataaagttgcacttataacacccttcaacaaaatctaatttta

SEQ ID NO: 3428 - DNA, 4500 bp, Homo sapiens
  source 1..4500: mol_type = unassigned DNA; mol_type = unassigned DNA
caactggaaaaggataagaaacaattggagaaggaaaataagagactccgacaacaagcagaaattaaagataccacattagaagaaaataatgtgaagattggaaatttggaaaaagaaaacaaaaccctatccaaagaaattggtatatataaagaatcttgtgtccgtctgaaagaactagaaaaagaaaataaggagcttgtgaaaagagcaactattgatataaaaacgttggttacactacgtgaggatttggtgagtgaaaagttgaagacccaacagatgaacaatgatctcgaaaaattaactcatgagcttgagaagatagggttaaataaggagcgactcttacatgatgaacaaagtactgatgacagtaggtataaacttttggaatcaaaattagaatccactcttaagaagtctcttgaaataaaagaagaaaaaattgctgctttagaagctcgattagaagaatccacgaattataaccagcaattgcgccaagaacttaaaacagtgaaaaaaaattatgaagctctcaaacagagacaagatgaggaaaggatggtacagagctctcctccaatatctggtgaagacaacaaatgggagcgagaaagtcaagaaacgactagagaacttctgaaagttaaagacagattaattgaagtagaaagaaataatgctacactgcaagcagagaagcaagcgttgaaaactcaactgaagcaacttgagacacagaacaataatttgcaggctcagattcttgcacttcagaggcagacagtgtcattacaagaacagaataccactcttcaaacacagaatgccaagcttcaggttgaaaattccacccttaattcccaaagtacctcactcatgaaccagaatgcccaactcctaatccagcagtcttccttagaaaatgaaaatgaatctgtaatcaaagagcgagaagacctaaaatctctctatgattctctgatcaaagatcatgaaaagctggaacttcttcatgaacgtcaggcttcagagtatgaatctcttatctctaaacatggaactctgaagtctgcccacaaaaatcttgaggtggaacatagagaccttgaagaccgttacaatcagttattaaaacagaaaggacagttggaagatttggaaaaaatgctcaaagtagaacaggaaaaaatgctgcttgaaaataaaaatcatgaaacagtagctgcagaatacaagaaactttgtggtgaaaatgataggctgaatcatacctatagtcaacttttaaaagagactgaagttttacaaactgaccataaaaatttgaaaagtcttctgaataattccaaactggaacaaacaagattagaagctgaattttcaaaactaaaggaacaataccaacaattggatattacatcaaccaagctgaataaccagtgtgagttgctaagccaacttaaaggaaatttagaagaagaaaatcggcatctactagatcaaattcagacattaatgctacagaacagaacacttttggagcagaatatggaaagcaaggatctttttcatgttgaacaaagacagtacattgataagttaaatgaattaagacgtcagaaggagaaactagaagagaaaattatggatcaatacaaattttatgacccatctcctcctagaaggagaggcaactggattactctaaaaatgagaaaattgataaagtctaagaaagatattaatcgggaacgccagaaatctctaacattaacacccacccgctcagactccagtgaaggatttcttcagctccctcatcaagacagtcaagatagttcttcagtaggttcaaactctttagaagatggccagaccttggggaccaagaaaagcagcatggttgcactgaaaagactgccctttttgaggaacagaccgaaggataaagacaaaatgaaggcctgctaccgtcgttccatgtccatgaatgacctggtgcagtccatggtcctagcaggacagtggacaggtagtactgagaatttggaggttcctgatgatatttcaacgggtaaaaggagaaaagaattgggagctatggccttctctactacagccatcaacttttcaactgtcaactcttctgcaggcttcagatccaagcagttggttaataataaagatactacatcctttgaagacataagtccacaaggtgttagtgatgattctagtacgggatcaagagttcatgcttcaagaccagccagccttgatagtggcagaacatccactagcaatagcaataataatgcttcactacatgaagtcaaagcaggtgcagttaataaccaaagcaggccacaaagccacagcagtggagaatttagcctgcttcatgaccatgaggcttggtccagcagtggtagcagtccaatccagtacttgaaaagacagaccagatcaagcccagtgctccagcacaaaatatctgaaacactggagagtcgacatcacaagatcaaaactggttcccctggaagtgaagttgttactctacaacagtttttggaagaaagcaataagcttacctcagtacagataaagtcctcaagtcaagagaatcttttagatgaagtaatgaaaagtttgtctgtctcttctgactttttgggaaaagacaaaccagttagctgtggtctggccaggtcagtaagtggaaaaaccccaggggacttctatgatagacggacaactaagcctgagtttttgagacctggtcctcgaaaaactgaagatacctacttcattagttctgcgggaaaacctacaccaggcactcaaggaaaaataaaattagtaaaagaatcttctctgtcacgacaatcaaaagatagtaacccttatgcaactttacctcgtgcaagcagcgtgatctcaactgccgaaggaactacacgaaggacaagcatccatgattttttgaccaaggacagtagactgcctatatcagttgattcaccaccagctgctgctgacagcaacaccactgcagcatctagtgagtaccatttacaccagtggtcctctcatatacttgacatcccaacacatactataggttcttgtgcccaaaatgatttagctatagacatgcctgagcctctatatgcccaggctagaaactcaagaacaggaaggtcacattttctaaaccaaacttttgccactattaggatgcctagtgatgcattcggaatgttggcaaaagatagcataggaccatttactgtggcccattcatctcagccattcttatccctgaatacagaattagttagtaacataagtgggttacctcctaggccagttatcagaataactgaccaggcttctgcctctttggataaacctgcacagaaagaaaatgaacagttttctgatcatcagaaccctagtaacagtaacctacagttttctataaatagcaacaatcttgtcacttctgcatgcctctatcctgatgacacagaagctgcattgttggtttctgaggataatcaaactgtttggtatgaatatggttgtatatgatcaaaactgcacaatataatatattgatgttatttgatatacactgcttctctaatatgatttgaaaagttgctgttaacaaaatatcatttggctaggtttttattttttatttaaaattgttgcacagtgttcagctgtacatgatggcatgtatattaatgtgaatgtgtaaccacaccaaaacctgcatgaaatattaattactttgtccattttctgcatgcctttaaaaaccttaaccatacatgctcctccttcacattttttgttgcctgataagattgttactttgatatccagaagcatgttaaaacagttgcatgctctcttaccaagaagacatttccaagtcatatttgctttgttgcttctggaaaaaaatgttcatttcctccctcccttcctcctcttcccacccctcacttgctctgactgtcactcctttttttcttccagaatgtgtactttatattacatatgtacagtatcagtagggaaaatgtaaaaagatgttgttttcttttgtcatttaattaggccatctgtcctgttttaaagaaatagttaataattcaacactttatataacaaatattaactaatacccatatttataaaacatttttcagatttaaaagattgttaatacttataaacttagtgttattcttagaaaaccccatcaaatttaaatgtgatttacacagtgactaggaacatttgtatttattgtttcttctctgcacttttcatcatctgataaatacaagagctcaagtaactgtcttttcttcaagatggcttctatacttgaaatcagttaatacaatagtttttccagttctttttttatagagagtcaaagagaaataaaccaaattatattca

SEQ ID NO: 3429 - DNA, 2208 bp, Homo sapiens
  source 1..2208: mol_type = unassigned DNA; mol_type = unassigned DNA
taagaagtctcttgaaataaaagaagaaaaaattgctgctttagaagctcgattagaagaatccacgaattataaccagcaattgcgccaagaacttaaaacaaatgctacactgcaagcagagaagcaagcgttgaaaactcaactgaagcaacttgagacacagaacaataatttgcaggctcagattcttgcacttcagaggcagacagtgtcattacaagaacagaataccactcttcaaacacagaatgccaagcttcaggttgaaaattccacccttaattcccaaagtacctcactcatgaaccagaatgcccaactcctaatccagcagtcttccttagaaaatgaaaatgaatctgtaatcaaagagcgagaagacctaaaatctctctatgattctctgatcaaagatcatgaaaagctggaacttcttcatgaacgtcaggcttcagagtatgaatctcttatctctaaacatggaactctgaagtctgcccacaaaaatcttgaggtggaacatagagaccttgaagaccgttacaatcagttattaaaacagaaaggacagttggaagatttggaaaaaatgctcaaagtagaacaggaaaaaatgctgcttgaaaataaaaatcatgaaacagtagctgcagaatacaagaaactttgtggtgaaaatgataggctgaatcatacctatagtcaacttttaaaagagactgaagttttacaaactgaccataaaaatttgaaaagtcttctgaataattccaaactggaacaaacaagattagaagctgaattttcaaaactaaaggaacaataccaacaattggatattacatcaaccaagctgaataaccagtgtgagttgctaagccaacttaaaggaaatttagaagaagaaaatcggcatctactagatcaaattcagacattaatgctacagaacagaacacttttggagcagaatatggaaagcaaggatctttttcatgttgaacaaagacagtacattgataagttaaatgaattaagacgtcagaaggagaaactagaagagaaaattatggatcaatacaaattttatgacccatctcctcctagaaggagaggcaactggattactctaaaaatgagaaaattgataaagtctaagaaagatattaatcgggaacgccagaaatctctaacattaacacccacccgctcagactccagtgaaggatttcttcagctccctcatcaagacagtcaagatagttcttcagtaggttcaaactctttagaagatggccagaccttggggaccaagaaaagcagcaccatgaatgacctggtgcagtccatggtcctagcaggacagtggacaggtagtactgagaatttggaggttcctgatgatatttcaacgggtaaaaggagaaaagaattgggagctatggccttctctactacagccatcaacttttcaactgtcaactcttctgcaggcttcagatccaagcagttggttaataataaagatactacatcctttgaagacataagtccacaaggtgttagtgatgattctagtacgggatcaagagttcatgcttcaagaccagccagccttgatagtggcagaacatccactagcaatagcaataataatgcttcactacatgaagtcaaagcaggtgcagttaataaccaaagcaggccacaaagccacagcagtggagaatttagcctgcttcatgaccatgaggcttggtccagcagtggtagcagtccaatccagtacttgaaaagacagaccagatcaagcccagtgctccagcacaaaatatctgaaacactggagagtcgacatcacaagatcaaaactggttcccctggaagtgaagttgttactctacaacagtttttggaagaaagcaataagcttacctcagtacagataaagtcctcaagtcaagagaatcttttagatgaagtaatgaaaagtttgtctgtctcttctgactttttgggaaaagacaaaccagttagctgtggtctggccaggtcagtaagtggaaaaaccccaggggacttctatgatagacggacaactaagcctgagtttttgagacctggtcctcgaaaaactgaagatacctacttcattagttctgcgggaaaacctacaccaggcactcaaggaaaaataaaattagt

SEQ ID NO: 3430 - DNA, 541 bp, Homo sapiens
  source 1..541: mol_type = unassigned DNA; mol_type = unassigned DNA
aaaatgaatctgtaatcaaagagcgagaagacctaaaatctctctatgattctctgatcaaagatcatgaaaagctggaacttcttcatgaacgtcaggcttcagagtatgaatctcttatctctaaacatggaactctgaagtctgcccacaaaaatcttgaggtggaacatagagaccttgaagaccggctgaatcatacctatagtcaacttttaaaagagactgaagttttacaaactgaccataaaaatttgaaaagtcttctgaataattccaaactggaacaaacaagattagaagctgaattttcaaaactaaaggaacaataccaacaattggatattacatcaaccaagctgaataaccagtgtgagttgctaagccaacttaaaggaaatttagaagaagaaaatcggcatctactagatcaaattcagacattaatgctacagaacagaacacttttggagcagaatatggaaagcaaggatctttttcatgttgaacaaagacagtacattgataagttaaatgaatt

SEQ ID NO: 3431 - DNA, 419 bp, Homo sapiens
  source 1..419: mol_type = unassigned DNA; mol_type = unassigned DNA
tttgaaaagtcttctgaataattccaaactggaacaaacaagattagaagctgaattttcaaaactaaaggaacaataccaacaattggatattacatcaaccaagctgaataaccagtgtgagcagggctctgagagtctgagtggaagtccacaggcaacttgaggcctagacttggaactgttacaccatcacttccacctctttctcttggccaaaagcattccaaattcaagaagaaggaaaatagattccacttctttacgggaaaagtgagaagtcacattgcaagagggcataggtacagggaagaaaataaatgcattcagttttttaatgaatctaccacatatgttatgtttcaatttaacaacatacagataaataaaaccaacgtagtatgatattcacagttaca

SEQ ID NO: 3432 - DNA, 536 bp, Homo sapiens
  source 1..536: mol_type = unassigned DNA; mol_type = unassigned DNA
cttctcaactggaaaaggataagaaacaattggagaaggaaaataagagactccgacaacaagcagaaattaaagataccacattagaagaaaataatgtgaagattggaaatttggaaaaagaaaacaaaaccctatccaaagaaattggtatatataaagaatcttgtgtccgtctgaaagaactagaaaaagaaaataaggagcttgtgaaaagagcaactattgatataaaaacgttggttacactacgtgaggatttggtgagtgaaaagttgaagacccaacagatgaacaatgatctcgaaaaattaactcatgagcttgagaagatagggttaaataaggagcgactcttacatgatgaacaaagtactgatgacaggtgagtactaagtctacttggcaaacagttgaaaatttttttttttttttgctcatacatgaattctttctgtactagctatagaaaacatttatatatttcaccctatttctggttccttccttcccttaaggaaagttctgtagccggg

SEQ ID NO: 3433 - DNA, 582 bp, Homo sapiens
  source 1..582: mol_type = unassigned DNA; mol_type = unassigned DNA
attctatgcagagatagctttatcaaatgtgcttcagctaagtaacaatccaacacaattattaatatttttccctcagtaatcctaaattggagagtcagagagtaaataaaaaagtcaataatgatgcctcacttagaatgcacaatctatccattttggtgagacagataaaattttattaccaggagactttgcagcaattgatcatgatgtcgttgccaaatgtcttaatcattggcaaaaatcccttttctgaacaaggcacagaagaagttaaaaaactgcttttacttttattgggttgtgcagttcagtgtcagaaaaaagaggaatttattgaaagaattcaaggtttagattttgatacaaaagcagcggttgccgcacatattcaagaggtaactcataatcaggaaaatgtgtttgacctgcaatggatggaagtgactgatatgtcgcaggaggacatagaaccactcttgaaaaatatggcattgcatctaaaaagacttatagatgagagagatgaacattcagagactatcatagaactctctgaagagcgggatggtctccatt

SEQ ID NO: 3434 - DNA, 3713 bp, Homo sapiens
  source 1..3713: mol_type = unassigned DNA; mol_type = unassigned DNA
gttactccggcttctccatagagggcggagaaggctggagcgcggcggtgattttgtgccagggattcccagagacgcgctgaaaggctggcagggcttaggaagctggggggttagggacacacattcaagcccccacccccgggaggggaagggggctggaggcgaggcttgagggcggcggaggaatggtgtctgctcggggggaaggggcgagccctgcctgttggtactgaggggctgcgggcagtggaggctccgcgggtcgaaagcggctccatgcccatcggtgggtggaacgtgtagaggtcggaacgccgaggtcgagtctggtggcgcctcggtatccttaacgtggtctctgtttaacgtatttcatttagcccccgttgggattgattcattgggagcagtttcgctggtctggatcctccaggagctggacaaccttgacgggctttttgtcttgggttccagccccctttcccttcctcctcctccagatgccttttctctgcccctcctcgcccggtacagacatttccagcgcaggctgctgctcgtggtgtccgtcgtcgaagccacttcttgggatttcggctcgtttcactctggggtgttttttgaggagggagagtgcccccctcctccacgatgggatttttctcccttgccgaaatggactttcattgatttctacttacttccacgtttagtgaccaattccctaggcgtatttttgtggtagttccttttttcaaatacatactctgtaaaatggagaacgaaatttttactccccttctggagcagttcatgaccagccctttggtcacttgggttaaaacgtttggacctctggccgcaggaaatgggaccaaccttgatgaatatgtggctttggtggatggggtattcttgaaccaggtcatgctccaaatgacagagtctcactctgttgcccaggctactggagtgcagtggcccgatcttggctcactgcaacctccacctcccggattcaagcaattctcctgcctcagcatcctgagttgctgggactacagcgcgtgccaccacagctagctaattttttgtatttttagtagagacggggtttcaccgtattaactaggatggtcttgatctcctgacctcgtgatccaaccgcctcagcctcacaaagtgctgggattataggcgtgagccgccgcacctggcctgtatcttttttttttaacttaagtattaagtatagcagcagcccctaaccttttttgcagtagggatcattttcatggaggacagttttttccacggaccagggcgggggccattagattctcataaggagtgggcaacttagatcccttgtatggcagttcacaatagggttcgtgctcctaagaaaatctaatgctgccgccagtctgacaggaggcagagctcaggtggtaatgcttgcctgcccaccgctcacctgccatgcagactggttcctaacagggcacagacctgtactggtcctcggcccaggggttggggaccctgaagcatagtactgaatgtgtatactgactaagacaaacctgtagttaatagtgaatgatcccaagcaggtatttgaaaacaaatctctagttattaggttgctttttttcttttcttttctttcattaatctgtatgggtttcatgtttcttttgagagagagagagtgtgctgagagagtgagttgtgtgggtgtgtgaactggaataaattagggagccctgatgtctagaagttaggtttggcctttgaaggtatgtttagtcagggaaacctatctgtggaggaagttagatttgatttaaaccttgaaaggtgactgaacttggatagctatccgtgaggagaggagggtattttaggccaaggaagcgttttaggggaaaagcatactgcatgtatgatttgggaaatggtgaggggactagccttagtggaggaaccaagttgaggaatagtacaatacagtattttaaaatcttaggtcatttattcctttgccttttaaaaactattttgcggctgggcgcagtggctcatgcctgtaatcccagaactttgggaggccgaggcttgcggattacctgcggtcagtttgagaccagacttgccaacatggtgaaaccccatctctactaaaaatacaaaaattagctgggcatggtggcacatgcctgtaaccccagctactcgggggaggctggggcaggagaattgcttgagcccgggaggcagaggttgcagtgagccgagatcatgccactgcactccagcctggccaacacagtgaaactctgtctcgaaaaaacaactattttgctaaattggaggtccccaaaacagtttctttctcatggaccatttgtagaccatgactgaaagttttgttaacttgactattaataattccttacctttctgtatgtgtatctttcctctaacttggttcattgcatctcaaatgtatgtgtggctattttttgtcttctattttactttttattatatttctaatttaatttttgtttgtcttagtgcttttgtaataggtatctattattttgcctttaattggtgggtttataatggagttagcattgagccttttggagcacttttctggtacactgaaaaagacaaattaaaccgatattgtggtaatcttattctactctcactaatagaaatttatatacttagagttgtcctgtgtggggactttttaaaaaattagagaaattgatgattggaaaaaagattttcttaccaaatttaaaaactgcttacttaaggtaagtttctatgactaaatttaattcattaattagaagacattgttctttgggatttttctctcattttaaagggctttcatctcaaaagagaaagtgatacttgtcacccataattaatcaagtgaactatttaaattaccttaggaggggagtacagattaagaagccttactatactgaattgatagtatgggagtgaaagccatagtagataagtctgtcactggtcaagggaaatacgtgactgtatatcagcccactttggaatttcttgagtctctaggcctaagtagatctggagcaattactactccagaatactgattaaaacaaattaaaaccaacttctgtgacccaatcttaaggcttagtgacaatgggtaaaatgttccatcacagatcagtgctgtccattgaatctattaaacaatcttcttttgtttcagttactggtcatgaggttggcaaccatgtaagtgaatgttctagattagcataatattaagtccccaggtctctataccaagaacaggaattgatttgcctaatacagtagttctcaaatgagatcagacccctgctagcacagagattccttcaaggttgtctgtcaggtcagaattattttcataataatactaagatgtcctttgcctttttatgcgtgtgttgctaaagcactgatgatgcaaaagcaaaggtaagtaaaactgctgacattttagtatgaatcaaggaattgtaccaaattgtgtgggcaatcattgtattcttctcgttacacacttgtaaggtataataaataaacccagtttcacttaaaaatgtccttgatgaagcaataaaagttattttgttgggtcttga

SEQ ID NO: 3435 - DNA, 9586 bp, Homo sapiens
  source 1..9586: mol_type = unassigned DNA; mol_type = unassigned DNA
attggcgggcggcgctggcgggcggcgaggggtggggtgtgatgcggcactgcggttctgaggccgttactccggcttctccatagagggcggagaaggctggagcgcggcggtgattttgtgccagggattcccagagacgcgctgaaaggctggcagggcttaggaagctggggggttagggacacacattcaagcccccacccccgggaggggaagggggctggaggcgaggcttgagggcggcggaggaatggtgtctgctcggggggaaggggcgagccctgcctgttggtactgaggggctgcgggcagtggaggctccgcgggtcgaaagcggctccatgcccatcggtgggtggaacgtgtagaggtcggaacgccgaggtcgagtctggtggcgcctcggtatccttaacgtggtctctgtttaacgtatttcatttagcccccgttgggattgattcattgggagcagtttcgctggtctggatcctccaggagctggacaaccttgacgggctttttgtcttgggttccagccccctttcccttcctcctcctccagatgccttttctctgcccctcctcgcccggtacagacatttccagcgcaggctgctgctcgtggtgtccgtcgtcgaagccacttcttgggatttcggctcgtttcactctggggtgttttttgaggagggagagtgcccccctcctccacgatgggatttttctcccttgccgaaatggactttcattgatttctacttacttccacgtttagtgaccaattccctaggcgtatttttgtggtagttccttttttcaaatacatactctgtaaaatggagaacgaaatttttactccccttctggagcagttcatgaccagccctttggtcacttgggttaaaacgtttggacctctggccgcaggaaatgggaccaaccttgatgaatatgtggctttggtggatggggtattcttgaaccaggtcatgctccaaattaatcctaaattggagagtcagagagtaaataaaaaagtcaataatgatgcctcacttagaatgcacaatctatccattttggtgagacagataaaattttattaccaggagactttgcagcaattgatcatgatgtcgttgccaaatgtcttaatcattggcaaaaatcccttttctgaacaaggcacagaagaagttaaaaaactgcttttacttttattgggttgtgcagttcagtgtcagaaaaaagaggaatttattgaaagaattcaaggtttagattttgatacaaaagcagcggttgccgcacatattcaagaggtaactcataatcaggaaaatgtgtttgacctgcaatggatggaagtgactgatatgtcgcaggaggacatagaaccactcttgaaaaatatggcattgcatctaaaaagacttatagatgagagagatgaacattcagagactatcatagaactctctgaagagcgggatggtctccattttctaccccatgcctcttcatctgcacagtcaccctgtggttctccaggcatgaagcgaacagaaagtcgacaacatctgtcggtggaactggcagatgctaaagccaagataagaaggcttaggcaggaattggaggaaaagactgagcagttgttggattgtaaacaagaacttgagcaaatggaaatagaactcaaaaggctgcaacaagagaacatgaatttgctttcggatgctcgctctgccagaatgtaccgagatgaattagatgcacttcgagagaaagcagtcagagtcgataagcttgaaagtgaagtcagcagatataaagagagactacatgatattgaattttataaggcaagagttgaggaattaaaagaagacaatcaagttttattagaaacaaaaaccatgttggaagaccaactagagggaactcgtgctcgttctgataaattacatgaattagaaaaagagaacttacaactgaaagctaaacttcatgatatggaaatggaacgagatatggatagaaaaaagattgaagaattaatggaagaaaatatgactttggaaatggcacagaaacaaagtatggatgaatcattacatcttggctgggaactggaacagatatccagaactagtgaactttccgaagcaccccagaaatccctgggccatgaggtgaatgagttgacatcaagtagattattgaagctagagatggaaaatcaaagtttgacaaaaaccgtagaagagcttcggactactgtggattctgtagaaggcaatgcttccaaaatcctgaaaatggaaaaagaaaatcaaaggctcagtaaaaaggttgagattcttgaaaatgagattgttcaagaaaagcaaagtcttcagaattgtcagaatttaagcaaggatctaatgaaggagaaagctcagcttgaaaaaacaatagaaacactgagagaaaattcagagagacagattaagatactggaacaggaaaatgaacatctgaatcaaacagtgtcttccttaaggcagcggtcccagataagtgcagaagcaagagtgaaagacattgaaaaagaaaacaaaattcttcatgaatctatcaaagaaacaagtagcaagctaagcaagattgaatttgaaaaaagacaaattaaaaaagaattggaacattataaagaaaaaggagaacgagctgaagaacttgaaaatgaattgcatcatcttgaaaaagaaaatgaattattacagaaaaaaataactaatttaaaaattacttgtgaaaaaattgaggccttagaacaagaaaattcagagctagaaagagaaaatagaaaattaaaaaaaacattggatagctttaaaaatctgacctttcagttagaatccctagaaaaagagaattcccaacttgatgaggaaaacttagaactgcgaaggaatgtagaatctttgaagtgtgcaagcatgaaaatggctcagctacagctagaaaacaaagaactggaaagtgaaaaagagcaacttaagaagggtttggagctcctgaaagcatctttcaagaaaacagaacgcttagaagttagctaccagggtttagatatagaaaatcaaagactgcaaaaaactttagagaacagcaataaaaaaatccagcaattagagagtgaactacaagacttagagatggaaaatcaaacattgcagaaaaacctagaagaactaaaaatatctagcaaaagactagaacagctggaaaaagaaaataaatcattagagcaagagacttctcaactggaaaaggataagaaacaattggagaaggaaaataagagactccgacaacaagcagaaattaaagataccacattagaagaaaataatgtgaagattggaaatttggaaaaagaaaacaaaaccctatccaaagaaattggtatatataaagaatcttgtgtccgtctgaaagaactagaaaaagaaaataaggagcttgtgaaaagagcaactattgatataaaaacgttggttacactacgtgaggatttggtgagtgaaaagttgaagacccaacagatgaacaatgatctcgaaaaattaactcatgagcttgagaagatagggttaaataaggagcgactcttacatgatgaacaaagtactgatgacaggtataaacttttggaatcaaaattagaatccactcttaagaagtctcttgaaataaaagaagaaaaaattgctgctttagaagctcgattagaagaatccacgaattataaccagcaattgcgccaagaacttaaaacagtgaaaaaaaattatgaagctctcaaacagagacaagatgaggaaaggatggtacagagctctcctccaatatctggtgaagacaacaaatgggagcgagaaagtcaagaaacgactagagaacttctgaaagttaaagacagattaattgaagtagaaagaaataatgctacactgcaagcagagaagcaagcgttgaaaactcaactgaagcaacttgagacacagaacaataatttgcaggctcagattcttgcacttcagaggcagacagtgtcattacaagaacagaataccactcttcaaacacagaatgccaagcttcaggttgaaaattccacccttaattcccaaagtacctcactcatgaaccagaatgcccaactcctaatccagcagtcttccttagaaaatgaaaatgaatctgtaatcaaagagcgagaagacctaaaatctctctatgattctctgatcaaagatcatgaaaagctggaacttcttcatgaacgtcaggcttcagagtatgaatctcttatctctaaacatggaactctgaagtctgcccacaaaaatcttgaggtggaacatagagaccttgaagaccgttacaatcagttattaaaacagaaaggacagttggaagatttggaaaaaatgctcaaagtagaacaggaaaaaatgctgcttgaaaataaaaatcatgaaacagtagctgcagaatacaagaaactttgtggtgaaaatgataggctgaatcatacctatagtcaacttttaaaagagactgaagttttacaaactgaccataaaaatttgaaaagtcttctgaataattccaaactggaacaaacaagattagaagctgaattttcaaaactaaaggaacaataccaacaattggatattacatcaaccaagctgaataaccagtgtgagttgctaagccaacttaaaggaaatttagaagaagaaaatcggcatctactagatcaaattcagacattaatgctacagaacagaacacttttggagcagaatatggaaagcaaggatctttttcatgttgaacaaagacagtacattgataagttaaatgaattaagacgtcagaaggagaaactagaagagaaaattatggatcaatacaaattttatgacccatctcctcctagaaggagaggcaactggattactctaaaaatgagaaaattgataaagtctaagaaagatattaatcgggaacgccagaaatctctaacattaacacccacccgctcagactccagtgaaggatttcttcagctccctcatcaagacagtcaagatagttcttcagtaggttcaaactctttagaagatggccagaccttggggaccaagaaaagcagcatggttgcactgaaaagactgccctttttgaggaacagaccgaaggataaagacaaaatgaaggcctgctaccgtcgttccatgtccatgaatgacctggtgcagtccatggtcctagcaggacagtggacaggtagtactgagaatttggaggttcctgatgatatttcaacgggtaaaaggagaaaagaattgggagctatggccttctctactacagccatcaacttttcaactgtcaactcttctgcaggcttcagatccaagcagttggttaataataaagatactacatcctttgaagacataagtccacaaggtgttagtgatgattctagtacgggatcaagagttcatgcttcaagaccagccagccttgatagtggcagaacatccactagcaatagcaataataatgcttcactacatgaagtcaaagcaggtgcagttaataaccaaagcaggccacaaagccacagcagtggagaatttagcctgcttcatgaccatgaggcttggtccagcagtggtagcagtccaatccagtacttgaaaagacagaccagatcaagcccagtgctccagcacaaaatatctgaaacactggagagtcgacatcacaagatcaaaactggttcccctggaagtgaagttgttactctacaacagtttttggaagaaagcaataagcttacctcagtacagataaagtcctcaagtcaagagaatcttttagatgaagtaatgaaaagtttgtctgtctcttctgactttttgggaaaagacaaaccagttagctgtggtctggccagcgtgatctcaactgccgaaggaactacacgaaggacaagcatccatgattttttgaccaaggacagtagactgcctatatcagttgattcaccaccagctgctgctgacagcaacaccactgcagcatctaatgtggacaaagtacaagaaagcagaaattcaaaaagcaggtctagggagcaacaaagctcctaattctattacccactacatgacatgtgggccaagtgagagaaaagtgtccttcagtttctcagtatgaagcctttatttctgaagtaacaagacacctagcaactataggaatcatttttaaaaatctttaaggagacttttaacagtccttcgtgaatagagcaggcaagaaatacaaaccttcattccttgaatcaaggagcactactggattcaactgccaaaattttttaaaggttttaggacttactataccttgtactgttaagatctactgaataaaggacgttctctcactaaggaccaggtgttttaaggttaagtgtttaaagaagtactccaagaacaatctgcttttttcatcatttgttttatgaatttatccatgtttgcttaatgcttctgctaagtgttagccaaaatctagccatttatatttagttgtgtaaacctaaattaaatgctgtagtattttgtggaatgtactatatagcaagatacagagaaaattgttttggcatgtcagagccttatttggttagcagactgcatgtgttgatactttttttttcttaaagccaattattttgatgcaaaagaaattcagtttataagataaatctgaaaaatccataatgaaataggagttataaaaaatttatagtgatattaatctttccatatttcccattaagcaacactaagcattcataagttaacccatggtaaagagtgtttttctgaaacttttttttagtaagatggtttttcagcaaatggcattcccaagataaagctgttgtgctttaactcatttcttttctttggtattgggttatgtatgcgtgtgcatttttttaacttgagagctgactgttgcttaagaagttttcttatggcaaaaataatgtaaataagttactatgatctgcattttgccagaaactcatttataattaaggctatcatttattaatgatttttttctcctttatgatattacattaaagttgataactgttattggtacttttgaaatatttgtatgcatttgttacctttaaacatttggaagaagcacaaaaaaatagatttagttaacccagggaaacatcaatttttttagtagttccaattttatatcacagttttattttcttatgaaatcaaaaaatgcattgatactcattaatgcaaattcattatttaacatcaatatcagagtaatcttcaaggtctgaaatgagaaacatactgactttttaaaattttaacagtgtacttcttaggctttcattaccagctctgaagaactttttggaataattccatattccatagtgtgtggtttatgagttgtgggtttcatcactaacccagtaaccataagaaaagtctctctctctctctctctctctctctctttctctctccctctttctctctctctttcgtaggccagtagcaatgttgtgttcacagtctaatttccaaaagaccatcaataaaaaagagagcatgtttaaattgaaatggaacttagagaacttgagcttacttacgtacttcaatgccaccggtaacttaggttttaccaccaaatgctgttaacgttaaatcattttgaaaatcttggatgaaaggtgctatgtaaatggaaatacaaaggattcttactaacatacaaaaataatgcacaacagaaatatctaaaaccttttccgtagactttgaaacatctctctctctcataactccctggattcaagtagcacattggtaataggtatcagagcagtctagagacaattgcatgtcaaaaaatgtacattcatttttaggtggataaaagtaaacatagaaattatgttatggctaaatacagttagtgggtaacttagatttatattagctagcatctaatttgcacaactagaacacatcccagaacaattactgaaaagctgaaatttaatgggtggtgatgtagcccaatgagggcgaatgacattacagcttgacctctccagaacactaatatcctaaaatacagaacatgctgggttaagtgcattagtgcttcaagcagaaaatgctgaaaacaacgtgtaaagtactgaatctgagtaggctgaccctgagaagggacaattaaagagacaaccaagggaacacattgagactacaaaaatatgaataatctcaattatattcatcacacttttttcataccatttcaagaaacgactagacagtagtaaccacatgaatattttactttctccagtataccttgagaagcaaactttgtaggaagccactcttctcccctaaacaacttctgccaaacaataataaagccaactggaaacgaatcggagccattttcattttcctaaccggggcctgacatgctttaaattatctggctgtattctaaatcaacacctaacccctcaaggaaactgaagaatcaatatacagggtaatagctttggctcagagctccaataatgtgcttcagatctgtccatgtggaaatgctttcatccaaatttttaaattggtggttaccaaagagttcacaaaacaggtttgtatgtagcacctttcatgcaaggcatgcaaaaagcctattttaaaatcactgtgcatattatagagttgtagccacctcacaatgaagtactacagcctgtgctgtcttaatggtttatgtcaggaaatgaaaaagatactgtaccaaatctggaattacaatggggagtaataatgtatactaaatgacttttgtattttaagttactttttgtgagtggtgaatttttgtgtttttcttttcagctacacttagtcctgagatgtattttttctttaagtcttgaatgaatacaaaaggagcccattttataatataaaccttgatgtacatgttgagatatttggacaatgaaaatgccttaaaaggaatgcatatggataaagttgcacttataacacccttcaacaaaatctaattttaaattgtctttttcttttctattaagggttttctttttcagtgtctaccattgtacttataactgttattaaataccaaatcaaataatataaaagctgtaacatttcctttaaaactaatgctaataagggatttagagttgaatggcaaaatgtttattacttggcaatacctgatgtcagtcacaggcatccaactcatgacaagagataccactgtttgttttttaaaaaacatttttcattttgtttctccttcaaaaattaagttggactaacattcacgtatcaaactaatataaaaagaaataaaaccaagaggtgatttttgt

SEQ ID NO: 3436 - DNA, 3089 bp, Homo sapiens
  source 1..3089: mol_type = unassigned DNA; mol_type = unassigned DNA
cgggcagtggaggctccgcgggtcgaaagcggctccatgcccatcggtgggtggaacgtgtagaggtcggaacgccgaggtcgagtctggtggcgcctcggtatccttaacgtggtctctgtttaacgtatttcatttagcccccgttgggattgattcattgggagcagtttcgctggtctggatcctccaggagctggacaaccttgacgggctttttgtcttgggttccagccccctttcccttcctcctcctccagatgccttttctctgcccctcctcgcccggtacagacatttccagcgcaggctgctgctcgtggtgtccgtcgtcgaagccacttcttgggatttcggctcgtttcactctggggtgttttttgaggagggagagtgcccccctcctccacgatgggatttttctcccttgccgaaatggactttcattgatttctacttacttccacgtttagtgaccaattccctaggcgtatttttgtggtagttccttttttcaaatacatactctgtaaaatggagaacgaaatttttactccccttctggagcagttcatgaccagccctttggtcacttgggttaaaacgtttggacctctggccgcaggaaatgggaccaaccttgatgaatatgtggctttggtggatggggtattcttgaaccaggtcatgctccaaattaatcctaaattggagagtcagagagtaaataaaaaagtcaataatgatgcctcacttagaatgcacaatctatccattttggtgagacagataaaattttattaccaggagactttgcagcaattgatcatgatgtcgttgccaaatgtcttaatcattggcaaaaatcccttttctgaacaaggcacagaagaagttaaaaaactgcttttacttttattgggttgtgcagttcagtgtcagaaaaaagaggaatttattgaaagaattcaaggtttagattttgatacaaaagcagcggttgccgcacatattcaagaggtaactcataatcaggaaaatgtgtttgacctgcaatggatggaagtgactgatatgtcgcaggaggacatagaaccactcttgaaaaatatggcattgcatctaaaaagacttatagatgagagagatgaacattcagagactatcatagaactctctgaagagcgggatggtctccattttctaccccatgcctcttcatctgcacagtcaccctgtggttctccaggcatgaagcgaacagaaagtcgacaacatctgtcggtggaactggcagatgctaaagccaagataagaaggcttaggcaggaattggaggaaaagactgagcagttgttggattgtaaacaagaacttgagcaaatggaaatagaactcaaaaggctgcaacaagagaacatgaatttgctttcggatgctcgctctgccagaatgtaccgagatgaattagatgcacttcgagagaaagcagtcagagtcgataagcttgaaagtgaagtcagcagatataaagagagactacatgatattgaattttataaggcaagagttgaggaattaaaagaagacaatcaagttttattagaaacaaaaaccatgttggaagaccaactagagggaactcgtgctcgttctgataaattacatgaattagaaaaagagaacttacaactgaaagctaaacttcatgatatggaaatggaacgagatatggatagaaaaaagattgaagaattaatggaagaaaatatgactttggaaatggcacagaaacaaagtatggatgaatcattacatcttggctgggaactggaacagatatccagaactagtgaactttccgaagcaccccagaaatccctgggccatgaggtgaatgagttgacatcaagtagattattgaagctagagatggaaaatcaaagtttgacaaaaaccgtagaagagcttcggactactgtggattctgtagaaggcaatgcttccaaaatcctgaaaatggaaaaagaaaatcaaaggctcagtaaaaaggttgagattcttgaaaatgagattgttcaagaaaagcaaagtcttcagaattgtcagaatttaagcaaggatctaatgaaggagaaagctcagcttgaaaaaacaatagaaacactgagagaaaattcagagagacagattaagatactggaacaggaaaatgaacatctgaatcaaacagtgtcttccttaaggcagcggtcccagataagtgcagaagcaagagtgaaagacattgaaaaagaaaacaaaattcttcatgaatctatcaaagaaacaagtagcaagctaagcaagattgaatttgaaaaaagacaaattaaaaaagaattggaacattataaagaaaaaggagaacgagctgaagaacttgaaaatgaattgcatcatcttgaaaaagaaaatgaattattacagaaaaaaataactaatttaaaaattacttgtgaaaaaattgaggccttagaacaagaaaattcagagctagaaagagaaaatagaaaattaaaaaaaacattggatagctttaaaaatctgacctttcagttagaatccctagaaaaagagaattcccaacttgatgaggaaaacttagaactgcgaaggaatgtagaatctttgaagtgtgcaagcatgaaaatggctcagctacagctagaaaacaaagaactggaaagtgaaaaagagcaacttaagaagggtttggagctcctgaaagcatctttcaagaaaacagaacgcttagaagttagctaccagggtttagatatagaaaatcaaagactgcaaaaaactttagagaacagcaataaaaaaatccagcaattagagagtgaactacaagacttagagatggaaaatcaaacattgcagaaaaacctagaagaactaaaaatatctagcaaaagactagaacagctggaaagaaaataaatcattagagcaagagacttctcaactggaaaaggataagaaacaattggagaaggaaaataagagactccgacaacaagcagaaattaaagataccacattag

SEQ ID NO: 3437 - DNA, 9811 bp, Homo sapiens
  source 1..9811: mol_type = unassigned DNA; mol_type = unassigned DNA
attggcgggcggcgctggcgggcggcgaggggtggggtgtgatgcggcactgcggttctgaggccgttactccggcttctccatagagggcggagaaggctggagcgcggcggtgattttgtgccagggattcccagagacgcgctgaaaggctggcagggcttaggaagctggggggttagggacacacattcaagcccccacccccgggaggggaagggggctggaggcgaggcttgagggcggcggaggaatggtgtctgctcggggggaaggggcgagccctgcctgttggtactgaggggctgcgggcagtggaggctccgcgggtcgaaagcggctccatgcccatcggtgggtggaacgtgtagaggtcggaacgccgaggtcgagtctggtggcgcctcggtatccttaacgtggtctctgtttaacgtatttcatttagcccccgttgggattgattcattgggagcagtttcgctggtctggatcctccaggagctggacaaccttgacgggctttttgtcttgggttccagccccctttcccttcctcctcctccagatgccttttctctgcccctcctcgcccggtacagacatttccagcgcaggctgctgctcgtggtgtccgtcgtcgaagccacttcttgggatttcggctcgtttcactctggggtgttttttgaggagggagagtgcccccctcctccacgatgggatttttctcccttgccgaaatggactttcattgatttctacttacttccacgtttagtgaccaattccctaggcgtatttttgtggtagttccttttttcaaatacatactctgtaaaatggagaacgaaatttttactccccttctggagcagttcatgaccagccctttggtcacttgggttaaaacgtttggacctctggccgcaggaaatgggaccaaccttgatgaatatgtggctttggtggatggggtattcttgaaccaggtcatgctccaaattaatcctaaattggagagtcagagagtaaataaaaaagtcaataatgatgcctcacttagaatgcacaatctatccattttggtgagacagataaaattttattaccaggagactttgcagcaattgatcatgatgtcgttgccaaatgtcttaatcattggcaaaaatcccttttctgaacaaggcacagaagaagttaaaaaactgcttttacttttattgggttgtgcagttcagtgtcagaaaaaagaggaatttattgaaagaattcaaggtttagattttgatacaaaagcagcggttgccgcacatattcaagaggtaactcataatcaggaaaatgtgtttgacctgcaatggatggaagtgactgatatgtcgcaggaggacatagaaccactcttgaaaaatatggcattgcatctaaaaagacttatagatgagagagatgaacattcagagactatcatagaactctctgaagagcgggatggtctccattttctaccccatgcctcttcatctgcacagtcaccctgtggttctccaggcatgaagcgaacagaaagtcgacaacatctgtcggtggaactggcagatgctaaagccaagataagaaggcttaggcaggaattggaggaaaagactgagcagttgttggattgtaaacaagaacttgagcaaatggaaatagaactcaaaaggctgcaacaagagaacatgaatttgctttcggatgctcgctctgccagaatgtaccgagatgaattagatgcacttcgagagaaagcagtcagagtcgataagcttgaaagtgaagtcagcagatataaagagagactacatgatattgaattttataaggcaagagttgaggaattaaaagaagacaatcaagttttattagaaacaaaaaccatgttggaagaccaactagagggaactcgtgctcgttctgataaattacatgaattagaaaaagagaacttacaactgaaagctaaacttcatgatatggaaatggaacgagatatggatagaaaaaagattgaagaattaatggaagaaaatatgactttggaaatggcacagaaacaaagtatggatgaatcattacatcttggctgggaactggaacagatatccagaactagtgaactttccgaagcaccccagaaatccctgggccatgaggtgaatgagttgacatcaagtagattattgaagctagagatggaaaatcaaagtttgacaaaaaccgtagaagagcttcggactactgtggattctgtagaaggcaatgcttccaaaatcctgaaaatggaaaaagaaaatcaaaggctcagtaaaaaggttgagattcttgaaaatgagattgttcaagaaaagcaaagtcttcagaattgtcagaatttaagcaaggatctaatgaaggagaaagctcagcttgaaaaaacaatagaaacactgagagaaaattcagagagacagattaagatactggaacaggaaaatgaacatctgaatcaaacagtgtcttccttaaggcagcggtcccagataagtgcagaagcaagagtgaaagacattgaaaaagaaaacaaaattcttcatgaatctatcaaagaaacaagtagcaagctaagcaagattgaatttgaaaaaagacaaattaaaaaagaattggaacattataaagaaaaaggagaacgagctgaagaacttgaaaatgaattgcatcatcttgaaaaagaaaatgaattattacagaaaaaaataactaatttaaaaattacttgtgaaaaaattgaggccttagaacaagaaaattcagagctagaaagagaaaatagaaaattaaaaaaaacattggatagctttaaaaatctgacctttcagttagaatccctagaaaaagagaattcccaacttgatgaggaaaacttagaactgcgaaggaatgtagaatctttgaagtgtgcaagcatgaaaatggctcagctacagctagaaaacaaagaactggaaagtgaaaaagagcaacttaagaagggtttggagctcctgaaagcatctttcaagaaaacagaacgcttagaagttagctaccagggtttagatatagaaaatcaaagactgcaaaaaactttagagaacagcaataaaaaaatccagcaattagagagtgaactacaagacttagagatggaaaatcaaacattgcagaaaaacctagaagaactaaaaatatctagcaaaagactagaacagctggaaaaagaaaataaatcattagagcaagagacttctcaactggaaaaggataagaaacaattggagaaggaaaataagagactccgacaacaagcagaaattaaagataccacattagaagaaaataatgtgaagattggaaatttggaaaaagaaaacaaaaccctatccaaagaaattggtatatataaagaatcttgtgtccgtctgaaagaactagaaaaagaaaataaggagcttgtgaaaagagcaactattgatataaaaacgttggttacactacgtgaggatttggtgagtgaaaagttgaagacccaacagatgaacaatgatctcgaaaaattaactcatgagcttgagaagatagggttaaataaggagcgactcttacatgatgaacaaagtactgatgacagtaggtataaacttttggaatcaaaattagaatccactcttaagaagtctcttgaaataaaagaagaaaaaattgctgctttagaagctcgattagaagaatccacgaattataaccagcaattgcgccaagaacttaaaacagtgaaaaaaaattatgaagctctcaaacagagacaagatgaggaaaggatggtacagagctctcctccaatatctggtgaagacaacaaatgggagcgagaaagtcaagaaacgactagagaacttctgaaagttaaagacagattaattgaagtagaaagaaataatgctacactgcaagcagagaagcaagcgttgaaaactcaactgaagcaacttgagacacagaacaataatttgcaggctcagattcttgcacttcagaggcagacagtgtcattacaagaacagaataccactcttcaaacacagaatgccaagcttcaggttgaaaattccacccttaattcccaaagtacctcactcatgaaccagaatgcccaactcctaatccagcagtcttccttagaaaatgaaaatgaatctgtaatcaaagagcgagaagacctaaaatctctctatgattctctgatcaaagatcatgaaaagctggaacttcttcatgaacgtcaggcttcagagtatgaatctcttatctctaaacatggaactctgaagtctgcccacaaaaatcttgaggtggaacatagagaccttgaagaccgttacaatcagttattaaaacagaaaggacagttggaagatttggaaaaaatgctcaaagtagaacaggaaaaaatgctgcttgaaaataaaaatcatgaaacagtagctgcagaatacaagaaactttgtggtgaaaatgataggctgaatcatacctatagtcaacttttaaaagagactgaagttttacaaactgaccataaaaatttgaaaagtcttctgaataattccaaactggaacaaacaagattagaagctgaattttcaaaactaaaggaacaataccaacaattggatattacatcaaccaagctgaataaccagtgtgagttgctaagccaacttaaaggaaatttagaagaagaaaatcggcatctactagatcaaattcagacattaatgctacagaacagaacacttttggagcagaatatggaaagcaaggatctttttcatgttgaacaaagacagtacattgataagttaaatgaattaagacgtcagaaggagaaactagaagagaaaattatggatcaatacaaattttatgacccatctcctcctagaaggagaggcaactggattactctaaaaatgagaaaattgataaagtctaagaaagatattaatcgggaacgccagaaatctctaacattaacacccacccgctcagactccagtgaaggatttcttcagctccctcatcaagacagtcaagatagttcttcagtaggttcaaactctttagaagatggccagaccttggggaccaagaaaagcagcatggttgcactgaaaagactgccctttttgaggaacagaccgaaggataaagacaaaatgaaggcctgctaccgtcgttccatgtccatgaatgacctggtgcagtccatggtcctagcaggacagtggacaggtagtactgagaatttggaggttcctgatgatatttcaacgggtaaaaggagaaaagaattgggagctatggccttctctactacagccatcaacttttcaactgtcaactcttctgcaggcttcagatccaagcagttggttaataataaagatactacatcctttgaagacataagtccacaaggtgttagtgatgattctagtacgggatcaagagttcatgcttcaagaccagccagccttgatagtggcagaacatccactagcaatagcaataataatgcttcactacatgaagtcaaagcaggtgcagttaataaccaaagcaggccacaaagccacagcagtggagaatttagcctgcttcatgaccatgaggcttggtccagcagtggtagcagtccaatccagtacttgaaaagacagaccagatcaagcccagtgctccagcacaaaatatctgaaacactggagagtcgacatcacaagatcaaaactggttcccctggaagtgaagttgttactctacaacagtttttggaagaaagcaataagcttacctcagtacagataaagtcctcaagtcaagagaatcttttagatgaagtaatgaaaagtttgtctgtctcttctgactttttgggaaaagacaaaccagttagctgtggtctggccaggtcagtaagtggaaaaaccccaggggacttctatgatagacggacaactaagcctgagtttttgagacctggtcctcgaaaaactgaagatacctacttcattagttctgcgggaaaacctacaccaggcactcaaggaaaaataaaattagtaaaagaatcttctctgtcacgacaatcaaaagatagtaacccttatgcaactttacctcgtgcaagcagcgtgatctcaactgccgaaggaactacacgaaggacaagcatccatgattttttgaccaaggacagtagactgcctatatcagttgattcaccaccagctgctgctgacagcaacaccactgcagcatctaatgtggacaaagtacaagaaagcagaaattcaaaaagcaggtctagggagcaacaaagctcctaattctattacccactacatgacatgtgggccaagtgagagaaaagtgtccttcagtttctcagtatgaagcctttatttctgaagtaacaagacacctagcaactataggaatcatttttaaaaatctttaaggagacttttaacagtccttcgtgaatagagcaggcaagaaatacaaaccttcattccttgaatcaaggagcactactggattcaactgccaaaattttttaaaggttttaggacttactataccttgtactgttaagatctactgaataaaggacgttctctcactaaggaccaggtgttttaaggttaagtgtttaaagaagtactccaagaacaatctgcttttttcatcatttgttttatgaatttatccatgtttgcttaatgcttctgctaagtgttagccaaaatctagccatttatatttagttgtgtaaacctaaattaaatgctgtagtattttgtggaatgtactatatagcaagatacagagaaaattgttttggcatgtcagagccttatttggttagcagactgcatgtgttgatactttttttttcttaaagccaattattttgatgcaaaagaaattcagtttataagataaatctgaaaaatccataatgaaataggagttataaaaaatttatagtgatattaatctttccatatttcccattaagcaacactaagcattcataagttaacccatggtaaagagtgtttttctgaaacttttttttagtaagatggtttttcagcaaatggcattcccaagataaagctgttgtgctttaactcatttcttttctttggtattgggttatgtatgcgtgtgcatttttttaacttgagagctgactgttgcttaagaagttttcttatggcaaaaataatgtaaataagttactatgatctgcattttgccagaaactcatttataattaaggctatcatttattaatgatttttttctcctttatgatattacattaaagttgataactgttattggtacttttgaaatatttgtatgcatttgttacctttaaacatttggaagaagcacaaaaaaatagatttagttaacccagggaaacatcaatttttttagtagttccaattttatatcacagttttattttcttatgaaatcaaaaaatgcattgatactcattaatgcaaattcattatttaacatcaatatcagagtaatcttcaaggtctgaaatgagaaacatactgactttttaaaattttaacagtgtacttcttaggctttcattaccagctctgaagaactttttggaataattccatattccatagtgtgtggtttatgagttgtgggtttcatcactaacccagtaaccataagaaaagtctctctctctctctctctctctctctctttctctctccctctttctctctctctttcgtaggccagtagcaatgttgtgttcacagtctaatttccaaaagaccatcaataaaaaagagagcatgtttaaattgaaatggaacttagagaacttgagcttacttacgtacttcaatgccaccggtaacttaggttttaccaccaaatgctgttaacgttaaatcattttgaaaatcttggatgaaaggtgctatgtaaatggaaatacaaaggattcttactaacatacaaaaataatgcacaacagaaatatctaaaaccttttccgtagactttgaaacatctctctctctcataactccctggattcaagtagcacattggtaataggtatcagagcagtctagagacaattgcatgtcaaaaaatgtacattcatttttaggtggataaaagtaaacatagaaattatgttatggctaaatacagttagtgggtaacttagatttatattagctagcatctaatttgcacaactagaacacatcccagaacaattactgaaaagctgaaatttaatgggtggtgatgtagcccaatgagggcgaatgacattacagcttgacctctccagaacactaatatcctaaaatacagaacatgctgggttaagtgcattagtgcttcaagcagaaaatgctgaaaacaacgtgtaaagtactgaatctgagtaggctgaccctgagaagggacaattaaagagacaaccaagggaacacattgagactacaaaaatatgaataatctcaattatattcatcacacttttttcataccatttcaagaaacgactagacagtagtaaccacatgaatattttactttctccagtataccttgagaagcaaactttgtaggaagccactcttctcccctaaacaacttctgccaaacaataataaagccaactggaaacgaatcggagccattttcattttcctaaccggggcctgacatgctttaaattatctggctgtattctaaatcaacacctaacccctcaaggaaactgaagaatcaatatacagggtaatagctttggctcagagctccaataatgtgcttcagatctgtccatgtggaaatgctttcatccaaatttttaaattggtggttaccaaagagttcacaaaacaggtttgtatgtagcacctttcatgcaaggcatgcaaaaagcctattttaaaatcactgtgcatattatagagttgtagccacctcacaatgaagtactacagcctgtgctgtcttaatggtttatgtcaggaaatgaaaaagatactgtaccaaatctggaattacaatggggagtaataatgtatactaaatgacttttgtattttaagttactttttgtgagtggtgaatttttgtgtttttcttttcagctacacttagtcctgagatgtattttttctttaagtcttgaatgaatacaaaaggagcccattttataatataaaccttgatgtacatgttgagatatttggacaatgaaaatgccttaaaaggaatgcatatggataaagttgcacttataacacccttcaacaaaatctaattttaaattgtctttttcttttctattaagggttttctttttcagtgtctaccattgtacttataactgttattaaataccaaatcaaataatataaaagctgtaacatttcctttaaaactaatgctaataagggatttagagttgaatggcaaaatgtttattacttggcaatacctgatgtcagtcacaggcatccaactcatgacaagagataccactgtttgttttttaaaaaacatttttcattttgtttctccttcaaaaattaagttggactaacattcacgtatcaaactaatataaaaagaaataaaaccaagaggtgatttttgt

SEQ ID NO: 3438 - DNA, 830 bp, Homo sapiens
  source 1..830: mol_type = unassigned DNA; mol_type = unassigned DNA
cacttcaaccggttgtcgccccagtggccgccctctgagcacgtgttactgccagtctgcgtcagcgttgggtaaatacatgactggccgacgccgccgggtggggctatttaagagacagccgcccgctggtcctccctgaacttggctcagctgccgggctgctccggttggaaacgccaagccagctgcgtcctaatccaaaagccatgaacagcggcgtgtgcctgtgcgtgctgatggcggtactggcggctggcgccctgacgcagccggtgcctcccgcagatcccgcgggctccgggctgcagcgggcagaggaggcgccccgtaggcagctgagggtatcgcagagaacggatggcgagtcccgagcgcacctgggcgccctgctggcaagatacatccagcaggcccggaaagctccttctggacgaatgtccatcgttaagaacctgcagaacctggaccccagccacaggataagtgaccgggactacatgggctggatggattttggccgtcgcagtgccgaggagtatgagtacccctcctagaggacccagccgccatcagcccaacgggaagcaacctcccaacccagaggaggcagaataagaaaacaatcacactcataactcattgtctgtggagtttgacattgtatgtatctatttattaagttctcaatgtgaaaaatgtgtctgtaagattgtccagtgcaaccacacacctcaccagaattgtgcaaatggaagacaaaatgttttcttcatctgtgactcctggtctgaaaatgttgttatgctattaaagtgatttcattctgc

SEQ ID NO: 3439 - DNA, 1527 bp, Homo sapiens
  source 1..1527: mol_type = unassigned DNA; mol_type = unassigned DNA
ctggcgttgccacagtccctccattccagagggaattccagagcggaatacggattccgattttaaaataagcgcttctaaatctttctccttgcatctaagacgggtgggggaaagaaagggagaggagttgaggtcccaaggttcaaggcctggtgatctccaggtcccaggctgggcggcctcggtgcacggagagggcgaggggcgtgttgtggagccttggcaaggcgctgctcttcctcgcgcctcggtttgcggtctgtgaaatggggttggcagtgcctttgcagggacgcggcgaactcaagcaccagcaagcggactcgaactcaaagggtttcagggtgtagacgaccagagcgcactgaggggctccaggtcggcccgctccggagccgggagagtaaccgcgtgcagggaaaggcgcacggcagcctcggtgcctcccttccctccaccggacgggtgactgactaggggtgaggtcctcacctccaggctgcgcagctgagttctggaagctgcgtcaagagaggcccaggacaccaagagccagctgtggccagagccctttcactgacccagaacactggccctcggaaacctggagaactgcgagggcttttaatgcggctgagaagaaagtgaagaccccgactcctcctctctccttcgaaagagccgacacaggagccacttcaaccggttgtcgccccagtggccgccctctgagcacgtgttactgccagtctgcgtcagcgttgggtaaatacatgactggccgacgccgccgggtggggctatttaagagacagccgcccgctggtcctccctgaacttggctcagctgccgggctgctccggttggaaacgccaagccagctgcgtcctaatccaaaagccatgaacagcggcgtgtgcctgtgcgtgctgatggcggtactggcggctggcgccctgacgcagccggtgcctcccgcagatcccgcgggctccgggctgcagcgggcagaggaggcgccccgtaggcagctgagggtatcgcagagaacggatggcgagtcccgagcgcacctgggcgccctgctggcaagatacatccagcaggcccggaaagctccttctggacgaatgtccatcgttaagaacctgcagaacctggaccccagccacaggataagtgaccgggactacatgggctggatggattttggccgtcgcagtgccgaggagtatgagtacccctcctagaggacccagccgccatcagcccaacgggaagcaacctcccaacccagaggaggcagaataagaaaacaatcacactcataactcattgtctgtggagtttgacattgtatgtatctatttattaagttctcaatgtgaaaaatgtgtctgtaagattgtccagtgcaaccacacacctcaccagaattgtgcaaatggaagacaaaatgttttcttcatctgtgactcctggtctgaaaatgttgttatgctattaaagtgatttcattctgc

SEQ ID NO: 3440 - DNA, 747 bp, Homo sapiens
  source 1..747: mol_type = unassigned DNA; mol_type = unassigned DNA
gagaggcactctgcaaacacttcctcaaactttaggaaagcaaaaacattccttctgctcaacacggcagaaaacagggtctctgccccttggcgctgggtgaggagttcccaaagaccagccagccatgaacagcggcgtgtgcctgtgcgtgctgatggcggtactggcggctggcgccctgacgcagccggtgcctcccgcagatcccgcgggctccgggctgcagcgggcagaggaggcgccccgtaggcagctgagggtatcgcagagaacggatggcgagtcccgagcgcacctgggcgccctgctggcaagatacatccagcaggcccggaaagctccttctggacgaatgtccatcgttaagaacctgcagaacctggaccccagccacaggataagtgaccgggactacatgggctggatggattttggccgtcgcagtgccgaggagtatgagtacccctcctagaggacccagccgccatcagcccaacgggaagcaacctcccaacccagaggaggcagaataagaaaacaatcacactcataactcattgtctgtggagtttgacattgtatgtatctatttattaagttctcaatgtgaaaaatgtgtctgtaagattgtccagtgcaaccacacacctcaccagaattgtgcaaatggaagacaaaatgttttcttcatctgtgactcctggtctgaaaatgttgttatgctattaaagtgatttcattctg

SEQ ID NO: 3441 - DNA, 718 bp, Homo sapiens
  source 1..718: mol_type = unassigned DNA; mol_type = unassigned DNA
ctgaacttggctcagctgccgggctgctccggttggaaacgccaagccagctgcgtcctaatccaaaagccatgaacagcggcgtgtgcctgtgcgtgctgatggcggtactggcggctggcgccctgacgcagccggtgcctcccgcagatcccgcgggctccgggctgcagcgggcagaggaggcgccccgtaggcagctgagggtatcgcagagaacggatggcgagtcccgagcgcacctgggcgccctgctggcaagatacatccagcaggcccggaaaggtaagaatgctgcctccccatccctcacttctgcccttgttcccaggctcccgatgctgaccctcttctctagcgctagcctgatggggatgacctctctcggtaggaaacaagcaacatgatttctggcggtcctttgtagcaatctgagaaggggtatggaggacttaatttataagtaaggggaaccttcttgaaaagctttctttgaactaatttttagcagtgttgctgattaagttcaacaccattttaccaagccattaaaagataattattgaagcctaggaaagggttcctagatacagtgaataccctctactgaaaacgcaaaggaccttggagccacccagataccaacccttggaaatcctctagcaggaaggggtcaatgctgagaatgcctgagatctggctacaacagtttaaaaaa

SEQ ID NO: 3442 - DNA, 2121 bp, Homo sapiens
  source 1..2121: mol_type = unassigned DNA; mol_type = unassigned DNA
cgggaacccaggcggggcgagccgcgggagagtggagggcaggcgcctgggctgggggcggggaccaggcggggcagggggcagggagaggagggcggcgggagcctgagccggaatcgcagcgtgagcaggtggagccgcgttgggagcccgccgggtcgagctgagtaaggcggcgggctcggcgggggccatggagctgctaaagctgaaccggagcgtgcagggaaccggacccgggccgggggcttccctgtgccgcccgggggcgcctctcctcaacagcagcagtgtgggcaacctcagctgcgagccccctcgcattcgcggagccgggacacgagaattggagctggccattagaatcactctttacgcagtgatcttcctgatgagcgttggaggaaatatgctcatcatcgtggtcctgggactgagccgccgcctgaggactgtcaccaatgccttcctcctctcactggcagtcagcgacctcctgctggctgtggcttgcatgcccttcaccctcctgcccaatctcatgggcacattcatctttggcaccgtcatctgcaaggcggtttcctacctcatgggggtgtctgtgagtgtgtccacgctaagcctcgtggccatcgcactggagcggtacagcgccatctgccgaccactgcaggcacgagtgtggcagacgcgctcccacgcggctcgcgtgattgtagccacgtggctgctgtccggactactcatggtgccctaccccgtgtacactgtcgtgcaaccagtggggcctcgtgtgctgcagtgcgtgcatcgctggcccagtgcgcgggtccgccagacctggtccgtactgctgcttctgctcttgttcttcatcccgggtgtggttatggccgtggcctacgggcttatctctcgcgagctctacttagggcttcgctttgacggcgacagtgacagcgacagccaaagcagggtccgaaaccaaggcgggctgccaggggctgttcaccagaacgggcgttgccggcctgagactggcgcggttggcgaagacagcgatggctgctacgtgcaacttccacgttcccggcctgccctggagctgacggcgctgacggctcctgggccgggatccggctcccggcccacccaggccaagctgctggctaagaagcgcgtggtgcgaatgttgctggtgatcgttgtgcttttttttctgtgttggttgccagtttatagtgccaacacgtggcgcgcctttgatggcccgggtgcacaccgagcactctcgggtgctcctatctccttcattcacttgctgagctacgcctcggcctgtgtcaaccccctggtctactgcttcatgcaccgtcgctttcgccaggcctgcctggaaacttgcgctcgctgctgcccccggcctccacgagctcgccccagggctcttcccgatgaggaccctcccactccctccattgcttcgctgtccaggcttagctacaccaccatcagcacactgggccctggctgaggagtagaggggccgtgggggttgaggcagggcaaatgacatgcactgacccttccagacatacgaaacacaaaccacaactgacacaggaaaccaacacccaaagcatggactaaccccaacgcacaggaaaaggtagcttacctgacacaagaggaataagaatggagcagtacatgggaaaggaggcatgcctctgatatgggactgagcctggcccatagaaacatgacactgaccttggagagacacagcgtccctagcagtgaactatttctacacagtgggaactctgacaagggctgacctgcctctcacacacatagattaatggcactgattgttttagagactatggagcctggcacaggactgattctgggatgctcctagtttgacctcacagtgacccttcccaatcagcactgaaaataccatcaggcctaatctcatacctctgaccaacaggctgttctgcactgaaaaggttcttcatccctttccagttaaggaccgtggccctgccctctccttccttacccaaactgttcaagaaataataaattgtttggcttcctcctgaa

SEQ ID NO: 3443 - DNA, 1734 bp, Homo sapiens
  source 1..1734: mol_type = unassigned DNA; mol_type = unassigned DNA
ggggcagggggcagggagaggagggcggcgggagcctgagccggaatcgcagcgtgagcaggtggagccgcgttgggagcccgccgggtcgagctgagtaaggcggcgggctcggcgggggccatggagctgctaaagctgaaccggagcgtgcagggaaccggacccgggccgggggcttccctgtgccgcccgggggcgcctctcctcaacagcagcagtgtgggcaacctcagctgcgagccccctcgcattcgcggagccgggacacgaggggtgtctgtgagtgtgtccacgctaagcctcgtggccatcgcactggagcggtacagcgccatctgccgaccactgcaggcacgagtgtggcagacgcgctcccacgcggctcgcgtgattgtagccacgtggctgctgtccggactactcatggtgccctaccccgtgtacactgtcgtgcaaccagtggggcctcgtgtgctgcagtgcgtgcatcgctggcccagtgcgcgggtccgccagacctggtccgtactgctgcttctgctcttgttcttcatcccgggtgtggttatggccgtggcctacgggcttatctctcgcgagctctacttagggcttcgctttgacggcgacagtgacagcgacagccaaagcagggtccgaaaccaaggcgggctgccaggggctgttcaccagaacgggcgttgccggcctgagactggcgcggttggcgaagacagcgatggctgctacgtgcaacttccacgttcccggcctgccctggagctgacggcgctgacggctcctgggccgggatccggctcccggcccacccaggccaagctgctggctaagaagcgcgtggtgcgaatgttgctggtgatcgttgtgcttttttttctgtgttggttgccagtttatagtgccaacacgtggcgcgcctttgatggcccgggtgcacaccgagcactctcgggtgctcctatctccttcattcacttgctgagctacgcctcggcctgtgtcaaccccctggtctactgcttcatgcaccgtcgctttcgccaggcctgcctggaaacttgcgctcgctgctgcccccggcctccacgagctcgccccagggctcttcccgatgaggaccctcccactccctccattgcttcgctgtccaggcttagctacaccaccatcagcacactgggccctggctgaggagtagaggggccgtgggggttgaggcagggcaaatgacatgcactgacccttccagacatacgaaacacaaaccacaactgacacaggaaaccaacacccaaagcatggactaaccccaacgcacaggaaaaggtagcttacctgacacaagaggaataagaatggagcagtacatgggaaaggaggcatgcctctgatatgggactgagcctggcccatagaaacatgacactgaccttggagagacacagcgtccctagcagtgaactatttctacacagtgggaactctgacaagggctgacctgcctctcacacacatagattaatggcactgattgttttagagactatggagcctggcacaggactgattctgggatgctcctagtttgacctcacagtgacccttcccaatcagcactgaaaataccatcaggcctaatctcatacctctgaccaacaggctgttctgcactgaaaaggttcttcatccctttccagttaaggaccgtgg

SEQ ID NO: 3444 - DNA, 792 bp, Homo sapiens
  source 1..792: mol_type = unassigned DNA; mol_type = unassigned DNA
gcgttgggagcccgccgggtcgagctgagtaaggcggcgggctcggcgggggccatggagctgctaaagctgaaccggagcgtgcagggaaccggacccgggccgggggcttccctgtgccgcccgggggcgcctctcctcaacagcagcagtgtgggcaacctcagctgcgagccccctcgcattcgcggagccgggacacgagaattggagctggccattagaatcactctttacgcagtgatcttcctgatgagcgttggaggaaatatgctcatcatcgtggtcctgggactgagccgccgcctgaggactgtcaccaatgccttcctcctctcactggcagtcagcgacctcctgctggctgtggcttgcatgcccttcaccctcctgcccaatctcatgggcacattcatctttggcaccgtcatctgcaaggcggtttcctacctcatgggtgggtgagacaaccaccccacccccacttgccactctccccgcctaaagctcttgtggatgtaggggtcttccccggttggcagggaggggtgtgaggaagtcccactgatgcttgtgtagtgcaagtttcctaggtgactccttcctttctcttcccttgtttaggggtgtctgtgagtgtgtccacgctaagcctcgtggccatcgcactggagcggtacagcgccatctgccgaccactgcaggcacgagtgtggcagacgcgctcccacgcggctcgcgtgattgtagccacgtggctgctgtccggactactcatggtgccctaccccg

SEQ ID NO: 3445 - DNA, 463 bp, Homo sapiens
  source 1..463: mol_type = unassigned DNA; mol_type = unassigned DNA
gccatggagctgctaaagctgaaccggagcgtgcagggaaccggacccgggccgggggcttccctgtgccgcccgggggcgcctctcctcaacagcagcagtgtgggcaacctcagctgcgagccccctcgcattcgcggagccgggacacgagacagaacaaatacagatcttctaaacaccaggagaagaactgaactgtcccaatcttctgagtcgcctggtctgatgccagttttcctcatccccaggaagatgatgagatgatgctcacgggtagacttatcaaggcacttgtggatgtaccccagcagaattggagctggccattagaatcactctttacgcagtgatcttcctgatgagcgttggaggaaatatgctcatcatcgtggtcctgggactgagccgccgcctgaggactgtcaccaatgccttcctcctctcactggcagtcagcgac

SEQ ID NO: 3446 - DNA, 2138 bp, Homo sapiens
  source 1..2138: mol_type = unassigned DNA; mol_type = unassigned DNA
gccatggagctgctaaagctgaaccggagcgtgcagggaaccggacccgggccgggggcttccctgtgccgcccgggggcgcctctcctcaacagcagcagtgtgggcaacctcagctgcgagccccctcgcattcgcggagccgggacacgagaattggagctggccattagaatcactctttacgcagtgatcttcctgatgagcgttggaggaaatatgctcatcatcgtggtcctgggactgagccgccgcctgaggactgtcaccaatgccttcctcctctcactggcagtcagcgacctcctgctggctgtggcttgcatgcccttcaccctcctgcccaatctcatgggcacattcatctttggcaccgtcatctgcaaggcggtttcctacctcatgggggtgtctgtgagtgtgtccacgctaagcctcgtggccatcgcactggagcggtacagcgccatctgccgaccactgcaggcacgagtgtggcagacgcgctcccacgcggctcgcgtgattgtagccacgtggctgctgtccggactactcatggtgccctaccccgtgtacactgtcgtgcaaccagtggggcctcgtgtgctgcagtgcgtgcatcgctggcccagtgcgcgggtccgccagacctggtccgtactgctgcttctgctcttgttcttcatcccgggtgtggttatggccgtggcctacgggcttatctctcgcgagctctacttagggcttcgctttgacggcgacagtgacagcgacagccaaagcagggtccgaaaccaaggcgggctgccaggtggggctggaccacgtgagcaaaatctgggcgaggcggagctttggagggcgacggggcctgctggagtgggtgggactgaaatgaaggtgagggtgagaaggaagctggaaatggagttgagctgggagcggaggtcaggtggggactgggctggagactggggggactcgcctttttctctgaccgcccaccctttgtgctcaggggctgttcaccagaacgggcgttgccggcctgagactggcgcggttggcgaagacagcgatggctgctacgtgcaacttccacgttcccggcctgccctggagctgacggcgctgacggctcctgggccgggatccggctcccggcccacccaggccaagctgctggctaagaagcgcgtggtgcgaatgttgctggtgatcgttgtgcttttttttctgtgttggttgccagtttatagtgccaacacgtggcgcgcctttgatggcccgggtgcacaccgagcactctcgggtgctcctatctccttcattcacttgctgagctacgcctcggcctgtgtcaaccccctggtctactgcttcatgcaccgtcgctttcgccaggcctgcctggaaacttgcgctcgctgctgcccccggcctccacgagctcgccccagggctcttcccgatgaggaccctcccactccctccattgcttcgctgtccaggcttagctacaccaccatcagcacactgggccctggctgaggagtagaggggccgtgggggttgaggcagggcaaatgacatgcactgacccttccagacatacgaaacacaaaccacaactgacacaggaaaccaacacccaaagcatggactaaccccaacgcacaggaaaaggtagcttacctgacacaagaggaataagaatggagcagtacatgggaaaggaggcatgcctctgatatgggactgagcctggcccatagaaacatgacactgaccttggagagacacagcgtccctagcagtgaactatttctacacagtgggaactctgacaagggctgacctgcctctcacacacatagattaatggcactgattgttttagagactatggagcctggcacaggactgattctgggatgctcctagtttgacctcacagtgacccttcccaatcagcactgaaaataccatcaggcctaatctcatacctctgaccaacaggctgttctgcactgaaaaggttcttcatccctttccagttaaggaccgtggccctgccctctccttccttacccaaactgttcaagaaataataaattgtttggcttcctcctgaa

SEQ ID NO: 3447 - DNA, 247 bp, Homo sapiens
  source 1..247: mol_type = unassigned DNA; mol_type = unassigned DNA
agggtccgaaaccaaggcgggctgccaggtggggctggaccacgggctgttcaccagaacgggcgttgccggcctgagactggcgcggttggcgaagacagcgatggctgctacgtgcaacttccacgttcccggcctgccctggagctgacggcgctgacggctcctgggccgggatccggctcccggcccacccaggccaagctgctggctaagaagcgcgtggtgcgaatgttgctggtgatcg

SEQ ID NO: 3448 - DNA, 2523 bp, Homo sapiens
  source 1..2523: mol_type = unassigned DNA; mol_type = unassigned DNA
tcaccatggaatatgaagtcaagaaagggaagaagggctttgtatcccccatccgaaggctggtgttccccaaggccgggcgccgggcagcctgtaggagcagcgtgagccgccggcccctgcactcgatgcccctttatccccccgactacctcatcgacccccagattctgctgtgtgactacctggagaaagaggtcaagttcctgggccaccttacctgggtgacttcctcactgaacccctccagtcgggacgagctcctgcagctgctagacaccgccaggcagctgaaggagctgccgctgaagaccacggcggagcaggacagcatcctgagcctgtctgcccgctgcctgctgctcacctggcgcgacaatgaagagctcattctgcgaatccctacgcacgagatcgccgccgcctcctacctgcaggacgacgcgctgcacctgctagtgctcaagaccggtctgggtgtggacccggtgccggccggcgtggatgccagcccaggcggcgcaggacgcgaccccggcccgccaggcggggcgcccgagaagcggcgggtgggcaccgcggagcggcgccacaccatctgcagcctggactggcggatggggtggggtgggggcgccgcggaggcccgggccgggggaggcggcggcggcagcttggagcgccagcgcgccggggcgcgggcgtcgggcagctgggagcgacggcagacgttcagcggcagctgggagcggcggcacggaggcggcggcggcggcggcggcgcgggaaagccgggcggtagctgggagcggaggcaggcgggcagcggcgggggaggcagctgggagcggcgccaccccggccccaacccgctcgacccgcaggaccccagccccgacgcctactgcaacctggtcatcctggctgtagccaacagggacgctgcagaggagtcctgcgcactcatctgtcaggtcttccagatcatctacggggaccagagtattgagtgtgtggaccgggctggctaccactacacatccacacctgaacggccatggctctgcagccgcataatggctcccaggacacctttgaagcatgttacagcggcacgtccacaccttctttccatggctcccactgcagcggcagcgaccacagcagtctgggcttggagcagttacaggattacatggtcacgttgcggagtaagctggggcccctcgagatccagcagtttgcgatgctgctgcgggagtaccggctggggctgcccatccaggactattgcacaggcctgctgaagctctacggagaccggcgcaagttcctcctccttgggatgcggcccttcatcccggaccaggacatcggctacttcgagggcttcctggagggcgtgggcatccgcgagggcggcatcctcactgacagcttcggccgcatcaagcgcagcatgagctccacgtcggcctccgcagtgcgcagctacgatggcgcggcgcagcggcccgaggcacaggccttccaccggctgctggctgacatcacgcacgacatcgaggcgctggcccccgatgacgacgacgacgacgaggatgagccccggggctccaggggcgggagcgacgccgcagaagacaactacctgtagccaccgcccctgcggacggcgtggctcagcagcccacctctgagtctcagctttgcttcggggaccctatccccagggcccccccatcacacctggcggggccggggggtcttcactccagggtctcgctccctgcccttggggcccggggccatgcagtacctggagtgtcctgcagggggaaagcgaagccgggccctgaagtccggggcagtcacccggggctcctgggccgctctgccgggctggggctgagcagcgatcctgctttgtcccagaagtccagagggatcagccccagaacacaccctcctccccgggacgccgcagctttctggaggctgaggaaggcatgaagagtgggctccacctgctggccgactgagaaaagaatttccagaactcggtcctattttacagattgagaaactatggttcaagaagagaggacggggcttgagggaatctcctgattctccttatatgacctcaaactgaccatactaaacagtgtagaaggtctttttaaggctctaaatgtcagggtctcccatcccctgatgcctgacttgtacagtcagtgtggagtagacggtttcctccacccagggttgactcagggggatgatctgggtcccattctggtcttaagaccccaaacaagggttttttcagctccaggatctggagcctctatctggttagtgtcgtaacctctgtgtgcctcccgttaccccatctgtccagtgagctcagcccccatccacctaacagggtggccacagggattactgagggttaagaccttagaactgggtctagcacccgataagagctcaataaatgttgttcctttccacatcaaa

SEQ ID NO: 3449 - DNA, 1841 bp, Homo sapiens
  source 1..1841: mol_type = unassigned DNA; mol_type = unassigned DNA
gagcggcggcacggaggcggcggcggcggcggcggcgcgggaaagccgggcggtagctgggagcggaggcaggcgggcagcggcgggggaggcagctgggagcggcgccaccccggccccaacccgctcgacccgcaggaccccagccccgacgcctactgcaacctggtcatcctggctgtagccaacagggacgctgcagaggagtcctgcgcactcatctgtcaggtcttccagatcatctacggggaccagagtattgagtgtgtggaccgggctggctaccactacacatccacacctgaacggccatggctctgcagccgcagtgagagctgccacacagatgggacgtatgcctatgatgccgacttcagctgctgcagctcctttaatggctcccaggacacctttgaagcatgttacagcggcacgtccacaccttctttccatggctcccactgcagcggcagcgaccacagcagtctgggcttggagcagttacaggattacatggtcacgttgcggagtaagctggggcccctcgagatccagcagtttgcgatgctgctgcgggagtaccggctggggctgcccatccaggactattgcacaggcctgctgaagctctacggagaccggcgcaagttcctcctccttgggatgcggcccttcatcccggaccaggacatcggctacttcgagggcttcctggagggcgtgggcatccgcgagggcggcatcctcactgacagcttcggccgcatcaagcgcagcatgagctccacgtcggcctccgcagtgcgcagctacgatggcgcggcgcagcggcccgaggcacaggccttccaccggctgctggctgacatcacgcacgacatcgaggcgctggcccccgatgacgacgacgacgacgaggatgagccccggggctccaggggcgggagcgacgccgcagaagacaactacctgtagccaccgcccctgcggacggcgtggctcagcagcccacctctgagtctcagctttgcttcggggaccctatccccagggcccccccatcacacctggcggggccggggggtcttcactccagggtctcgctccctgcccttggggcccggggccatgcagtacctggagtgtcctgcagggggaaagcgaagccgggccctgaagtccggggcagtcacccggggctcctgggccgctctgccgggctggggctgagcagcgatcctgctttgtcccagaagtccagagggatcagccccagaacacaccctcctccccgggacgccgcagctttctggaggctgaggaaggcatgaagagtgggctccacctgctggccgactgagaaaagaatttccagaactcggtcctattttacagattgagaaactatggttcaagaagagaggacggggcttgagggaatctcctgattctccttatatgacctcaaactgaccatactaaacagtgtagaaggtctttttaaggctctaaatgtcagggtctcccatcccctgatgcctgacttgtacagtcagtgtggagtagacggtttcctccacccagggttgactcagggggatgatctgggtcccattctggtcttaagaccccaaacaagggttttttcagctccaggatctggagcctctatctggttagtgtcgtaacctctgtgtgcctcccgttaccccatctgtccagtgagctcagcccccatccacctaacagggtggccacagggattactgagggttaagaccttagaactgggtctagcacccgataagagctcaataaatgttgttcctttccacatcaaa

SEQ ID NO: 3450 - DNA, 4307 bp, Homo sapiens
  source 1..4307: mol_type = unassigned DNA; mol_type = unassigned DNA
gcttaacaacagtaacgtcacacggactacaggggagttttgttgaagttgcaaagtcctggagcctccagagggctgtcggcgcagtagcagcgagcagcagagtccgcacgctccggcgaggggcagaagagcgcgagggagcgcggggcagcagaagcgagagccgagcgcggacccagccaggacccacagccctccccagctgcccaggaagagccccagccatggaacaccagctcctgtgctgcgaagtggaaaccatccgccgcgcgtaccccgatgccaacctcctcaacgaccgggtgctgcgggccatgctgaaggcggaggagacctgcgcgccctcggtgtcctacttcaaatgtgtgcagaaggaggtcctgccgtccatgcggaagatcgtcgccacctggatgctggaggtctgcgaggaacagaagtgcgaggaggaggtcttcccgctggccatgaactacctggaccgcttcctgtcgctggagcccgtgaaaaagagccgcctgcagctgctgggggccacttgcatgttcgtggcctctaagatgaaggagaccatccccctgacggccgagaagctgtgcatctacaccgacaactccatccggcccgaggagctgctgcaaatggagctgctcctggtgaacaagctcaagtggaacctggccgcaatgaccccgcacgatttcattgaacacttcctctccaaaatgccagaggcggaggagaacaaacagatcatccgcaaacacgcgcagaccttcgttgccctctgtgccacagatgtgaagttcatttccaatccgccctccatggtggcagcggggagcgtggtggccgcagtgcaaggcctgaacctgaggagccccaacaacttcctgtcctactaccgcctcacacgcttcctctccagagtgatcaagtgtgacccggactgcctccgggcctgccaggagcagatcgaagccctgctggagtcaagcctgcgccaggcccagcagaacatggaccccaaggccgccgaggaggaggaagaggaggaggaggaggtggacctggcttgcacacccaccgacgtgcgggacgtggacatctgagggcgccaggcaggcgggcgccaccgccacccgcagcgagggcggagccggccccaggtgctcccctgacagtccctcctctccggagcattttgataccagaagggaaagcttcattctccttgttgttggttgttttttcctttgctctttcccccttccatctctgacttaagcaaaagaaaaagattacccaaaaactgtctttaaaagagagagagagaaaaaaaaaatagtatttgcataaccctgagcggtgggggaggagggttgtgctacagatgatagaggattttataccccaataatcaactcgtttttatattaatgtacttgtttctctgttgtaagaataggcattaacacaaaggaggcgtctcgggagaggattaggttccatcctttacgtgtttaaaaaaaagcataaaaacattttaaaaacatagaaaaattcagcaaaccatttttaaagtagaagagggttttaggtagaaaaacatattcttgtgcttttcctgataaagcacagctgtagtggggttctaggcatctctgtactttgcttgctcatatgcatgtagtcactttataagtcattgtatgttattatattccgtaggtagatgtgtaacctcttcaccttattcatggctgaagtcacctcttggttacagtagcgtagcgtgcccgtgtgcatgtcctttgcgcctgtgaccaccaccccaacaaaccatccagtgacaaaccatccagtggaggtttgtcgggcaccagccagcgtagcagggtcgggaaaggccacctgtcccactcctacgatacgctactataaagagaagacgaaatagtgacataatatattctatttttatactcttcctatttttgtagtgacctgtttatgagatgctggttttctacccaacggccctgcagccagctcacgtccaggttcaacccacagctacttggtttgtgttcttcttcatattctaaaaccattccatttccaagcactttcagtccaataggtgtaggaaatagcgctgtttttgttgtgtgtgcagggagggcagttttctaatggaatggtttgggaatatccatgtacttgtttgcaagcaggactttgaggcaagtgtgggccactgtggtggcagtggaggtggggtgtttgggaggctgcgtgccagtcaagaagaaaaaggtttgcattctcacattgccaggatgataagttcctttccttttctttaaagaagttgaagtttaggaatcctttggtgccaactggtgtttgaaagtagggacctcagaggtttacctagagaacaggtggtttttaagggttatcttagatgtttcacaccggaaggtttttaaacactaaaatatataatttatagttaaggctaaaaagtatatttattgcagaggatgttcataaggccagtatgatttataaatgcaatctccccttgatttaaacacacagatacacacacacacacacacacacacaaaccttctgcctttgatgttacagatttaatacagtttatttttaaagatagatccttttataggtgagaaaaaaacaatctggaagaaaaaaaccacacaaagacattgattcagcctgtttggcgtttcccagagtcatctgattggacaggcatgggtgcaaggaaaattagggtactcaacctaagttcggttccgatgaattcttatcccctgccccttcctttaaaaaacttagtgacaaaatagacaatttgcacatcttggctatgtaattcttgtaatttttatttaggaagtgttgaagggaggtggcaagagtgtggaggctgacgtgtgagggaggacaggcgggaggaggtgtgaggaggaggctcccgaggggaaggggcggtgcccacaccggggacaggccgcagctccattttcttattgcgctgctaccgttgacttccaggcacggtttggaaatattcacatcgcttctgtgtatctctttcacattgtttgctgctattggaggatcagttttttgttttacaatgtcatatactgccatgtactagttttagttttctcttagaacattgtattacagatgccttttttgtagttttttttttttttatgtgatcaattttgacttaatgtgattactgctctattccaaaaaggttgctgtttcacaatacctcatgcttcacttagccatggtggacccagcgggcaggttctgcctgctttggcgggcagacacgcgggcgcgatcccacacaggctggcgggggccggccccgaggccgcgtgcgtgagaaccgcgccggtgtccccagagaccaggctgtgtccctcttctcttccctgcgcctgtgatgctgggcacttcatctgatcgggggcgtagcatcatagtagtttttacagctgtgttattctttgcgtgtagctatggaagttgcataattattattattattattataacaagtgtgtcttacgtgccaccacggcgttgtacctgtaggactctcattcgggatgattggaatagcttctggaatttgttcaagttttgggtatgtttaatctgttatgtactagtgttctgtttgttattgttttgttaattacaccataatgctaatttaaagagactccaaatctcaatgaagccagctcacagtgctgtgtgccccggtcacctagcaagctgccgaaccaaaagaatttgcaccccgctgcgggcccacgtggttggggccctgccctggcagggtcatcctgtgctcggaggccatctcgggcacaggcccaccccgccccacccctccagaacacggctcacgcttacctcaaccatcctggctgcggcgtctgtctgaaccacgcgggggccttgagggacgctttgtctgtcgtgatggggcaagggcacaagtcctggatgttgtgtgtatcgagaggccaaaggctggtggcaagtgcacggggcacagcggagtctgtcctgtgacgcgcaagtctgagggtctgggcggcgggcggctgggtctgtgcatttctggttgcaccgcggcgcttcccagcaccaacatgtaaccggcatgtttccagcagaagacaaaaagacaaacatgaaagtctagaaataaaactggtaaaacccca

SEQ ID NO: 3451 - DNA, 920 bp, Homo sapiens
  source 1..920: mol_type = unassigned DNA; mol_type = unassigned DNA
tcggcgcagtagcagcgagcagcagagtccgcacgctccggcgaggggcagaagagcgcgagggagcgcggggcagcagaagcgagagccgagcgcggacccagccaggacccacagccctccccagctgcccaggaagagccccagccatggaacaccagctcctgtgctgcgaagtggaaaccatccgccgcgcgtaccccgatgccaacctcctcaacgaccgggtgctgcgggccatgctgaaggcggaggagacctgcgcgccctcggtgtcctacttcaaatgtgtgcagaaggaggtcctgccgtccatgcggaagatcgtcgccacctggatgctggaggtctgcgaggaacagaagtgcgaggaggaggtcttcccgctggccatgaactacctggaccgcttcctgtcgctggagcccgtgaaaaagagccgcctgcagctgctgggggccacttgcatgttcgtggcctctaagatgaaggagaccatccccctgacggccgagaagctgtgcatctacaccgacaactccatccggcccgaggagctgctgcaaatggagctgctcctggtgaacaagctcaagtggaacctggccgcaatgaccccgcacgatttcattgaacacttcctctccaaaatgccagaggcggaggagaacaaacagatcatccgcaaacacgcgcagaccttcgttgccctctgtgccacaggtagggcaggcccggcagcccccggcctccccttgagagccggctccttaggtgaccctggccggcttcttgctctccacctgggtgctgtctgggaagatgtccccagaccccctcctgcgctggagagcgctcttccagctctggtgagcagaggccctggattgtttgtcgcgctggatggagggagatttgct

SEQ ID NO: 3452 - DNA, 553 bp, Homo sapiens
  source 1..553: mol_type = unassigned DNA; mol_type = unassigned DNA
cgaggggcagaagagcgcgagggagcgcggggcagcagaagcgagagccgagcgcggacccagccaggacccacagccctccccagctgcccaggaagagccccagccatggaacaccagctcctgtgctgcgaagtggaaaccatccgccgcgcgtaccccgatgccaacctcctcaacgaccgggtgctgcgggccatgctgaaggcggaggagacctgcgcgccctcggtgtcctacttcaaatgtgtgcagaaggaggtcctgccgtccatgcggaagatcgtcgccacctggatgctggagatgtgaagttcatttccaatccgccctccatggtggcagcggggagcgtggtggccgcagtgcaaggcctgaacctgaggagccccaacaacttcctgtcctactaccgcctcacacgcttcctctccagagtgatcaagtgtgacccggtaagtgagggtgatgtcccaggcagccttgccggggcttacagggggagacacctagtgccacggaaatgccgaggctggtgccaaggcccccaagg

SEQ ID NO: 3453 - DNA, 568 bp, Homo sapiens
  source 1..568: mol_type = unassigned DNA; mol_type = unassigned DNA
cgcggggcagcagaagcgagagccgagcgcggacccagccaggacccacagccctccccagctgcccaggaagagccccagccatggaacaccagctcctgtgctgcgaagtggaaaccatccgccgcgcgtaccccgatgccaacctcctcaacgaccgggtgctgcgggccatgctgaaggcggaggagacctgcgcgccctcggtgtcctacttcaaatgtgtgcagaaggaggtcctgccgtccatgcggaagatcgtcgccacctggatgctggaggtctgcgaggaacagaagtgcgaggaggaggtcttcccgctggccatgaactacctggaccgcttcctgtcgctggagcccgtgaaaaagagccgcctgcagctgctgggggccacttgcatgttcgtggcctctaagatgaaggagaccatccccctgacggccgagaagctgtgcatctacaccgacaactccatccggcccgaggagctgctggtaaccactggaccccgccgccccccgccccccgcgagccgcacgcaggaccacggggccggggaaggtgc

SEQ ID NO: 3454 - DNA, 430 bp, Homo sapiens
  source 1..430: mol_type = unassigned DNA; mol_type = unassigned DNA
cgcaggggccagtgctctgagccggaggtgcggcgtggcccggcccccgtgctgccggcttccccgcgcccccgggctggcccgcacctcccctgatggccgctcaccctgtgttcgcagcaaatggagctgctcctggtgaacaagctcaagtggaacctggccgcaatgaccccgcacgatttcattgaacacttcctctccaaaatgccagaggcggaggagaacaaacagatcatccgcaaacacgcgcagaccttcgttgccctctgtgccacagatgtgaagttcatttccaatccgccctccatggtggcagcggggagcgtggtggccgcagtgcaaggcctgaacctgaggagccccaacaacttcctgtcctactaccgcctcacacgcttcctctccagagtgatcaagtgtgacccgg

SEQ ID NO: 3455 - DNA, 476 bp, Homo sapiens
  source 1..476: mol_type = unassigned DNA; mol_type = unassigned DNA
tgctcacagcctccttccctctctccttctgcctcagatgtgaagttcatttccaatccgccctccatggtggcagcggggagcgtggtggccgcagtgcaaggcctgaacctgaggagccccaacaacttcctgtcctactaccgcctcacacgcttcctctccagagtgatcaagtgtgacccggactgcctccgggcctgccaggagcagatcgaagccctgctggagtcaagcctgcgccaggcccagcagaacatggaccccaaggccgccgaggaggaggaagaggaggaggaggaggtggacctggcttgcacacccaccgacgtgcgggacgtggacatctgagggcgccaggcaggcgggcgccaccgccacccgcagcgagggcggagccggccccaggtgctcccctgacagtccctcctctccggagcattttgataccagaagggaaagcttcattctccttg

SEQ ID NO: 3456 - DNA, 6480 bp, Homo sapiens
  source 1..6480: mol_type = unassigned DNA; mol_type = unassigned DNA
agagcgagcaggggagagcgagaccagttttaaggggaggaccggtgcgagtgaggcagccccgaggctctgctcgcccaccacccaatcctcgcctcccttctgctccaccttctctctctgccctcacctctcccccgaaaaccccctatttagccaaaggaaggaggtcaggggaacgctctcccctccccttccaaaaaacaaaaacagaaaaacctttttccaggccggggaaagcaggagggagaggggccgccgggctggccatggagctgctgtgccacgaggtggacccggtccgcagggccgtgcgggaccgcaacctgctccgagacgaccgcgtcctgcagaacctgctcaccatcgaggagcgctaccttccgcagtgctcctacttcaagtgcgtgcagaaggacatccaaccctacatgcgcagaatggtggccacctggatgctggaggtctgtgaggaacagaagtgcgaagaagaggtcttccctctggccatgaattacctggaccgtttcttggctggggtcccgactccgaagtcccatctgcaactcctgggtgctgtctgcatgttcctggcctccaaactcaaagagaccagcccgctgaccgcggagaagctgtgcatttacaccgacaactccatcaagcctcaggagctgctggagtgggaactggtggtgctggggaagttgaagtggaacctggcagctgtcactcctcatgacttcattgagcacatcttgcgcaagctgccccagcagcgggagaagctgtctctgatccgcaagcatgctcagaccttcattgctctgtgtgccaccgactttaagtttgccatgtacccaccgtcgatgatcgcaactggaagtgtgggagcagccatctgtgggctccagcaggatgaggaagtgagctcgctcacttgtgatgccctgactgagctgctggctaagatcaccaacacagacgtggattgtctcaaagcttgccaggagcagattgaggcggtgctcctcaatagcctgcagcagtaccgtcaggaccaacgtgacggatccaagtcggaggatgaactggaccaagccagcacccctacagacgtgcgggatatcgacctgtgaggatgccagttgggccgaaagagagagacgcgtccataatctggtctcttcttctttctggttgtttttgttctttgtgttttagggtgaaacttaaaaaaaaaattctgcccccacctagatcatatttaaagatcttttagaagtgagagaaaaaggtcctacgaaaacggaataataaaaagcatttggtgcctatttgaagtacagcataagggaatcccttgtatatgcgaacagttattgtttgattatgtaaaagtaatagtaaaatgcttacaggaaaacctgcagagtagttagagaatatgtatgcctgcaatatgggaacaaattagaggagacttttttttttcatgttatgagctagcacatacacccccttgtagtataatttcaaggaactgtgtacgccatttatggcatgattagattgcaaagcaatgaactcaagaaggaattgaaataaggagggacatgatggggaaggagtacaaaacaatctctcaacatgattgaaccatttgggatggagaagcacctttgctctcagccacctgttactaagtcaggagtgtagttggatctctacattaatgtcctcttgctgtctacagtagctgctacctaaaaaaagatgttttattttgccagttggacacaggtgattggctcctgggtttcatgttctgtgacatcctgcttcttcttccaaatgcagttcattgcagacaccaccatattgctatctaatggggaaatgtagctatgggccataaccaaaactcacatgaaacggaggcagatggagaccaagggtgggatccagaatggagtcttttctgttattgtatttaaaagggtaatgtggccttggcatttcttcttagaaaaaaactaatttttggtgctgattggcatgtctggttcacagtttagcattgttataaaccattccattcgaaaagcactttgaaaaattgttcccgagcgatagatgggatggtttatgcaagtcatgctgaatactcctcccctcttctcttttgccccctcccttcctgcccccagtctgggttactcttcgcttctggtatctggcgttctttggtacacagttctggtgttcctaccaggactcaagagacaccccttcctgctgacattcccatcacaacattcctcagacaagcctgtaaactaaaatctgttaccattctgatggcacagaaggatcttaattcccatctctatacttctcctttggacatggaaagaaaagttattgctggtgcaaagatagatggctgaacatcagggtgtggcattttgttcccttttccgtttttttttttttattgttgttgttaattttattgcaaagttgtattcagcgtacttgaatttttcttcctctccacttcttagaggcattcagttagcaaagaggttggagcaacaacttttttttttttttttgcacaattgtaattgacaggtaatgaagctatttgttaaaatatttgcctttttaagtaaaaaagaaaaatcagaacagggctatttgaagaattattttatacacagattctgccttgtttcatagtatgagggttgaagacggaaaacaatctaagggtctctcatttttttaattttgttttgttcagtttggtttttttttttttttgcgctgctaagaagctaaagtcatccatccttattcacgttgacagtacctagctgtaatgtttcacagagtgtgctgctattttataaacatttttataatatattattttactgcttaaattccaagtcctgaagtagatggttgagatatgagttcttcgtactggaaaagcccttccgtagtttgttttcttctggtagcatattcatggttgtttttttttttcttttttggttttttggttttttttttttcctctgatcacattcttcaaagacggagtattctttacctcaggtttactggacaaaatcaataactacaaaaggcaatgattcacgcttttgttttcataatacctcacaaccgtacagtttctgcttgggagcccattcgcatgaggaatacagaagcagtgtgagcagggctgactccctctcaggtggaaggcagggcggtctcactcccagggacctttttggtcatggaggccatcgggctcccagttagaccctggtatcctcatcatgatggaaaaaatacattgaaccaagggatcctccctccccttcaaggcagacgttcagtacaaacatttatgcggtaggctcagatgtcgtaatttgcacttaggtaccaggtgtcaggaaacagactaaaaagaattccaccaggctgtttggagatcctcatcttggagctttttcaaaagcggggcttcatctgcaaagggccctttcatcttgaagtttttcccctccgtctttcccctcccctggcatggacaccttgtgtttaggatcatctctgcaggtttcctaggtctgaatctgcgagtagatgaacctgcagcaagcagcgtttatggtgcttccttctccctcctctgtctcaaactgcgcaggcaagcactatgcaagcccaggccctctgctgagcggtactaaacggtcgggttttcaatcacactgaattggcaggataagaaaaataggtcagataagtatgggatgatagttgaagggaggtgaagaggctgcttctctacagaggtgaaattccagatgagtcagtctcttgggaagtgtgtttagaagggttcaggactttgtgagttagcatgaccctaaaattctaggggatttctggtgggacaatgggtggtgaattctgaagttttggagagggaagtggagcagccagcaagtaagctagccagagttttctcaagagccagctttgctcagcacactctcctgggccccaaggagtcccacggaatggggaaagcgggaaccctggagttcttgggaatcttggagcctaaagagaaaccgaggtgcaaattcatttcatggtgactgacccttgagcttaaacagaagcagcaaatgaaagaaccggacaaataaggaagggcacaagcctacccgactctatttacagtctgtaactttccactcttcctgtagtcccgaggcccctgggtccttctagcttttctctttcccatccttggggccttgtgtgatgatgggtgtggggctgccgatgggaaagtcgggggttgttaggcttttctgcctgctcctgcttaaacacaagaaggaatcctggattttgccctctccttagctcttagtctctttggtaggagttttgttccagaggagctctcccccttggatttgaacttgctctttttgttgttgttgttctttctcttctttttcttacctcccactaaaggggttccaaattatcctggtctttttctaccttgttgtgtttctatctcgtctttacttccatctgtttgtttttttctccatcagtgggggccgagttgttcccccagcctgccaaattttgatccttcccctcttttggccaaatcctagggggaagaaatcctagtatgccaaaaatatatgctaagcataattaaactccatgcgggtccataacagccaagaagcctgcaggagaaagccaagggcagttccctccgcagaacaccccatgcgtgctgagaggcgagctccttgaagaaggggctgttcttccaggaggccttattttgaactgcctcaggaccccactggagagcacagcatgccttactactgggtcatccttggtctatgtgctctgtactggaggctctgttctgcctcttatcagccaggtcaggggcacacatggcttaagtgacaaagccagaggagaagacaaccctgacagcatcacgctgcatcccattgctagcaggattggcaactcttcagacggagctgcgcttccctgcagtctagcacctctagggcctctccagactgtgccctgggagctctgggactgaaaggttaagaacataaggcaggatcagatgactctctccaagagggcaggggaattttctctccatgggccacaggggacagggctgggagaagaaatagacttgcaccttatgtcatgtaaataattgattttctagttcaagaagataatattggtagtgtgggaattggaggtaggaaggggaggaagtctgagtaagccagttggcttctaagccaaaaggattcctctttgtttatctctgagacagtccaaccttgagaatagctttaaaagggaaattaatgctgagatgataaagtccccttaagccaacaaaccctctgtagctatagaatgagtgcaggtttctattggtgtggactcagagcaatttacaagagctgttcatgcagccatccatttgtgcaaaatagggtaagaagattcaagaggatatttattacttcctcataccacatggcttttgatgattctggattctaaacaacccagaatggtcatttcaggcacaacgatactacattcgtgtgtgtctgcttttaaacttggctgggctatcagaccctattctcggctcaggttttgagaagccatcagcaaatgtgtacgtgcatgctgtagctgcagcctgcatcccttcgcctgcagcctactttggggaaataaagtgccttactgactgtagccattacagtatccaatgtcttttgacaggtgcctgtccttgaaaaacaaagtttctatttttatttttaattggtttagttcttaactgctggccaactcttacatccccagcaaatcatcgggccattggattttttccattatgttcatcacccttatatcatgtacctcagatctctctctctctcctctctctcagttatgtagtttcttgtcttggacttttttttttcttttctttttctttttttttttgctttaaaacaagtgtgatgccatatcaagtccatgttattctctcacagtgtactctataagaggtgtgggtgtctgtttggtcaggatgttagaaagtgctgataagtagcatgatcagtgtatgcgaaaaggtttttaggaagtatggcaaaaatgttgtattggctatgatggtgacatgatatagtcagctgccttttaagaggtcttatctgttcagtgttaagtgatttaaaaaaataataacctgttttctgactagtttaaagatggatttgaaaatggttttgaatgcaattaggttatgctatttggacaataaactcaccttgacct

SEQ ID NO: 3457 - DNA, 529 bp, Homo sapiens
  source 1..529: mol_type = unassigned DNA; mol_type = unassigned DNA
ccgtttcttggctggggtcccgactccgaagtcccatctgcaactcctgggtgctgtctgcatgttcctggcctccaaactcaaagagaccagcccgctgaccgcggagaagctgtgcatttacaccgacaactccatcaagcctcaggagctgctggagtgggaactggtggtgctggggaagttgaagtggaacctggcagctgtcactcctcatgacttcattgagcacatcttgcgcaagctgccccagcagcgggagaagctgtctctgatccgcaagcatgctcagaccttcattgctctgtgtgccaccgctcaacaggtcggacagggtaagggtaagggatgtaaccaggagatgccacaggaacgtctgagaggtgttagcaagtcccagaggccagcgcccgactccatttcagcctcgttcagggtggcacggagactcctgctgctgcgtcacgtctgtcatgttcagcactcttcccagacacacagtcttgactaaagattgtcaggatcttga

SEQ ID NO: 3458 - DNA, 572 bp, Homo sapiens
  source 1..572: mol_type = unassigned DNA; mol_type = unassigned DNA
aaaactggtctggagcccaacccccagccccctacaccaggtcagcctgtggaatttagattctcctcttctcttcctgccttcccctccaggagtgggaactggtggtgctggggaagttgaagtggaacctggcagctgtcactcctcatgacttcattgagcacatcttgcgcaagctgccccagcagcgggagaagctgtctctgatccgcaagcatgctcagaccttcattgctctgtgtgccaccgactttaagtttgccatgtacccaccgtcgatgatcgcaactggaagtgtgggagcagccatctgtgggctccagcaggatgaggaagtgagctcgctcacttgtgatgccctgactgagctgctggctaagatcaccaacacagacgtggtaggtggccaccaccttcttggctaagtccagatgtctcttctcagctcagggaaggagacgacggatttgattatgttgtgtcagaggtatttttctggtttgtttcctaagatcgacatccaagggagtgcaaagttcagcaggtgacaccccctcttaaggttctga

SEQ ID NO: 3459 - DNA, 322 bp, Homo sapiens
  source 1..322: mol_type = unassigned DNA; mol_type = unassigned DNA
tggcagctgtcactcctcatgacttcattgagcacatcttgcgcaagctgccccagcagcgggagaagctgtctctgatccgcaagcatgctcagaccttcattgctctgtgtgccaccggaggaaggatctcaggaagtcaccagcatctcacctctccaggtgggcaattaacgatggcgagggcacaccctcacccctgagcgtgccttctgcaccagcatattgcttgttggcatttttgatcaagagacttaacagactgctgagaaatttgtacctggtttttatttgttaaaataatattacgtacaaattttac

SEQ ID NO: 3460 - DNA, 1940 bp, Homo sapiens
  source 1..1940: mol_type = unassigned DNA; mol_type = unassigned DNA
ttgtgcatttttggcctgcaaagtagatgaattcaatgtatctagtcctcagtttgttggaaacctccgggagagtcctcttggacaggagaaggcacttgaacagatactggaatatgaactacttcttatacagcaacttaatttccaccttattgtccacaatccttacagaccatttgagggcttcctcatcgacttaaagttatttatcagagagtctgatgctgaaagagaacagaacttgcctgtcacagttactagatataatgaaaagcatgagaaacttagtaaagaagtatgaaccacccagatctgaagaagttgctgttctgaaacagaagttggagcgatgtcattctgctgagcttgcacttaacgtaatcacgaagaagaggaaaggctatgaagatgatgattacgtctcaaagaaatccaaacatgaggaggaagaatggactgatgacgacctggtagaatctctctaaccatttgaagttgatttctcaatgctaactaatcaagagaaatcgccaaactttggcatcagagcaaggtccacacttatcactgaaaattttcccacccagccccattaaaaacgttaaagtgtgagagattttatttcaacactgacaagctagttactagagggcctacaaaggtaagtaacaagtttccatttcaacttgagagacaaatgatgttaaaatataagaagcagggtaagtcaggtttgtgattttaaataaaagggagaaggatttcagactgaggaatgacaggttagtatggctaaagattgaggtgtgataaatgggagccaaagtgcacagcaaaaatatcttgactaatccatatcctccctgtcttctatcatgtaaccaaggaaggagaccacctgggatactatgttggtccaagtccagctaaaaaacagaaggggtggaaaggagagtaatttgataaaagagccaagaagggagagaatggaatgaattgagctgatttcaaggaaaaggagcatgggacatgttgagatttttggtatcagtgttaaacggtgattgaagccacataggttagcagcccccatagaaataactgccttttgtagcttggaactactaagcagacatcttttaagcccttagcatttttttttcctgtattttatacattagaggaatagcataaagtgttgctcttggaatctagggctttccttactgtgggaacacctccttgggttcctgtctcactcactttgattaccaatgtcattctgccacgtatgttccatatgtcctatctatctgccctgcacaattatgagagggaaggaattattgcatttataaaatccttttcaaaagaggccattagcaaaaatactaatctaaagcttcagcttctccctgggccttgctctgatgctaaggtttaaactgcccctgaaggaggaagaaaataaataaattaaatgcttagctcttttagacagaagtaatcaattatgcaagatatcccttggttttattttaacttaacctttgtgaatacttcacaaaaatacacatacagaagtaaataaaactatacagttgaactaaatatccagcagatacaacaagtagtcagaagttcaaagatggataagttaggcagctgatgaggttgtctgcataatcaaaggggtagcacaaataatgaacaaataacttttaacaaaagcattctagttaacataaaagaaattggtagtctataaaatggttgaatgggtaacatgcattgatcaatacaacaaccaataatatttactgaattcaaactatttacttgtaaacatttaacaaagcattatgagatctaaatacagtctttgacaatttcaacaaaataagtcgtatgtttaaaaaataaagctgatgagcaat

SEQ ID NO: 3461 - DNA, 549 bp, Homo sapiens
  source 1..549: mol_type = unassigned DNA; mol_type = unassigned DNA
cttaatagaattgcattgacggatgcttaccttttatacacaccttcccaaattgccctgactgccattttatctagtgcctccagggctggaattactatggaaagttatttatcagagagtctgatgctgaaagagaacagaacttgcctgtcacagttactagatataatgaaaagcatgagaaacttagtaaagaagtatgaaccacccagatctgaagaagttgctgttctgaaacagaagttggagcgatgtcattctgctgagcttgcacttaacgtaatcacgaagaagaggaaaggctatgaagatgatgattacgtctcaaagaaatccaaacatgaggagatcgccaaactttggcatcagagcaaggtccacacttatcactgaaaattttcccacccagccccattaaaaacgttaaagtgtgagagattttatttcaacactgacaagctagttactagagggcctacaaaggtaagtaacaagtttccatttcaacttgagagacaaatgatgttaaaatataagaagcagggt

SEQ ID NO: 3462 - DNA, 2391 bp, Homo sapiens
  source 1..2391: mol_type = unassigned DNA; mol_type = unassigned DNA
gcaaatactatgagaaaaggttattggaattctgttcggtgtttaagccagcaatgccaagatctgttgtgggtacggcttgtatgtatttcaaacgtttttatcttaataactcagtaatggaatatcaccccaggataataatgctcacttgtgcatttttggcctgcaaagtagatgaattcaatgtatctagtcctcagtttgttggaaacctccgggagagtcctcttggacaggagaaggcacttgaacagatactggaatatgaactacttcttatacagcaacttaatttccaccttattgtccacaatccttacagaccatttgagggcttcctcatcgacttaaagacccgctatcccatattggagaatccagagattttgaggaaaacagctgatgactttcttaatagaattgcattgacggatgcttaccttttatacacaccttcccaaattgccctgactgccattttatctagtgcctccagggctggaattactatggaaagttatttatcagagagtctgatgctgaaagagaacagaacttgcctgtcacagttactagatataatgaaaagcatgagaaacttagtaaagaagtatgaaccacccagatctgaagaagttgctgttctgaaacagaagttggagcgatgtcattctgctgagcttgcacttaacgtaatcacgaagaagaggaaaggctatgaagatgatgattacgtctcaaagaaatccaaacatgaggaggtatgttttactccaaagatgaactctaagttatttttgttatacattctggtgtgactatactgttaagatttattctccaagagtacaggcattatagagttgtgggttttttcattttttgcatacttccttacgtacagtactgttgtccattattaaagggatttttctctcttctgtctttatttaatgaagaatccttcctgtgttcatagaaagcagaagcaatatgtatacatactacatttttgctttttttcttattctccaaggatttttcccttacccccttttaaaaaaaattttctatctgtcaagtcaaataagtgaataatcagaggcaaaaggtcacagccataacctttattcctcactggaggagtctggtgagaccatgccaacattactaacagtgaactattacaaaatttcctggtttatcttttgtaatccacatgggtaaaaggaggagaacattttcttaaagggaggtaagaggtaaacaatactggttatgcttcagtgttatccttaccacactttttttccttcttaggaagaatggactgatgacgacctggtagaatctctctaaccatttgaagttgatttctcaatgctaactaatcaagagaagtaggaagcatatcaaacgtttaactttatttaaaaagtataatgtgaaaacataaaatatattaaaacttttctattgttttctttccctttcacagtaactttatgtaaaataaaccatcttcaaaagagctagaatagcacctgttttgaatattcttattccatcgtgactaatatcaaattaaagctgcaactcatttgcctaattttttaagcaaaatatgataggcaaacctatgctttttttaaaaaaggcaccacaaaaaacaaaacttagtagccagctttaaaagtgttaaggaatgtgttttgccctctagaaacctttataaatggctttttgaatgccatcctgatatatttagctatttgtccattactattaaactgcagaaggtatttcaactgttacatggtactgaaagccagtcgtctgggtaatgaatattatttttctttagttacccgaaaacatttccaaatgggtttttaaaaaaaaccagatatatgattttgaatagctgtctacatcaaactcttacgctagtatagataagtaggtagcagcaaattgtatattcagttgtggttgttttttaattttgttttgatgtaaggtcttgctatgttgcccaggctgtctcagactcctaggctctagtgatcctctgcctcagttttctgagtaattgggactacaggcacacatcaccacagccttataattaacctattagatcctataagtgaatccgtgtaagtagattataacagttactaggaattttgcagattaaatatgttagagaaatgtaattcaaattgaaatgagtcaatataaaaatatgaaagcacagactattacagcaaattacttacatatgaatcatggccagctgtatttcactatgtgaccttggtaagttattaaacctctaagtgccagtttcccacactgaaaatggggaagataaaaatgcctact

SEQ ID NO: 3463 - DNA, 1378 bp, Homo sapiens
  source 1..1378: mol_type = unassigned DNA; mol_type = unassigned DNA
gggcgccctaacgaacccgggatacggtctgttcctagtccgctccggaaatgcaactgcgtacgggctggccgcgtaatcgtgacgacagcgcgccagcgccggctagccggacgccctaggcttccgcgagatcttcggtgggggtacgggtgttttacgccaggacgctgatgcgtttgggttctcgtctgcagaccctctggacctggtcacgattccataatgtaccacaacagtagtcagaagcggcactggaccttctccagcgaggagcagctggcaagactgcgggctgacgccaaccgcaaattcagatgcaaagccgtggccaacgggaaggttcttccgaatgatccagtctttcttgagcctcatgaagaaatgacactctgcaaatactatgagaaaaggttattggaattctgttcggtgtttaagccagcaatgccaagatctgttgtgggtacggcttgtatgtatttcaaacgtttttatcttaataactcagtaatggaatatcaccccaggataataatgctcacttgtgcatttttggcctgcaaagtagatgaattcaatgtatctagtcctcagtttgttggaaacctccgggagagtcctcttggacaggagaaggcacttgaacagatactggaatatgaactacttcttatacagcaacttaatttccaccttattgtccacaatccttacagaccatttgagggcttcctcatcgacttaaagacccgctatcccatattggagaatccagagattttgaggaaaacagctgatgactttcttaatagaattgcattgacggatgcttaccttttatacacaccttcccaaattgccctgactgccattttatctagtgcctccagggctggaattactatggaaagttatttatcagagagtctgatgctgaaagagaacagaacttgcctgtcacagttactagatataatgaaaagcatgagaaacttagtaaagaagtatgaaccacccagatctgaagaagttgctgttctgaaacagaagttggagcgatgtcattctgctgagcttgcacttaacgtaatcacgaagaagaggaaaggctatgaagatgatgattacgtctcaaagaaatccaaacatgaggaggaagaatggactgatgacgacctggtagaatctctctaaccatttgaagttgatttctcaatgctaactaatcaagagaagtaggaagcatatcaaacgtttaactttatttaaaaagtataatgtgaaaacataaaatatattaaaacttttctattgttttctttccctttcacagtaactttatgtaaaataaaccatcttcaaaagagctagaata

SEQ ID NO: 3464 - DNA, 1497 bp, Homo sapiens
  source 1..1497: mol_type = unassigned DNA; mol_type = unassigned DNA
gccctaggcttccgcgagatcttcggtgggggtacgggtgttttacgccaggacgctgatgcgtttgggttctcgtctgcagaccctctggacctggtcacgattccataatgtaccacaacagtagtcagaagcggcactggaccttctccagcgaggagcagctggcaagactgcgggctgacgccaaccgcaaattcagatgcaaagccgtggccaacgggaaggtgaggttttcccaacggttgcccagttgcccggtcactaaattctgagcagctgcgggagctcttctggctcccaggacaatctcgctccgtcgtttctctgcctctgcggcgcggagtgcgtttttctatcaaaataagcgagcaccttgccaggttccgtgggtacaaagacgaacaacgccatccccgtcgtcgaatggcagacaagtaaccagtctttgtaacgtagtgaagaagagagttcttccgaatgatccagtctttcttgagcctcatgaagaaatgacactctgcaaatactatgagaaaaggttattggaattctgttcggtgtttaagccagcaatgccaagatctgttgtgggtacggcttgtatgtatttcaaacgtttttatcttaataactcagtaatggaatatcaccccaggataataatgctcacttgtgcatttttggcctgcaaagtagatgaattcaatgtatctagtcctcagtttgttggaaacctccgggagagtcctcttggacaggagaaggcacttgaacagatactggaatatgaactacttcttatacagcaacttaatttccaccttattgtccacaatccttacagaccatttgagggcttcctcatcgacttaaagacccgctatcccatattggagaatccagagattttgaggaaaacagctgatgactttcttaatagaattgcattgacggatgcttaccttttatacacaccttcccaaattgccctgactgccattttatctagtgcctccagggctggaattactatggaaagttatttatcagagagtctgatgctgaaagagaacagaacttgcctgtcacagttactagatataatgaaaagcatgagaaacttagtaaagaagtatgaaccacccagatctgaagaagttgctgttctgaaacagaagttggagcgatgtcattctgctgagcttgcacttaacgtaatcacgaagaagaggaaaggctatgaagatgatgattacgtctcaaagaaatccaaacatgaggaggaagaatggactgatgacgacctggtagaatctctctaaccatttgaagttgatttctcaatgctaactaatcaagagaagtaggaagcatatcaaacgtttaactttatttaaaaagtataatgtgaaaacataaaatatattaaaacttttctattgttttctttccctttcacagtaactttatgtaaaataaaccatcttcaaaaga

SEQ ID NO: 3465 - DNA, 451 bp, Homo sapiens
  source 1..451: mol_type = unassigned DNA; mol_type = unassigned DNA
agttatttatcagagagtctgatgctgaaagagaacagaacttgcctgtcacagttactagatataatgaaaagcatgagaaacttagtaaagaagtatgaaccacccagatctgaagaagttgctgttctgaaacagaagttggagcgatgtcattctgctgagcttgcacttaacgtaatcacgaagaagaggaaaggctatgaagatgatgattacgtctcaaagaaatccaaacatgaggaggaagaatggactgatgacgacctggtagaatctctctaaccatttgaagttgatttctcaatgctaactaatcaagagaagtaggaagcatatcaaacgtttaactttatttaaaaagtataatgtgaaaacataaaatatattaaaacttttctattgttttctttccctttcacagtaactttatgtaaaataaaccatcttc

SEQ ID NO: 3466 - DNA, 778 bp, Homo sapiens
  source 1..778: mol_type = unassigned DNA; mol_type = unassigned DNA
gctcacttgtgcatttttggcctgcaaagtagatgaattcaatgtatctagtcctcagtttgttggaaacctccgggagagtcctcttggacaggagaaggcacttgaacagatactggaatatgaactacttcttatacagcaacttaatttccaccttattgtccacaatccttacagaccatttgagggcttcctcatcgacttaaagacccgctatcccatattggagaatccagagattttgaggaaaacagctgatgactttcttaatagaattgcattgacggatgcttaccttttatacacaccttcccaaattgccctgactgccattttatctagtgcctccagggctggaattactatggaaagttatttatcagagagtctgatgctgaaagagaacagaacttgcctgtcacagttactagatataatgaaaagcatgagaaacttagtaaagaagtatgaaccacccagatctgaagaagttgctgttctgaaacagaagttggagcgatgtcattctgctgagcttgcacttaacgtaatcacgaagaagaggaaaggctatgaagatgatgattacgtctcaaagaaatccaaacatgaggaggaagaatggactgatgacgacctggtagaatctctctaaccatttgaagttgatttctcaatgctaactaatcaagagaagtaggaagcatatcaaacgtttaactttatttaaaaagtataatgtgaaaacataaaatatattaaaacttttctattg

SEQ ID NO: 3467 - DNA, 606 bp, Homo sapiens
  source 1..606: mol_type = unassigned DNA; mol_type = unassigned DNA
gagatcttcggtgggggtacgggtgttttacgccaggacgctgatgcgtttgggttctcgtctgcagaccctctggacctggtcacgattccataatgtaccacaacagtagtcagaagcggcactggaccttctccagcgaggagcagctggcaagactgcgggctgacgccaaccgcaaattcagatgcaaagccgtggccaacgggaaggttcttccgaatgatccagtctttcttgagcctcatgaagaaatgacactctgcaaatactatgagaaaaggttattggaattctgttcggtgtttaagccagcaatgccaagatctgttgtgggtacggcttgtatgtatttcaaacgtttttatcttaataactcagtaatggaatatcaccccaggataataataccatttgagggcttcctcatcgacttaaagacccgctatcccatattggagaatccagagattttgaggaaaacagctgatgactttcttaatagaattgcattgacggatgcttaccttttatacacaccttcccaaattgccctgactgccattttatctagtgcctccagggctggaattactatggaaaggt

SEQ ID NO: 3468 - DNA, 582 bp, Homo sapiens
  source 1..582: mol_type = unassigned DNA; mol_type = unassigned DNA
acgggtgttttacgccaggacgctgatgcgtttgggttctcgtctgcagaccctctggacctggtcacgattccataatgtaccacaacagtagtcagaagcggcactggaccttctccagcgaggagcagctggcaagactgcgggctgacgccaaccgcaaattcagatgcaaagccgtggccaacgggaaggttcttccgaatgatccagtctttcttgagcctcatgaagaaatgacactctgcaaatactatgagaaaaggttattggaattctgttcggtgtttaagccagcaatgccaagatctgttgtgggtacggcttgtatgtatttcaaacgtttttatcttaataactcagtaatggaatatcaccccaggataataataacttgagatctctgtttacctgtacttcagtaattctgatggctcacttgtgcatttttggcctgcaaagtagatgaattcaatgtatctagtcctcagtttgttggaaacctccgggagagtcctcttggacaggagaaggcacttgaacagatactggaatatgaactacttcttatacagcaactta

SEQ ID NO: 3469 - DNA, 587 bp, Homo sapiens
  source 1..587: mol_type = unassigned DNA; mol_type = unassigned DNA
gctgatgcgtttgggttctcgtctgcagaccctctggacctggtcacgattccataatgtaccacaacagtagtcagaagcggcactggaccttctccagcgaggagcagctggcaagactgcgggctgacgccaaccgcaaattcagatgcaaagccgtggccaacgggaaggttcttccgaatgatccagtctttcttgagcctcatgaagaaatgacactctgcaaatactatgagaaaaggttattggaattctgttcggtgtttaagccagcaatgccaagatctgttgtgggtacggcttgtatgtatttcaaacgtttttatcttaataactcagtaatggaatatcaccccaggataataatgtgagtatgtctgtctaatatattgttttcatttaagaagacctttataatcttttgagtattttttgggaggagagaattgtgagagagagagagagagaactgacttcctaatacagggtaatttagacttgaattctatttttttttttttattcagaacttgagatctctgtttacctgtacttcagtaattctgatggtatgtgaacttcag

SEQ ID NO: 3470 - DNA, 3324 bp, Homo sapiens
  source 1..3324: mol_type = unassigned DNA; mol_type = unassigned DNA
gcccaaatggcaggcatctcatatgtggcatctttctttctccttctgactaagctcagcattggccagagagaagtaacagttcagaaaggaccactgtttagagctgaaggttacccagtcagcattggctgcaatgtaactggccaccagggaccttctgagcagcatttccagtggtctgtttacctgccgacaaacccgacccaggaagtccagatcattagcaccaaggatgctgccttctcttacgcagtatatacgcagcgggtgcgaagcggagacgtctacgtggagagggtccagggcaactcagtcttgttgcacatctcaaaactccagatgaaggatgctggcgagtatgagtgtcacacaccaaacactgatgagaaatactatggaagttacagtgcaaagactaatctaattgttattccagataccctctctgccaccatgagttctcagactctcggtaaggaggaaggtgagccattagccctcacctgtgaggcatccaaagccacagcccaacatactcacctctctgtcacctggtacctaacacaggatggaggaggaagccaagccactgagattatttctctctccaaagattttatattggtccctgggcccttgtatacagagcggtttgcagccagtgacgtacagctcaacaaactgggacccactacattcaggctgtccatagagaggctccagtcctcagatcagggtcagctgttctgtgaggcaacggaatggattcaggatccagatgaaacttggatgttcatcaccaaaaagcagaccgatcaaaccactctgaggatccagccagcagtgaaagattttcaagtcaacattacagctgacagcttgtttgctgaagggaaacccttagaactggtttgcctggttgtaagcagtggccgtgacccacagcttcaaggcatttggttcttcaatgggactgaaattgctcacattgatgctggtggagtcctgggcctgaagaatgactacaaagagagagcaagtcaaggagagctccaggtttcaaagttaggccccaaggctttctctctcaagatcttctctctgggcccagaggatgaaggcgcctacagatgtgtggtagcagaggtcatgaaaacacgcacaggttcctggcaggtgcttcagagaaagcagtcaccagacagccacgtgcacctgaggaagccagcagcaagaagtgtggtcatgtctaccaagaacaagcagcaagttgtgtgggaaggagagacactcgcctttctctgtaaggctggtggagctgaaagtcccctgtctgtgagctggtggcacatcccacgggaccagacacagcccgagtttgtggctggcatggggcaggatggcattgtgcagctgggtgcctcctatggggtacccagttaccatggcaacacaaggctggagaaaatggactgggccaccttccagctggagatcaccttcactgccatcacagacagtggcacatatgagtgcagagtatctgagaagtctcggaaccaggccagagatctgagctggactcagaagatttcagttactgtaaagtctctggagtcaagtttacaagttagtctgatgagccgtcagccgcaagtgatgttaaccaacacctttgacctgtcctgtgtcgtgagggccggttactctgacctcaaggtgccactcactgtgacgtggcagttccagccagctagctctcacatcttccaccagcttattcgaatcacccacaatggcactattgaatgggggaatttcctatcccggttccaaaagaagacgaaagtgtcgcagtctttatttcgttcacaactcctagtccatgatgccactgaggaagagacaggagtgtatcagtgtgaagtagaagtttatgacagaaattccctatacaacaaccgccccccgagggcttctgccatctctcacccactgaggatagccgtcactttaccagagagcaagctaaaagtgaattcaaggagtcaagtccaagagctctccatcaactccaacactgatatagaatgtagcatcttgtcccggtccaatggaaaccttcagttagccattatttggtatttttctcctgtttccactaatgcctcttggctaaagatcctggagatggaccaaaccaatgttataaaaactggggatgagtttcacaccccacagagaaaacaaaaatttcatactgagaaggtttcccaagacttatttcagctgcacattctgaatgtggaagacagcgatcggggcaaatatcactgtgctgtggaggaatggctcctgtctacaaatggcacttggcacaagcttggagaaaagaagtcaggactaacagaattgaaactcaagcccacaggaagtaaggtacgtgtctccaaagtgtactggaccgaaaatgtgactgagcacagagaagtggccatccgctgcagcctggagagtgtaggcagctcagccactctgtactctgtgatgtggtactggaacagagaaaactctggaagtaaattgctggtgcacttgcaacatgatggcttgctggagtatggggaagaggggctcaggaggcacctgcactgttaccgttcatcctctacagactttgtcctgaagcttcatcaggtggagatggaggatgcaggaatgtactggtgtagggtggcagagtggcagctccatggacacccaagcaagtggattaatcaagcatccgatgagtcacagcggatggtgctcacggtgctgccttcagagcccacgcttccttccaggatctgctcctcggcccctttactctatttcctgttcatctgtcccttcgtcctgctcctccttctgctcatctccctcctctgcttatactggaaggccaggaagttgtcaacactgcgttccaacacacggaaagaaaaagctctctgggtggacttgaaagaggctggaggtgtgaccacaaataggagggaagacgaggaggaagatgaaggcaactgaatcccaagaggcacctgcagccaggaaggaaagccccgtgtggaatgtggtgacctagtcacctggaaccagctcctgacagaccccggcaacttctagatgaacccaagtgaactttcctcattaccatcctgaagtcactaccccagggggagctatagcttcatgaccgtaacatgtgacctgtgtgctggcaggacgactcactgcggctgcgccactgggacccctcccctacatgcaccaatgcac

SEQ ID NO: 3471 - DNA, 688 bp, Homo sapiens
  source 1..688: mol_type = unassigned DNA; mol_type = unassigned DNA
atcttttgcccatgtggttgcagtcaatccaatttaattcagatcagcaaaagttactgagcacatgtgctaggcactgtaggggatatagaaacaaatggcactatcagacatactcaagtaactatagtgaacaaaggagacgagtaaaagggaattaaagaggcctaaacaaagggctgagtgagaacgggatggaagagaagaactgtgcctgcagcaagagcccacgcttccttccaggatctgctcctcggcccctttactctatttcctgttcatctgtcccttcgtcctgctcctccttctgctcatctccctcctctgcttatactggaaggccaggaagttgtcaacactgcgttccaacacacggaaagaaaaagctctctgggtggacttgaaagaggctggaggtgtgaccacaaataggagggaagacgaggaggaagatgaaggcaactgaatcccaagaggcacctgcagccaggaaggaaagcttcctgccttgctgcctgtttcttcccaagccccgtgtggaatgtggtgacctagtcacctggaaccagctcctgacagaccccggcaacttctagatgaacccaagtgaactttcctcattaccatcctgaagtcactaccccagggggagctatagcttcatgaccgtaacatgtgacctgtgtgc

SEQ ID NO: 3472 - DNA, 409 bp, Homo sapiens
  source 1..409: mol_type = unassigned DNA; mol_type = unassigned DNA
tggaggtgtgaccacaaataggagggaagacgaggaggaagatgaaggcaactgaatcccaagaggcacctgcagccaggaaggaaagcttgttttacagcttcctgccttgctgcctgtttcttcccaagccccgtgtggaatgtggtgacctagtcacctggaaccagctcctgacagaccccggcaacttctagatgaacccaagtgaactttcctcattaccatcctgaagtcactaccccagggggagctatagcttcatgaccgtaacatgtgacctgtgtgctggcaggacgactcactgcggctgcgccactgggacccctcccctacatgcaccaatgcactctctcccctctccatcaccccataaaaccctcctgtcactttccttcagagacaccgc

SEQ ID NO: 3473 - DNA, 3283 bp, Homo sapiens
  source 1..3283: mol_type = unassigned DNA; mol_type = unassigned DNA
agcatttgtcactcaacctctgaatgttagtgacactattgggacgaaaaaggactgtgctggcccaaatggcaggcatctcatatgtggcatctttctttctccttctgactaagctcagcattggccagagagaagtaacagttcagaaaggaccactgtttagagctgaaggttacccagtcagcattggctgcaatgtaactggccaccagggaccttctgagcagcatttccagtggtctgtttacctgccgacaaacccgacccaggaagtccagatcattagcaccaaggatgctgccttctcttacgcagtatatacgcagcgggtgcgaagcggagacgtctacgtggagagggtccagggcaactcagtcttgttgcacatctcaaaactccagatgaaggatgctggcgagtatgagtgtcacacaccaaacactgatgagaaatactatggaagttacagtgcaaagactaatctaattgttattccagataccctctctgccaccatgagttctcagactctcggtaaggaggaaggtgagccattagccctcacctgtgaggcatccaaagccacagcccaacatactcacctctctgtcacctggtacctaacacaggatggaggaggaagccaagccactgagattatttctctctccaaagattttatattggtccctgggcccttgtatacagagcggtttgcagccagtgacgtacagctcaacaaactgggacccactacattcaggctgtccatagagaggctccagtcctcagatcagggtcagctgttctgtgaggcaacggaatggattcaggatccagatgaaacttggatgttcatcaccaaaaagcagaccgatcaaaccactctgaggatccagccagcagtgaaagattttcaagtcaacattacagctgacagcttgtttgctgaagggaaacccttagaactggtttgcctggttgtaagcagtggccgtgacccacagcttcaaggcatttggttcttcaatgggactgaaattgctcacattgatgctggtggagtcctgggcctgaagaatgactacaaagagagagcaagtcaaggagagctccaggtttcaaagttaggccccaaggctttctctctcaagatcttctctctgggcccagaggatgaaggcgcctacagatgtgtggtagcagaggtcatgaaaacacgcacaggttcctggcaggtgcttcagagaaagcagtcaccagacagccacgtgcacctgaggaagccagcagcaagaagtgtggtcatgtctaccaagaacaagcagcaagttgtgtgggaaggagagacactcgcctttctctgtaaggctggtggagctgaaagtcccctgtctgtgagctggtggcacatcccacgggaccagacacagcccgagtttgtggctggcatggggcaggatggcattgtgcagctgggtgcctcctatggggtacccagttaccatggcaacacaaggctggagaaaatggactgggccaccttccagctggagatcaccttcactgccatcacagacagtggcacatatgagtgcagagtatctgagaagtctcggaaccaggccagagatctgagctggactcagaagatttcagttactgtaaagtctctggagtcaagtttacaagttagtctgatgagccgtcagccgcaagtgatgttaaccaacacctttgacctgtcctgtgtcgtgagggccggttactctgacctcaaggtgccactcactgtgacgtggcagttccagccagctagctctcacatcttccaccagcttattcgaatcacccacaatggcactattgaatgggggaatttcctatcccggttccaaaagaagacgaaagtgtcgcagtctttatttcgttcacaactcctagtccatgatgccactgaggaagagacaggagtgtatcagtgtgaagtagaagtttatgacagaaattccctatacaacaaccgccccccgagggcttctgccatctctcacccactgaggatagccgtcactttaccagagagcaagctaaaagtgaattcaaggagtcaagtccaagagctctccatcaactccaacactgatatagaatgtagcatcttgtcccggtccaatggaaaccttcagttagccattatttggtatttttctcctgtttccactaatgcctcttggctaaagatcctggagatggaccaaaccaatgttataaaaactggggatgagtttcacaccccacagagaaaacaaaaatttcatactgagaaggtttcccaagacttatttcagctgcacattctgaatgtggaagacagcgatcggggcaaatatcactgtgctgtggaggaatggctcctgtctacaaatggcacttggcacaagcttggagaaaagaagtcaggactaacagaattgaaactcaagcccacaggaagtaaggtacgtgtctccaaagtgtactggaccgaaaatgtgactgagcacagagaagtggccatccgctgcagcctggagagtgtaggcagctcagccactctgtactctgtgatgtggtactggaacagagaaaactctggaagtaaattgctggtgcacttgcaacatgatggcttgctggagtatggggaagaggggctcaggaggcacctgcactgttaccgttcatcctctacagactttgtcctgaagcttcatcaggtggagatggaggatgcaggaatgtactggtgtagggtggcagagtggcagctccatggacacccaagcaagtggattaatcaagcatccgatgagtcacagcggatggtgctcacggtgctgccttcagagcccacgcttccttccaggatctgctcctcggcccctttactctatttcctgttcatctgtcccttcgtcctgctcctccttctgctcatctccctcctctgcttatactggaaggccaggaagttgtcaacactgcgttccaacacacggaaagaaaaagctctctgggtggacttgaaagaggctggaggtgtgaccacaaataggagggaagacgaggaggaagatgaaggcaactgaatcccaagaggcacctgcagccaggaaggaaaggtgggggctttttaattgggctaaccagggtgtgaatgaatcctggttctgtcctcaactatgtctgcggccttgggcaagttacctaggaatcagagggagcattcactgagtgc

SEQ ID NO: 3474 - DNA, 1338 bp, Homo sapiens
  source 1..1338: mol_type = unassigned DNA; mol_type = unassigned DNA
aatactctccccagcacacggaaggggaagggggtggaggttgctgctatgagagagaaaaaaaaaacagccacaatagagattctgccttcaaaggttggcttgccacctgaagcagccactgcccagggggtgcaaagaagagacagcagcgcccagcttggaggtgctaactccagaggccagcatcagcaactgggcacagaaaggagccgcctgggcagggaccatggcacggccacatccctggtggctgtgcgttctggggaccctggtggggctctcagctactccagcccccaagagctgcccagagaggcactactgggctcagggaaagctgtgctgccagatgtgtgagccaggaacattcctcgtgaaggactgtgaccagcatagaaaggctgctcagtgtgatccttgcataccgggggtctccttctctcctgaccaccacacccggccccactgtgagagctgtcggcactgtaactctggtcttctcgttcgcaactgcaccatcactgccaatgctgagtgtgcctgtcgcaatggctggcagtgcagggacaaggagtgcaccgagtgtgatcctcttccaaacccttcgctgaccgctcggtcgtctcaggccctgagcccacaccctcagcccacccacttaccttatgtcagtgagatgctggaggccaggacagctgggcacatgcagactctggctgacttcaggcagctgcctgcccggactctctctacccactggccaccccaaagatccctgtgcagctccgattttattcgcatccttgtgatcttctctggaatgttccttgttttcaccctggccggggccctgttcctccatcaacgaaggaaatatagatcaaacaaaggagaaagtcctgtggagcctgcagagccttgtcattacagctgccccagggaggaggagggcagcaccatccccatccaggaggattaccgaaaaccggagcctgcctgctccccctgagccagcacctgcgggagctgcactacagccctggcctccacccccaccccgccgaccatccaagggagagtgagacctggcagccacaactgcagtcccatcctcttgtcagggccctttcctgtgtacacgtgacagagtgccttttcgagactggcagggacgaggacaaatatggatgaggtggagagtgggaagcaggagcccagccagctgcgcctgcgctgcaggagggcgggggctctggttgtaaaacacacttcctgctgcgaaagacccacatgctacaagacgggcaaaataaagtgacagatgaccaccctgca

SEQ ID NO: 3475 - DNA, 1045 bp, Homo sapiens
  source 1..1045: mol_type = unassigned DNA; mol_type = unassigned DNA
gggaggcaccaccttgaagagggcagagaaccagcccttctcaggccttgatcccttaccctctcctcccaggaacattcctcgtgaaggactgtgaccagcatagaaaggctgctcagtgtgatccttgcataccgggggtctccttctctcctgaccaccacacccggccccactgtgagagctgtcggcactgtaactctggtcttctcgttcgcaactgcaccatcactgccaatgctgagtgtgcctgtcgcaatggctggcagtgcagggacaaggagtgcaccgagtgtgatcctcttccaaacccttcgctgaccgctcggtcgtctcaggccctgagcccacaccctcagcccacccacttaccttatgtcagtgagatgctggaggccaggacagctgggcacatgcagactctggctgacttcaggcagctgcctgcccggactctctctacccactggccaccccaaagatccctgtgcagctccgattttattcgcatccttgtgatcttctctggaatgttccttgttttcaccctggccggggccctgttcctccatcaacgaaggaaatatagatcaaacaaaggagaaagtcctgtggagcctgcagagccttgtcattacagctgccccagggaggaggagggcagcaccatccccatccaggaggattaccgaaaaccggagcctgcctgctccccctgagccagcacctgcgggagctgcactacagccctggcctccacccccaccccgccgaccatccaagggagagtgagacctggcagccacaactgcagtcccatcctcttgtcagggccctttcctgtgtacacgtgacagagtgccttttcgagactggcagggacgaggacaaatatggatgaggtggagagtgggaagcaggagcccagccagctgcgcctgcgctgcaggagggcgggggctctggttgtaaaacacacttcctgctgcgaaagacccacatgctacaagacgggcaaaataaagtgacagatgaccaccctgca

SEQ ID NO: 3476 - DNA, 1494 bp, Homo sapiens
  source 1..1494: mol_type = unassigned DNA; mol_type = unassigned DNA
actcccttcctcttttctgctcacacaggaagccctggaagctgcttcctcagacatgccgctgctgctactgctgcccctgctgtgggcagacttgacccacaggcccaaaatcctcatccctggcactctagaacccggccactccaaaaacctgacctgctctgtgtcctgggcctgtgagcagggaacacccccgatcttctcctggttgtcagctgcccccacctccctgggccccaggactactcactcctcggtgctcataatcaccccacggccccaggaccacggcaccaacctgacctgtcaggtgaagttcgctggagctggtgtgactacggagagaaccatccagctcaacgtcacctatgttccacagaacccaacaactggtatctttccaggagatggctcagggaaacaagagaccagagcaggagtggttcatggggccattggaggagctggtgttacagccctgctcgctctttgtctctgcctcatcttcttcatagtgaagacccacaggaggaaagcagccaggacagcagtgggcaggaatgacacccaccctaccacagggtcagcctccccggtgagtgatggggcatcctggcatccagtctgtcctgcagacacctcctcccaatgtggcccaccgtcatgccccattcagcatttccagaactgagcttattgtctttcctcctgtttaacagtgtaggttttaatatttttcaggtacgttgaggccaacagatcaggagatgatggccattgaaaagatagtttcttggccgggcacagtgtttcacacctgcaatcccagcacctttggaggccaaggcgggcggatcacgaggtcaggagattgagactatcctggctaacatggtgaaaccccgtctctactaaaaatacaaaaaattagccagatgtggtggctggcgcctgtagtcccagctacttgggaggctgaggcaggagaatggtatgaacccgggaggcagagcttgtagtgagccgacatagcaccactgcactccagcctgggtgacagagagagactctgtcccaaaaagaaaaaaaaaatagtttcttattcaccgttcccgagagggcacaccacaccatgcaaggccatatggagaagcaccagggtcagtcaggaagcagagggagcaaggagaaaatgggacaagagccttcactgtggctttcatggaaaagaatgggcaagacagggtaagcaagctaggcaggtttaggattggctacttagaacaatttcagcagactctggggtataggagttgtctctagttgtctggtacatggccctgggtttattaaggaggattgtggtctggagtgtaagagctcaataaaggatccagctggtagtgtgggctttagattgactggtttgcacatgaaaggtgcacttgtatgcaagtcctttattagctctagaaatctactatccttggg

SEQ ID NO: 3477 - DNA, 1023 bp, Homo sapiens
  source 1..1023: mol_type = unassigned DNA; mol_type = unassigned DNA
actcccttcctcttttctgctcacacaggaagccctggaagctgcttcctcagacatgccgctgctgctactgctgcccctgctgtgggcagacttgacccacaggcccaaaatcctcatccctggcactctagaacccggccactccaaaaacctgacctgctctgtgtcctgggcctgtgagcagggaacacccccgatcttctcctggttgtcagctgcccccacctccctgggccccaggactactcactcctcggtgctcataatcaccccacggccccaggaccacggcaccaacctgacctgtcaggtgaagttcgctggagctggtgtgactacggagagaaccatccagctcaacgtcacctatgttccacagaacccaacaactggtatctttccaggagatggctcagggaaacaagagaccagagcaggagtggttcatggggccattggaggagctggtgttacagccctgctcgctctttgtctctgcctcatcttcttcatagtgaagacccacaggaggaaagcagccaggacagcagtgggcaggaatgacacccaccctaccacagggtcagcctccccgaaacaccagaagaagtccaagttacatggccccactgaaacctcaagctgttcaggtgccgcccctactgtggagatggatgaggagctgcattatgcttccctcaactttcatgggatgaatccttccaaggacacctccaccgaatactcagaggtcaggacccagtgaggaacccacaagagcatcaggctcagctagaagatccacatcctctacaggtcggggaccaaaggctgattcttggagatttaacaccccacaggcaatgggtttatagacattatgtgagtttcctgctatattaacatcatcttagactttgcaagcagagagtcgtggaatcaaatctgtgctctttcatttgctaagtgtatgatgtcacacaagctccttaaccttccatgtctccattttcttctctg

SEQ ID NO: 3478 - DNA, 1089 bp, Homo sapiens
  source 1..1089: mol_type = unassigned DNA; mol_type = unassigned DNA
ctggaagctgcttcctcagacatgccgctgctgctactgctgcccctgctgtgggcaggggccctggctatggatccaaatttctggctgcaagtgcaggagtcagtgacggtacaggagggtttgtgcgtcctcgtgccctgcactttcttccatcccataccctactacgacaagaactccccagttcatggttactggttccgggaaggagccattatatccagggactctccagtggccacaaacaagctagatcaagaagtacaggaggagactcagggcagattccgcctccttggggatcccagtaggaacaactgctccctgagcatcgtagacgccaggaggagggataatggttcatacttctttcggatggagagaggaagtaccaaatacagttacaaatctccccagctctctgtgcatgtgacagacttgacccacaggcccaaaatcctcatccctggcactctagaacccggccactccaaaaacctgacctgctctgtgtcctgggcctgtgagcagggaacacccccgatcttctcctggttgtcagctgcccccacctccctgggccccaggactactcactcctcggtgctcataatcaccccacggccccaggaccacggcaccaacctgacctgtcaggtgaagttcgctggagctggtgtgactacggagagaaccatccagctcaacgtcacctatgttccacagaacccaacaactggtatctttccaggagatggctcagggaaacaagagaccagagcaggagtggttcatggggccattggaggagctggtgttacagccctgctcgctctttgtctctgcctcatcttcttcatagtgaagacccacaggaggaaagcagccaggacagcagtgggcaggaatgacacccaccctaccacagggtcagcctccccggtacgttgaggccaacagatcaggagatgatggccattgaaaagatagtttcttggccgggcacagtgtttcacacctgcaatcccagcacctttggaggccaaggcgggcggatcacgaggtcaggagattgagactatcctg

SEQ ID NO: 3479 - DNA, 1444 bp, Homo sapiens
  source 1..1444: mol_type = unassigned DNA; mol_type = unassigned DNA
ctggaagctgcttcctcagacatgccgctgctgctactgctgcccctgctgtgggcaggggccctggctatggatccaaatttctggctgcaagtgcaggagtcagtgacggtacaggagggtttgtgcgtcctcgtgccctgcactttcttccatcccataccctactacgacaagaactccccagttcatggttactggttccgggaaggagccattatatccagggactctccagtggccacaaacaagctagatcaagaagtacaggaggagactcagggcagattccgcctccttggggatcccagtaggaacaactgctccctgagcatcgtagacgccaggaggagggataatggttcatacttctttcggatggagagaggaagtaccaaatacagttacaaatctccccagctctctgtgcatgtgacagacttgacccacaggcccaaaatcctcatccctggcactctagaacccggccactccaaaaacctgacctgctctgtgtcctgggcctgtgagcagggaacacccccgatcttctcctggttgtcagctgcccccacctccctgggccccaggactactcactcctcggtgctcataatcaccccacggccccaggaccacggcaccaacctgacctgtcaggtgaagttcgctggagctggtgtgactacggagagaaccatccagctcaacgtcacctatgttccacagaacccaacaactggtatctttccaggagatggctcagggaaacaagagaccagagcaggagtggttcatggggccattggaggagctggtgttacagccctgctcgctctttgtctctgcctcatcttcttcatagtgaagacccacaggaggaaagcagccaggacagcagtgggcaggaatgacacccaccctaccacagggtcagcctccccgaaacaccagaagaagtccaagttacatggccccactgaaacctcaagctgttcaggtgccgcccctactgtggagatggatgaggagctgcattatgcttccctcaactttcatgggatgaatccttccaaggacacctccaccgaatactcagaggtcaggacccagtgaggaacccacaagagcatcaggctcagctagaagatccacatcctctacaggtcggggaccaaaggctgattcttggagatttaacaccccacaggcaatgggtttatagacattatgtgagtttcctgctatattaacatcatcttagactttgcaagcagagagtcgtggaatcaaatctgtgctctttcatttgctaagtgtatgatgtcacacaagctccttaaccttccatgtctccattttcttctctgtgaagtaggtataagaagtcctatctcatagggatgctgtgagcattaaataaaggtacacatggaaaacacca

SEQ ID NO: 3480 - DNA, 1522 bp, Homo sapiens
  source 1..1522: mol_type = unassigned DNA; mol_type = unassigned DNA
ctactgctgcccctgctgtgggcaggtgagtggctgtggggagaggggttgtcgggctgggccgagctgaccctcgtttccccacaggggccctggctatggatccaaatttctggctgcaagtgcaggagtcagtgacggtacaggagggtttgtgcgtcctcgtgccctgcactttcttccatcccataccctactacgacaagaactccccagttcatggttactggttccgggaaggagccattatatccagggactctccagtggccacaaacaagctagatcaagaagtacaggaggagactcagggcagattccgcctccttggggatcccagtaggaacaactgctccctgagcatcgtagacgccaggaggagggataatggttcatacttctttcggatggagagaggaagtaccaaatacagttacaaatctccccagctctctgtgcatgtgacagacttgacccacaggcccaaaatcctcatccctggcactctagaacccggccactccaaaaacctgacctgctctgtgtcctgggcctgtgagcagggaacacccccgatcttctcctggttgtcagctgcccccacctccctgggccccaggactactcactcctcggtgctcataatcaccccacggccccaggaccacggcaccaacctgacctgtcaggtgaagttcgctggagctggtgtgactacggagagaaccatccagctcaacgtcacctatgttccacagaacccaacaactggtatctttccaggagatggctcagggaaacaagagaccagagcaggagtggttcatggggccattggaggagctggtgttacagccctgctcgctctttgtctctgcctcatcttcttcattccctcattccaggctcataacaatggccccacagcctgagaaaaccaggctcaaagaccctggtgtctcccatcagagtgaagacccacaggaggaaagcagccaggacagcagtgggcaggaatgacacccaccctaccacagggtcagcctccccgaaacaccagaagaagtccaagttacatggccccactgaaacctcaagctgttcaggtgccgcccctactgtggagatggatgaggagctgcattatgcttccctcaactttcatgggatgaatccttccaaggacacctccaccgaatactcagaggtcaggacccagtgaggaacccacaagagcatcaggctcagctagaagatccacatcctctacaggtcggggaccaaaggctgattcttggagatttaacaccccacaggcaatgggtttatagacattatgtgagtttcctgctatattaacatcatcttagactttgcaagcagagagtcgtggaatcaaatctgtgctctttcatttgctaagtgtatgatgtcacacaagctccttaaccttccatgtctccattttcttctctgtgaagtaggtataagaagtcctatctcatagggatgctgtgagcat

SEQ ID NO: 3481 - DNA, 4728 bp, Homo sapiens
  source 1..4728: mol_type = unassigned DNA; mol_type = unassigned DNA
ctcggtgctcataatcaccccacggccccaggaccacggcaccaacctgacctgtcaggtgaagttcgctggagctggtgtgactacggagagaaccatccagctcaacgtcacctggaaacaagagaccagagcaggagtggttcatggggccattggaggagctggtgttacagccctgctcgctctttgtctctgcctcatcttcttcatagtgaagacccacaggaggaaagcagccaggacagcagtgggcaggaatgacacccaccctaccacagggtcagcctccccggtacgttgaggccaacagatcaggagatgatggccattgaaaagatagtttcttggccgggcacagtgtttcacacctgcaatcccagcacctttggaggccaaggcgggcggatcacgaggtcaggagattgagactatcctggctaacatggtgaaaccccgtctctactaaaaatacaaaaaattagccagatgtggtggctggcgcctgtagtcccagctacttgggaggctgaggcaggagaatggtatgaacccgggaggcagagcttgtagtgagccgacatagcaccactgcactccagcctgggtgacagagagagactctgtcccaaaaagaaaaaaaaaatagtttcttattcaccgttcccgagagggcacaccacaccatgcaaggccatatggagaagcaccagggtcagtcaggaagcagagggagcaaggagaaaatgggacaagagccttcactgtggctttcatggaaaagaatgggcaagacagggtaagcaagctaggcaggtttaggattggctacttagaacaatttcagcagactctggggtataggagttgtctctagttgtctggtacatggccctgggtttattaaggaggattgtggtctggagtgtaagagctcaataaaggatccagctggtagtgtgggctttagattgactggtttgcacatgaaaggtgcacttgtatgcaagtcctttattagctctagaaatctactatccttgggaaaggcagtctctcaagggtcagtaatgccccagatgtcaaaacatcagaaacacttggttgacacacccctaaacatacttctcctgatgggttctccatctcgctgatggcactcttgtccccattacccaaccagagacatggccccctcctgtcccagtcctccatctcttcctgtgccagtatgctacgatgcatgtctgagcttcctctgaacacggcttaacacaaccactcctgagccgagagcccctcttactccttattctgctgcagcctcacctcccatttctcctctccagaacattagcatcacctccctaaaaggtcattgtcccatcattcccaagtttgaaatgcactgcttctctacactcctgaaagattggcattccaacaacttggtctggcatttggagcaggaaaaccagagtccccttcagtgctatgctcccccaacattagccactcaatcacctcaagcagggcaagctttctcatctcagaatcattgctgggctgtcccctcctcctcatatgcctaatagctacctgcccaactccagtgcatccttcaagctctgattttttttttaatttatttaactctgactaaagtgaacaccacagtaaagtttttgaacacagggtcaaccagcacccattcattctgaaatatctatataatcccatttgccaattgctctaggtccttgtgccattctgtatttttataaacacacagtttacaaatataaaatattcctcctatcgggggcttaacatttattggggaaagggatgaaaataatgaacaaataagcagtgcaaatatacatgaaataggcatgaaataagtgctatggcaggaaatgaaatgggagaacggattggacagtcctgggggccaaagaatggcctttgggcaaacacctgcagaaagaaagtgagtacagtatgagcagtagagaatcatcaaggaagcagcaagtaccatggctctgaggccggaacacatctgatgttttagagaaacaaagtaggacagtgtggataaggcagagttacgtgttgggggtggagtgtggactgaacaatggtaggtaggaaatgaggttgaagagacataggagctgcaaatattgcaggatcctaagtccatcatagttattgatgcgtttagagcagaagagtgacatgaactgacactcattttagtgggagtcactctggctgctctgtgagaaactctagtatgtagtatagaagagaagataccagaatagaagatacacagataatcaagccaagagatgactgactcagacttagtcccaagtaagaataatgaatctgatgtggagaaattgggttccggatacatcttgaaggtggagtcaacagtatttgcaagtggagtgatggagtgcatgcaaggcatgagcaaagatagctcacgggctctgctcgataagtgtctcagatgtcataggtgggtccacagatatcatagatgtcatggatgtccaagaagaccccatagatgtcatagatgtctatagatgccaatgatgatgttcatgtggttaactcagaattcaaacttaaaaaatcaaattgccaatgattaaaattgccatccttgaaggagaagtctattttcaagtgtatatcaaacattattttggttaccgtaagtttgaggtgcctctgagacatccatgtggagatgacaagtagcaggcaagtgtctggagctcagaagagggctccacgtgggagacacagaggttgggagcttccctatcaacatccaataatcgatgaatctacaaagaagagaaggggtccacagacacagccctggaaccctccagcatttaatgttagggagatgaggtgtaaatggtgagaaagctgagaatgaataggagccaatgaccaggaaattgcaggctgtagtgttggtggccaagggaagatggggcttcatggaggagaggttggtcatttgtttcaaatgctggtaagtctggtaagatggaatctgagaaatggctatttgaatgtagctaagtggtatgacagcaaagcagatctgatttttctgctggaggaagatctcttgactagagagagttcaagagagaatgggaggagaagaggcagaaactgtgagttgaaggactcttttgagaaacactgccccaaatctagaaccaagaaatgggcctgcaccagcaaatggttgtaccctgtagacttgccatttctccagcatctgctcctgtgtctcttatgataccatgttccctgtttgtgtagggctttgcaccacttgaactaactgcattcccatagcttcccctaccacaccatgagctccacaaggaaaagcctgggttttattagacctccatcattctactctctcctgttcatctgcacactgtcacaatttgcaattaccagtctgtttctgtcttcatcccctgcagtactggaaatcacagggcccctgctctgctctgctccctcctgaggatccagtgcccagcacataggaggtcccagagacctgggaccgagttcagggtcaacagatgtgtgactttggaaattacctaagctctctgagacctagtttcctggtctgtaaaatggattaaaataatagatgccaaagatgatgtcagtgtagctgcccagaatttttccacattagtctctgtgagtattcaagagaattgcgaatcaatcaatacgtgctacatgtgttagataatgaataagtagagccttaattaattaacatttgatgaaagaatgaaagagtgaataaatgttctgtcagagtcaaatttacttcattgaccctctttgccttctcctggtccccctcctcactgccctgctctaacccccttctttcctctccataagaaacaccagaagaagtccaagttacatggccccactgaaacctcaagctgttcaggtgccgcccctactgtggagatggatgaggagctgcattatgcttccctcaactttcatgggatgaatccttccaaggacacctccaccgaatactcagaggtcaggacccagtgaggaacccacaagagcatcaggctcagctagaagatccacatcctctacagatcccaatttaggttcctctgcctgttcctctaagaggccactgtttgaaccacttcctgaatctgtagccaaaaattggaagcaacccaaatgtccatcaactaatgaaggaataaacaaaatctggtacattcctgcaatgcatatcattcagacataaagatgggccgaagtacagatacatgctacaacgtgtatgaacttcgaaagcatcacaccaagtgaaagaagccagacactaaagatcacgtaccatatgattccattgatatgaaatgtctagaataggaaatacatttctggaggcagaaagcaggtcggcggttgccaggggcttcgaggagggcagtgactgcttagtgagtacatgctttccttttggggcaatgaaaatgtttagaaccaaacagaggttgtggttacacaacgttgtgtatgtactgaatgccaccgagttgttcactttaacatgttcattgtatgtaacgtgattttacatcaataaaaaaaaataat

SEQ ID NO: 3482 - DNA, 536 bp, Homo sapiens
  source 1..536: mol_type = unassigned DNA; mol_type = unassigned DNA
tcagtgtagctgcccagaatttttccacattagtctctaaacaccagaagaagtccaagttacatggccccactgaaacctcaagctgttcaggtgccgcccctactgtggagatggatgaggagctgcattatgcttccctcaactttcatgggatgaatccttccaaggacacctccaccgaatactcagaggtcaggacccagtgaggaacccacaagagcatcaggctcagctagaagatccacatcctctacaggtcggggaccaaaggctgattcttggagatttaacaccccacaggcaatgggtttatagacattatgtgagtttcctgctatattaacatcatcttagactttgcaagcagagagtcgtggaatcaaatctgtgctctttcatttgctaagtgtatgatgtcacacaagctccttaaccttccatgtctccattttcttctctgtgaagtaggtataagaagtcctatctcatagggatgctgtgagcattaaataaaggtacacatggaaaacacc

SEQ ID NO: 3483 - DNA, 881 bp, Homo sapiens
  source 1..881: mol_type = unassigned DNA; mol_type = unassigned DNA
ggctggtcccctgacaggttgaagcaagtagacgcccaggagccccgggagggggctgcagtttccttccttccttctcggcagcgctccgcgcccccatcgcccctcctgcgctagcggaggtgatcgccgcggcgatgccggaggagggttcgggctgctcggtgcggcgcaggccctatgggtgcgtcctgcgggctgctttggtcccattggtcgcgggcttggtgatctgcctcgtggtgtgcatccagcgcttcgcacaggctcagcagcagctgccgctcgagtcacttgggtgggacgtagctgagctgcagctgaatcacacaggacctcagcaggaccccaggctatactggcaggggggcccagcactgggccgctccttcctgcatggaccagagctggacaaggggcagctacgtatccatcgtgatggcatctacatggtacacatccaggtgacgctggccatctgctcctccacgacggcctccaggcaccaccccaccaccctggccgtgggaatctgctctcccgcctcccgtagcatcagcctgctgcgtctcagcttccaccaagggctttttggattttggaactggggactcaaagtcaagtgcttcttacggcatttaatatggactgcacactgttttatcccattaactcagctcgtgttcatgcaagccctacaaagctggaggaatcatcattgttcccatttcacagatgaggaaaacagaggcgtaaaccgttgagtcatctgtccaaagttactggttttgtaacagctggaacctcagtatttaacagttgaggaaaatagtggcagaaaacctgagtcacaagcccgaggcaattcatctacatagtag

SEQ ID NO: 3484 - DNA, 913 bp, Homo sapiens
  source 1..913: mol_type = unassigned DNA; mol_type = unassigned DNA
ccagagaggggcaggctggtcccctgacaggttgaagcaagtagacgcccaggagccccgggagggggctgcagtttccttccttccttctcggcagcgctccgcgcccccatcgcccctcctgcgctagcggaggtgatcgccgcggcgatgccggaggagggttcgggctgctcggtgcggcgcaggccctatgggtgcgtcctgcgggctgctttggtcccattggtcgcgggcttggtgatctgcctcgtggtgtgcatccagcgcttcgcacaggctcagcagcagctgccgctcgagtcacttgggtgggacgtagctgagctgcagctgaatcacacaggacctcagcaggaccccaggctatactggcaggggggcccagcactgggccgctccttcctgcatggaccagagctggacaaggggcagctacgtatccatcgtgatggcatctacatggtacacatccaggtgacgctggccatctgctcctccacgacggcctccaggcaccaccccaccaccctggccgtgggaatctgctctcccgcctcccgtagcatcagcctgctgcgtctcagcttccaccaaggttgtaccattgcctcccagcgcctgacgcccctggcccgaggggacacactctgcaccaacctcactgggacacttttgccttcccgaaacactgatgagaccttctttggagtgcagtgggtgcgcccctgaccactgctgctgattagggttttttaaattttattttattttatttaagttcaagagaaaaagtgtacacacaggggccacccggggttggggtgggagtgtggtggggggtagtggtggcaggacaagagaaggcattgagctttttctttcattttcctattaaaaaatacaaaaatca

SEQ ID NO: 3485 - DNA, 572 bp, Homo sapiens
  source 1..572: mol_type = unassigned DNA; mol_type = unassigned DNA
tttttgaccttcctgtttcctggaactcagccatggtggtgtgtcactttgtactttgcagacaagggcatcacctttgatgtgtcggaggcacttcagtgaaagaattttggctcctaaagattttgcagaacagagatgacatgccagcccagactttcatttccaggaggccatgaattctgggaggacaccgttaacccactacagccatcgagaacagcagcaggaggctggatgcggtggctcacacctgtcatcccggcactttgggggacctacgcagcaggatcgcttgagcccagatgtttgagaccagcctgcgctccgcgcccccatcgcccctcctgcgctagcggaggtgatcgccgcggcgatgccggaggagggttcgggctgctcggtgcggcgcaggccctatgggtgcgtcctgcgggctgctttggtcccattggtcgcgggcttggtgatctgcctcgtggtgtgcatccagcgcttcgcacaggctcagcagcagctgccgctcgagtcacttgggtgggacgtagctgagctgcagctgaatcacacag

SEQ ID NO: 3486 - DNA, 1138 bp, Homo sapiens
  source 1..1138: mol_type = unassigned DNA; mol_type = unassigned DNA
ccggggggtcagggtcccagatgcacaggaggagaagcaggagctgtcgggaagatcagaagccagtcatggatgaccagcgcgaccttatctccaacaatgagcaactgcccatgctgggccggcgccctggggccccggagagcaagtgcagccgcggagccctgtacacaggcttttccatcctggtgactctgctcctcgctggccaggccaccaccgcctacttcctgtaccagcagcagggccggctggacaaactgacagtcacctcccagaacctgcagctggagaacctgcgcatgaagcttcccaagcctcccaagcctgtgagcaagatgcgcatggccaccccgctgctgatgcaggcgctgcccatgggagccctgccccaggggcccatgcagaatgccaccaagtatggcaacatgacagaggaccatgtgatgcacctgctccagagtcactggaactggaggacccgtcttctgggctgggtgtgaccaagcaggatctgggcccagtccccatgtgagagcagcagaggcggtcttcaacatcctgccagccccacacagctacagctttcttgctcccttcagcccccagcccctcccccatctcccaccctgtacctcatcccatgagaccctggtgcctggctctttcgtcacccttggacaagacaaaccaagtcggaacagcagataacaatgcagcaaggccctgctgcccaatctccatctgtcaacaggggcgtgaggtcccaggaagtggccaaaagctagacagatccccgttcctgacatcacagcagcctccaacacaaggctccaagacctaggctcatggacgagatgggaaggcacagggagaagggataaccctacacccagaccccaggctggacatgctgactgtcctctcccctccagcctttggccttggcttttctagcctatttacctgcaggctgagccactctcttccctttccccagcatcactccccaaggaagagccaatgttttccacccataatcctttctgccgacccctagttccctctgctcagccaagcttgttatcagctttcagggccatggttcacattagaataaaaggtagtaattagaaca

SEQ ID NO: 3487 - DNA, 1449 bp, Homo sapiens
  source 1..1449: mol_type = unassigned DNA; mol_type = unassigned DNA
gggagcccccccgccccacatcctgccccgcaaaaggcagcttcaccaaagtggggtatttccagcctttgtagctttcacttccacatctaccaagtgggcggagtggccttctgtggacgaatcagattcctctccagcaccgactttaagaggcgagccggggggtcagggtcccagatgcacaggaggagaagcaggagctgtcgggaagatcagaagccagtcatggatgaccagcgcgaccttatctccaacaatgagcaactgcccatgctgggccggcgccctggggccccggagagcaagtgcagccgcggagccctgtacacaggcttttccatcctggtgactctgctcctcgctggccaggccaccaccgcctacttcctgtaccagcagcagggccggctggacaaactgacagtcacctcccagaacctgcagctggagaacctgcgcatgaagcttcccaagcctcccaagcctgtgagcaagatgcgcatggccaccccgctgctgatgcaggcgctgcccatgggagccctgccccaggggcccatgcagaatgccaccaagtatggcaacatgacagaggaccatgtgatgcacctgctccagaatgctgaccccctgaaggtgtacccgccactgaaggggagcttcccggagaacctgagacaccttaagaacaccatggagaccatagactggaaggtctttgagagctggatgcaccattggctcctgtttgaaatgagcaggcactccttggagcaaaagcccactgacgctccaccgaaagagtcactggaactggaggacccgtcttctgggctgggtgtgaccaagcaggatctgggcccagtccccatgtgagagcagcagaggcggtcttcaacatcctgccagccccacacagctacagctttcttgctcccttcagcccccagcccctcccccatctcccaccctgtacctcatcccatgagaccctggtgcctggctctttcgtcacccttggacaagacaaaccaagtcggaacagcagataacaatgcagcaaggccctgctgcccaatctccatctgtcaacaggggcgtgaggtcccaggaagtggccaaaagctagacagatccccgttcctgacatcacagcagcctccaacacaaggctccaagacctaggctcatggacgagatgggaaggcacagggagaagggataaccctacacccagaccccaggctggacatgctgactgtcctctcccctccagcctttggccttggcttttctagcctatttacctgcaggctgagccactctcttccctttccccagcatcactccccaaggaagagccaatgttttccacccataatcctttctgccgacccctagttccctctgctcagccaagcttgttatcagctttcagggccatgg

SEQ ID NO: 3488 - DNA, 1727 bp, Homo sapiens
  source 1..1727: mol_type = unassigned DNA
caggagctgtcgggaagatcagaagccagtcatggatgaccagcgcgaccttatctccaacaatgagcaactgcccatgctgggccggcgccctggggccccggagagcaagtgcagccgcggagccctgtacacaggcttttccatcctggtgactctgctcctcgctggccaggccaccaccgcctacttcctgtaccagcagcagggccggctggacaaactgacagtcacctcccagaacctgcagctggagaacctgcgcatgaagcttcccaagcctcccaagcctgtgagcaagatgcgcatggccaccccgctgctgatgcaggcgctgcccatgggagccctgccccaggggcccatgcagaatgccaccaagtatggcaacatgacagaggaccatgtgatgcacctgctccagaatgctgaccccctgaaggtgtacccgccactgaaggggagcttcccggagaacctgagacaccttaagaacaccatggagaccatagactggaaggtctttgagagctggatgcaccattggctcctgtttgaaatgagcaggcactccttggagcaaaagcccactgacgctccaccgaaagtactgaccaagtgccaggaagaggtcagccacatccctgctgtccacccgggttcattcaggcccaagtgcgacgagaacggcaactatctgccactccagtgctatgggagcatcggctactgctggtgtgtcttccccaacggcacggaggtccccaacaccagaagccgcgggcaccataactgcagtgagtcactggaactggaggacccgtcttctgggctgggtgtgaccaagcaggatctgggcccaggtaagggccttgcagaggggcatctggtcaccagcagctcatccccagcagggccagctcctttgtgggcaggtgaaggagtgtgacgctgggccactctccaacattcctgggatgtccatttcacagacgaaggaacagggttggggggctgtggggagttacacaaatccatgatggtcattattggacctgagcagggggcaggggagggtggacagtccttaactgctctgcaggtccaggatgttagaaaggggcagggacaacaaatgggtgaccccaacctcaacctgctgcttctctctccagtccccatgtgagagcagcagaggcggtcttcaacatcctgccagccccacacagctacagctttcttgctcccttcagcccccagcccctcccccatctcccaccctgtacctcatcccatgagaccctggtgcctggctctttcgtcacccttggacaagacaaaccaagtcggaacagcagataacaatgcagcaaggccctgctgcccaatctccatctgtcaacaggggcgtgaggtcccaggaagtggccaaaagctagacagatccccgttcctgacatcacagcagcctccaacacaaggctccaagacctaggctcatggacgagatgggaaggcacagggagaagggataaccctacacccagaccccaggctggacatgctgactgtcctctcccctccagcctttggccttggcttttctagcctatttacctgcaggctgagccactctcttccctttccccagcatcactccccaaggaagagccaatgttttccacccataatcctttctgccgacccctagttccctctgctcagcc

SEQ ID NO: 3489 - DNA, 584 bp, Homo sapiens
  source 1..584: mol_type = unassigned DNA
agatgcacaggaggagaagcaggagctgtcgggaagatcagaagccagtcatggatgaccagcgcgaccttatctccaacaatgagcaactgcccatgctgggccggcgccctggggccccggagagcaagtgcagccgcggagccctgtacacaggcttttccatcctggtgactctgctcctcgctggccaggccaccaccgcctacttcctgtaccagcagcagggccggctggacaaactgacagtcacctcccagaacctgcagctggagaacctgcgcatgaagcttcccaagcctcccaagcctgtgagcaagatgcgcatggccaccccgctgctgatgcaggcgctgcccatgggagccctgccccaggggcccatgcagaatgccaccaagtatggcaacatgacagaggaccatgtgatgcacctgctccaggaagtggccaaaagctagacagatccccgttcctgacatcacagcagcctccaacacaaggctccaagacctaggctcatggacgagatgggaaggcacagggagaagggataaccctacacccagaccccaggctggaca

SEQ ID NO: 3490 - DNA, 981 bp, Homo sapiens
  source 1..981: mol_type = unassigned DNA
agatgcacaggaggagaagcaggagctgtcgggaagatcagaagccagtcatggatgaccagcgcgaccttatctccaacaatgagcaactgcccatgctgggccggcgccctggggccccggagagcaagtgcagccgcggagccctgtacacaggcttttccatcctggtgactctgctcctcgctggccaggccaccaccgcctacttcctgtaccagcagcagggccggctggacaaactgacagtcacctcccagaacctgcagctggagaacctgcgcatgaagcttcccaagcctcccaagcctgtgagcaagatgcgcatggccaccccgctgctgatgcaggcgctgcccatgggagccctgccccaggggcccatgcagaatgccaccaagtatggcaacatgacagaggaccatgtgatgcacctgctccagaatgctgaccccctgaaggtgtacccgccactgaaggggagcttcccggagaacctgagacaccttaagaacaccatggagaccatagactggaaggtctttgagagctggatgcaccattggctcctgtttgaaatgagcaggcactccttggagcaaaagcccactgacgctccaccgaaagtactgaccaagtgccaggaagaggtcagccacatccctgctgtccacccgggttcattcaggcccaagtgcgacgagaacggcaactatctgccactccagtgctatgggagcatcggctactgctggtgtgtcttccccaacggcacggaggtccccaacaccagaagccgcgggcaccataactgcagtgagtcactggaactggaggacccgtcttctgggctgggtgtgaccaagcaggatctgggcccagtccccatgtgagagcagcagaggcggtcttcaacatcctgccagccccacacagctacagctttcttgctcccttcagcccccagcccctcccccatct

SEQ ID NO: 3491 - DNA, 767 bp, Homo sapiens
  source 1..767: mol_type = unassigned DNA
ggagaagcaggagctgtcgggaagatcagaagccagtcatggatgaccagcgcgaccttatctccaacaatgagcaactgcccatgctgggccggcgccctggggccccggagagcaagtgcagccgcggagccctgtacacaggcttttccatcctggtgactctgctcctcgctggccaggccaccaccgcctacttcctgtaccagcagcagggccggctggacaaactgacagtcacctcccagaacctgcagctggagaacctgcgcatgaagcttcccaagcctcccaagcctgtgagcaagatgcgcatggccaccccgctgctgatgcaggcgctgcccatgggagccctgccccaggggcccatgcagaatgccaccaagtatggcaacatgacagaggaccatgtgatgcacctgctccagtactgaccaagtgccaggaagaggtcagccacatccctgctgtccacccgggttcattcaggcccaagtgcgacgagaacggcaactatctgccactccagtgctatgggagcatcggctactgctggtgtgtcttccccaacggcacggaggtccccaacaccagaagccgcgggcaccataactgcagtgagtcactggaactggaggacccgtcttctgggctgggtgtgaccaagcaggatctgggcccagtccccatgtgagagcagcagaggcggtcttcaacatcctgccagccccacacagctacagctttcttgctcccttcagccc

SEQ ID NO: 3492 - DNA, 816 bp, Homo sapiens
  source 1..816: mol_type = unassigned DNA
cacaggaggagaagcaggagctgtcgggaagatcagaagccagtcatggatgaccagcgcgaccttatctccaacaatgagcaactgcccatgctgggccggcgccctggggccccggagagcaagtgcagccgcggagccctgtacacaggcttttccatcctggtgactctgctcctcgctggccaggccaccaccgcctacttcctgtaccagcagcagggccggctggacaaactgacagtcacctcccagaacctgcagctggagaacctgcgcatgaagcttcccaagcctcccaagcctgtgagcaagatgcgcatggccaccccgctgctgatgcaggcgctgcccatgggagccctgccccaggggcccatgcagaatgccaccaagtatggcaacatgacagaggaccatgtgatgcacctgctccagaatgctgaccccctgaaggtgtacccgccactgaaggggagcttcccggagaacctgagacaccttaagaacaccatggagaccatagactggaaggtctttgagagctggatgcaccattggctcctgtttgaaatgagcaggcactccttggagcaaaagcccactgacgctccaccgaaaggtacagggagtgggagctttagcgtgccagggcttctggaccctcggggctctcctgaagctgctgaggccggggcctccagcactccctggtcccagcaccgcggaatctcccatcctctcagctctcacttctttctcacttctctctctctcctgtctgttccttcttggtttggctgtccccctcccctg

SEQ ID NO: 3493 - DNA, 563 bp, Homo sapiens
  source 1..563: mol_type = unassigned DNA
agatgcacaggaggagaagcaggagctgtcgggaagatcagaagccagtcatggatgaccagcgcgaccttatctccaacaatgagcaactgcccatgctgggccggcgccctggggccccggagagcaagtgcagccgcggagccctgtacacaggcttttccatcctggtgactctgctcctcgctggccaggccaccaccgcctacttcctgtaccagcagcagggccggctggacaaactgacagtcacctcccagaacctgcagctggagaacctgcgcatgaagcttcccaagccccatgcagaatgccaccaagtatggcaacatgacagaggaccatgtgatgcacctgctccagaatgctgaccccctgaaggtgtacccgccactgaaggggagcttcccggagaacctgagacaccttaagaacaccatggagaccatagactggaaggtctttgagagctggatgcaccattggctcctgtttgaaatgagcaggcactccttggagcaaaagcccactgacgctccaccgaaaggtacagggagtgggag

SEQ ID NO: 3494 - DNA, 546 bp, Homo sapiens
  source 1..546: mol_type = unassigned DNA
agatgcacaggaggagaagcaggagctgtcgggaagatcagaagccagtcatggatgaccagcgcgaccttatctccaacaatgagcaactgcccatgctgggccggcgccctggggccccggagagcccatgcagaatgccaccaagtatggcaacatgacagaggaccatgtgatgcacctgctccagcactgtgcaaggctctgggcccacaatggggagcaattggacccagctcctgaagccatggggatcccaggctagtgtgggagacagacaagtgaccaggtgatgacagaagtgcagggggctttgtgaagaaagaggcagaggactcaacctagctgggggcagtcaaggttgggtcctcacctgctggagcaggtaagacctgaaagctgagcagccatccacagggaggacactggggcttgttggtagagctggcctggaatctggaactcgactcgcaacgctgcagtctcgtagctgaacagctggactacccttacccgtaccctcccctcccctcccatcatggctga

SEQ ID NO: 3495 - DNA, 724 bp, Homo sapiens
  source 1..724: mol_type = unassigned DNA; mol_type = unassigned DNA
agatgcacaggaggagaagcaggagctgtcgggaagatcagaagccagtcatggatgaccagcgcgaccttatctccaacaatgagcaactgcccatgctgggccggcgccctggggccccggagagcaagtgcagccgcggagccctgtacacaggcttttccatcctggtgactctgctcctcgctggccaggccaccaccgcctacttcctgtaccagcagcagggccggctggacaaactgacagtcacctcccagaacctgcagctggagaacctgcgcatgaagcttcccaagcctcccaagcctgtgagcaagatgcgcatggccaccccgctgctgatgcaggcgctgcccatgggagccctgccccaggggcccatgcagaatgccaccaagtatggcaacatgacagaggaccatgtgatgcacctgctccaggtgagtgcagggagctagctgggtggtcctgcctgcccacccaggaccctggccgggccaagctccaaggcctgtatacctggctcatggcagactttcaacatgtgctctctggattactgaatacaagggtgacccttaaatgttatatgtagtctggcctctgcatttttgagataaacaggctcggctgggtgcagtggctcatgcctgtaatctcagcactttgggaggcctaggcaggcagatcacctgaggccaggagttcgagaccagcctgg

SEQ ID NO: 3496 - DNA, 1015 bp, Homo sapiens
  source 1..1015: mol_type = unassigned DNA; mol_type = unassigned DNA
acatcctgccccgcaaaaggcagcttcaccaaagtggggtatttccagcctttgtagctttcacttccacatctaccaagtgggcggagtggccttctgtggacgaatcagattcctctccagcaccgactttaagaggcgagccggggggtcagggtcccagatgcacaggaggagaagcaggagctgtcgggaagatcagaagccagtcatggatgaccagcgcgaccttatctccaacaatgagcaactgcccatgctgggccggcgccctggggccccggagagcaagtgcagccgcggagccctgtacacaggcttttccatcctggtgactctgctcctcgctggccaggccaccaccgcctacttcctgtaccagcagcagggccggctggacaaactgacagtcacctcccagaacctgcagctggagaacctgcgcatgaagcttcccaagcgtgcgtgcacccctacatcctgataccccccacctcccaccatccctcaactcagagacccgcatccctgcacccagctgggcccactgtcctctccctccggtttggaattccagcccttcctcatctgggtctgataccctcctccctgggcaccggggccacacttaccctcgttcctgtccccacagctcccaagcctgtgagcaagatgcgcatggccaccccgctgctgatgcaggcgctgcccatgggagccctgccccaggggcccatgcagaatgccaccaagtatggcaacatgacagaggaccatgtgatgcacctgctccaggtgagtgcagggagctagctgggtggtcctgcctgcccacccaggaccctggccgggccaagctccaaggcctgtatacctggctcatggcagactttcaacatgtgctctctggattactgaatacaagggtgacccttaaatgttatatgtagtctggcctctgcatttttgagataaacaggctcggctgggtgcagtggctcatgcctgtaatctc

SEQ ID NO: 3497 - DNA, 556 bp, Homo sapiens
  source 1..556: mol_type = unassigned DNA; mol_type = unassigned DNA
agatgcacaggaggagaagcaggagctgtcgggaagatcagaagccagtcatggatgaccagcgcgaccttatctccaacaatgagcaactgcccatgctgggccggcgccctggggccccggagagcaagtgcagccgcggagccctgtacacaggcttttccatcctggtgactctgctcctcgctggccaggccaccaccgcctacttcctgtaccagcagcagggccggctggacaaactgacagtcacctcccagaacctgcagctggagaacctgcgcatgaagcttcccaagcctcccaagcctgtgagcaagatgcgcatggccaccccgctgctgatgcaggcgctgcccatgggagccctgccccagggggtaaggacagccccagggtggtgggaggggcaaggttatcccgcctggatggaggacagtgccaaggggaggggcagggaagagagcccacctggggaggggtcctgactgctgcgggagggacagtgcctgcctcaggaagaatcgggctccccaggtgtggagggcacaggtga

SEQ ID NO: 3498 - DNA, 538 bp, Homo sapiens
  source 1..538: mol_type = unassigned DNA; mol_type = unassigned DNA
gtgagaggacattgtgataatggaagtgaaagagctttgtcagctgcacaggtgaatgcccctggtcattaaccagagtcctccctgctgctgtgtggacgacacgtgggcacaggcagaagtgggccctgtgaccagctgcactggtttcgtggaaggaagctccaggactggcgggatgggctcagcctgtatcaaagtcaccaaatactttctcttcctcttcaacttgatcttctttatcctgggcgcagtgatcctgggcttcggggtgtggatcctggccgacaagagcagtttcatctctgtcctgcaaacctcctccagctcgcttaggatgggggcctatgtcttcatcggcgtgggggcagtcactatgctcatgggcttcctgggctgcatcggcgccgtcaacgaggtccgctgcctgctggggctgtactttgctttcctgctcctgatcctcattgcccaggtgacggccggggccctcttctacttcaacatgggcaagctgaagcaggagatgggcggcatc

SEQ ID NO: 3499 - DNA, 2289 bp, Homo sapiens
  source 1..2289: mol_type = unassigned DNA; mol_type = unassigned DNA
ggcctgccgagtccgcggcgttccccggctgcagccgggagggggccgaggagtgactgagccccgggctgtgcagtccgacgccgactgaggcacgagcgggtgacgctgggcctgcagcgcggagcagaaagcagaacccgcagagtcctccctgctgctgtgtggacgacacgtgggcacaggcagaagtgggccctgtgaccagctgcactggtttcgtggaaggaagctccaggactggcgggatgggctcagcctgtatcaaagtcaccaaatactttctcttcctcttcaacttgatcttctttatcctgggcgcagtgatcctgggcttcggggtgtggatcctggccgacaagagcagtttcatctctgtcctgcaaacctcctccagctcgcttaggatgggggcctatgtcttcatcggcgtgggggcagtcactatgctcatgggcttcctgggctgcatcggcgccgtcaacgaggtccgctgcctgctggggctgtactttgctttcctgctcctgatcctcattgcccaggtgacggccggggccctcttctacttcaacatgggcaagctgaagcaggagatgggcggcatcgtgactgagctcattcgagactacaacagcagtcgcgaggacagcctgcaggatgcctgggactacgtgcaggctcaggtgaagtgctgcggctgggtcagcttctacaactggacagacaacgctgagctcatgaatcgccctgaggtcacctacccctgttcctgcgaagtcaagggggaagaggacaacagcctttctgtgaggaagggcttctgcgaggcccccggcaacaggacccagagtggcaaccaccctgaggactggcctgtgtaccaggagggctgcatggagaaggtgcaggcgtggctgcaggagaacctgggcatcatcctcggcgtgggcgtgggtgtggccatcatcgagctcctggggatggtcctgtccatctgcttgtgccggcacgtccattccgaagactacagcaaggtccccaagtactgaggcagctgctatccccatctccctgcctggcccccaacctcagggctcccaggggtctccctggctccctcctccaggcctgcctcccacttcactgcgaagaccctcttgcccatcctgactgaaagtagggggctttctggggcctagcgatctctcctggcctatccgctgccagccttgagccctggctgttctgtggttcctctgctcaccgcccatcagggttctcttagcaactcagagaaaaatgctccccacagcgtccctggcgcaggtgggctggacttctacctgccctcaagggtgtgtatattgtataggggcaactgtatgaaaaattggggaggagggggccgggcgcggtggctcacgcctgtaatcccagcactttgggaggccgaggcgggtggatcacgaggtcaggagatcgagaccatcctggctaacatggtgaaaccccgtctctactaaaaatacaaaaaaaatttagccgggcgcggtggcgggcacctgtagtcccagctacttgggaggctgaggcaggagaatggtgtgaacccgggagcggaggttgcagtgagctgagatcgtgctactgcactccagcctgggggacagaaagagactccgtctcaaaaaaaaaaaaaaaaaaaaaaaaaattggggagggaagggcgttagataaggcactctgggctgtcaggagactgcctactgggtgggtcaacttatttcccactatgacatttatatctttatttttcacaattatattgaaggcagtgggagaggggagagggtgggttttacctgatattaaggggtggcaccccttccccaggcctgatgcaggtccatctagacagctcagattagcctaggccatgccctagggacacggcctaggggagctgggctggagggggtctgcctgggtaaggggatctggcttggccctgagctgcttagggacaggtgagtccttgggggcatggcacagagctggtcctgtattctccagggtccggagctggccaggggcggggaggaggaggatggcttctcctgggagaaggtgggctggcctttcttggcaagcggtcctctggcccctggggagtggggtgggtgaggctgtgccttgtagggggagaggggagggggctttgtgtgcaccattctgtaaaacacactcaagattctaagactattaaagaggatttataacagtcta

SEQ ID NO: 3500 - DNA, 967 bp, Homo sapiens
  source 1..967: mol_type = unassigned DNA; mol_type = unassigned DNA
gtccgcggcgttccccggctgcagccgggagggggccgaggagtgactgagccccgggctgtgcagtccgacgccgactgaggcacgagcgggtgacgctgggcctgcagcgcggagcagaaagcagaacccgcagagtcctccctgctgctgtgtggacgacacgtgggcacaggcagaagtgggccctgtgaccagctgcactggtttcgtggaaggaagctccaggactggcgggatgggctcagcctgtatcaaagtcaccaaatactttctcttcctcttcaacttgatcttctttatcctgggcgcagtgatcctgggcttcggggtgtggatcctggccgacaagagcagtttcatctctgtcctgcaaacctcctccagctcgcttaggatgggggcctatgtcttcatcggcgtgggggcagtcactatgctcatgggcttcctgggctgcatcggcgccgtcaacgaggtccgctgcctgctggggctgctgaagcaggagatgggcggcatcgtgactgagctcattcgagactacaacagcagtcgcgaggacagcctgcaggatgcctgggactacgtgcaggctcaggtgaagtgctgcggctgggtcagcttctacaactggacagacaacgctgagctcatgaatcgccctgaggtcacctacccctgttcctgcgaagtcaagggggaagaggacaacagcctttctgtgaggaagggcttctgcgaggcccccggcaacaggacccagagtggcaaccaccctgaggactggcctgtgtaccaggagggctgcatggagaaggtgcaggcgtggctgcaggagaacctgggcatcatcctcggcgtgggcgtgggtgtggccatcatcgagctcctggggatggtcctgtccatctgcttgtgccggcacgtccattccgaagactacagcaaggtccccaagtactga

SEQ ID NO: 3501 - DNA, 580 bp, Homo sapiens
  source 1..580: mol_type = unassigned DNA; mol_type = unassigned DNA
gagtgactgagccccgggctgtgcagtccgacgccgactgaggcacgagcgggtgacgctgggcctgcagcgcggagcagaaagcagaacccgcagttcaactgagccggaccccctaagacttcaagttggaaactcagtggggcttttccagagtcctccctgctgctgtgtggacgacacgtgggcacaggcagaagtgggccctgtgaccagctgcactggtttcgtggaaggaagctccaggactggcgggatgggctcagcctgtatcaaagtcaccaaatactttctcttcctcttcaacttgatcttctttatcctgggcgcagtgatcctgggcttcggggtgtggatcctggccgacaagagcagtttcatctctgtcctgcaaacctcctccagctcgcttaggatgggggcctatgtcttcatcggcgtgggggcagtcactatgctcatgggcttcctgggctgcatcggcgccgtcaacgaggtccgctgcctgctggggctgtactttgctttcctgctcctgatcctcattgcccaggtgacggccggggccctcttctacttc

SEQ ID NO: 3502 - DNA, 582 bp, Homo sapiens
  source 1..582: mol_type = unassigned DNA; mol_type = unassigned DNA
agtgactgagccccgggctgtgcagtccgacgccgactgaggcacgagcgggtgacgctgggcctgcagcgcggagcagaaagcagaacccgcagagtcctccctgctgctgtgtggacgacaccctttctgtgaggaagggcttctgcgaggcccccggcaacaggacccagagtggcaaccaccctgaggactggcctgtgtaccaggagggctgcatggagaaggtgcaggcgtggctgcaggagaacctgggcatcatcctcggcgtgggcgtgggtgtggccatcatcgagctcctggggatggtcctgtccatctgcttgtgccggcacgtccattccgaagactacagcaaggtccccaagtactgaggcagctgctatccccatctccctgcctggcccccaacctcagggctcccaggggtctccctggctccctcctccaggcctgcctcccacttcactgcgaagaccctcttgcccatcctgactgaaagtagggggctttctggggcctagcgatctctcctggcctatccgctgccagccttgagccctggctgttctgtggttcctc

SEQ ID NO: 3503 - DNA, 468 bp, Homo sapiens
  source 1..468: mol_type = unassigned DNA; mol_type = unassigned DNA
gcagtccgacgccgactgaggcacgagcgggtgacgctgggcctgcagcgcggagcagaaagcagaacccgcagagtcctccctgctgctgtgtggacgacacgtgggcacaggcagaagtgggccctgtgaccagctgcactggtttcgtggaagcatttagagtcctggagtgctggtccctggggaggctcggcagcaggtcctggcattcagagctggcccagggttgagcacctgacacacccccaacctgccctgcgggcaaggacagaagaggcctgagaaccgtctcttcggactcaggggcagtggaactcagactgccttcaggaagctccaggactggcgggatgggctcagcctgtatcaaagtcaccaaatactttctcttcctcttcaacttgatcttctttatcctgggcgcagtgatcctgggcttcggggtgtggatcctggccgacaaga

SEQ ID NO: 3504 - DNA, 1405 bp, Homo sapiens
  source 1..1405: mol_type = unassigned DNA; mol_type = unassigned DNA
tccgacgccgactgaggcacgagcgggtgacgctgggcctgcagcgcggagcagaaagcagaacccgcagagtcctccctgctgctgtgtggacgacacgtgggcacaggcagaagtgggccctgtgaccagctgcactggtttcgtggaaggaagctccaggactggcgggatgggctcagcctgtatcaaagtcaccaaatactttctcttcctcttcaacttgatcttctttatcctgggcgcagtgatcctgggcttcggggtgtggatcctggccgacaagagcagtttcatctctgtcctgcaaacctcctccagctcgcttaggatgggggcctatgtcttcatcggcgtgggggcagtcactatgctcatgggcttcctgggctgcatcggcgccgtcaacgaggtccgctgcctgctggggctggtgagtacggatccctccgcagctgcctgcccatttcctctcatccagccgagtgcagcctgaccgcggcgctggccgtaacatcgggtggagagcatctctcggggcacgcaggctgggtgcacctggtcggggaccctcagctgactttgtgcctgctctgtgtccccagtactttgctttcctgctcctgatcctcattgcccaggtgacggccggggccctcttctacttcaacatgggcaagctgaagcaggagatgggcggcatcgtgactgagctcattcgagactacaacagcagtcgcgaggacagcctgcaggatgcctgggactacgtgcaggctcaggtgaagtgctgcggctgggtcagcttctacaactggacagacaacgctgagctcatgaatcgccctgaggtcacctacccctgttcctgcgaagtcaagggggaagaggacaacagcctttctgtgaggaagggcttctgcgaggcccccggcaacaggacccagagtggcaaccaccctgaggactggcctgtgtaccaggagggctgcatggagaaggtgcaggcgtggctgcaggagaacctgggcatcatcctcggcgtgggcgtgggtgtggccatcatcgagctcctggggatggtcctgtccatctgcttgtgccggcacgtccattccgaagactacagcaaggtccccaagtactgaggcagctgctatccccatctccctgcctggcccccaacctcagggctcccaggggtctccctggctccctcctccaggcctgcctcccacttcactgcgaagaccctcttgcccatcctgactgaaagtagggggctttctggggcctagcgatctctcctggcctatccgctgccagccttgagccctggctgttctgtggttcctctgctcaccgcccatcagggttctcttagcaactcagagaaaaatgctcc

SEQ ID NO: 3505 - DNA, 654 bp, Homo sapiens
  source 1..654: mol_type = unassigned DNA; mol_type = unassigned DNA
gaggcacgagcgggtgacgctgggcctgcagcgcggagcagaaagcagaacccgcagccccttacccaggagcagcagtggtcatcttctggcacggagcctctccaggatgggcacatggctagagactggatcaggcctcagagggcttcagactgttggtcaggaaagcaacaacttttccagatcatcatcatcatcatcataagtcctccctgctgctgtgtggacgacacgtgggcacaggcagaagtgggccctgtgaccagctgcactggtttcgtggaaggaagctccaggactggcgggatgggctcagcctgtatcaaagtcaccaaatactttctcttcctcttcaacttgatcttctttatcctgggcgcagtgatcctgggcttcggggtgtggatcctggccgacaagagcagtttcatctctgtcctgcaaacctcctccagctcgcttaggatgggggcctatgtcttcatcggcgtgggggcagtcactatgctcatgggcttcctgggctgcatcggcgccgtcaacgaggtccgctgcctgctggggctgtactttgctttcctgctcctgatcctcattgcccaggtgacggccggggccctcttctacttcaacatgggcaaggtaagcccc

SEQ ID NO: 3506 - DNA, 584 bp, Homo sapiens
  source 1..584: mol_type = unassigned DNA
agcagaacccgcaggtgagcaagggggcagcgggccggggtagcctgccggacaaccataggcaaagttagttttagcccccgcttctgcggtccggctcggacaactttcctcggaactagtgacaggtcggggcagctggtgggtgaaaaggagctttagccaccagtcctgaacccccagttctcacactcggccgtgcacagctgcgtgatcctgggtccgtccctctacctggctctggacctcccgggttccagcaggaggaagtgaaccagagtcctccctgctgctgtgtggacgacacgtgggcacaggcagaagtgggccctgtgaccagctgcactggtttcgtggaaggaagctccaggactggcgggatgggctcagcctgtatcaaagtcaccaaatactttctcttcctcttcaacttgatcttctttatcctgggcgcagtgatcctgggcttcggggtgtggatcctggccgacaagagcagtttcatctctgtcctgcaaacctcctccagctcgcttaggatgggggcctatgtcttcatcggcgtgggggcagtcactatgctc

SEQ ID NO: 3507 - DNA, 573 bp, Homo sapiens
  source 1..573: mol_type = unassigned DNA; mol_type = unassigned DNA
aagcctcccagggcgtggcgtgaagcggggatttggtaggggagcgcagagcgaggcctgaggtgtttccctggcagaggtccctccactgggaaacaaacggagaggggagtatgtgttcccacgtgtacacataaaccgttttgaatgatacctgagtcctccctgctgctgtgtggacgacacgtgggcacaggcagaagtgggccctgtgaccagctgcactggtttcgtggaaggaagctccaggactggcgggatgggctcagcctgtatcaaagtcaccaaatactttctcttcctcttcaacttgatcttctttatcctgggcgcagtgatcctgggcttcggggtgtggatcctggccgacaagagcagtttcatctctgtcctgcaaacctcctccagctcgcttaggatgggggcctatgtcttcatcggcgtgggggcagtcactatgctcatgggcttcctgggctgcatcggcgccgtcaacgaggtccgctgcctgctggggctgtactttgctttcctgctcctgatcctcattgcccaggtgacggccggggccct

SEQ ID NO: 3508 - DNA, 679 bp, Homo sapiens
  source 1..679: mol_type = unassigned DNA; mol_type = unassigned DNA
tctggcagagaaacccttttgcaaaggccctcaggtaggtataaggacctggggcctgatataccaggacaacaggaaagaggctacatgagcctgtggggggaagaggacagaggaatggcaaccctggcggggccccgccggccacacggggagcctggatttaaagtgagtatgtcttcagccacattgcctttggagagtcacagacaggagtgacgagatctgggtcgtgtttttcagagtcctccctgctgctgtgtggacgacacgtgggcacaggcagaagtgggccctgtgaccagctgcactggtttcgtggaaggaagctccaggactggcgggatgggctcagcctgtatcaaagtcaccaaatactttctcttcctcttcaacttgatcttctttgtaagtatgtcccatgccgtcctgaccacctccgaaaagattctccttccaggggcatcccagcctgagcctttccagagccgaccgggccggggattggggggatttggtgggtagggactgaggacgaactatctccaacggaacctagttggggtggtgaggagattccctgccattcccagctggtcctttgaccaagcactggattcctgacccggccttcccctctcctagatcacccaaagcctgggctggcggtgggtatggg

SEQ ID NO: 3509 - DNA, 581 bp, Homo sapiens
  source 1..581: mol_type = unassigned DNA; mol_type = unassigned DNA
agtgggcttccatcaaataactactcaaatgcatgaaaaattgcagttgttgggggtactaggaacagataggctcttcggaaagcagatgaggctcttggcctggtcatggagatcctgggcgcagtgatcctgggcttcggggtgtggatcctggccgacaagagcagtttcatctctgtcctgcaaacctcctccagctcgcttaggatgggggcctatgtcttcatcggcgtgggggcagtcactatgctcatgggcttcctgggctgcatcggcgccgtcaacgaggtccgctgcctgctggggctgtactttgctttcctgctcctgatcctcattgcccaggtgacggccggggccctcttctacttcaacatgggcaagctgaagcaggagatgggcggcatcgtgactgagctcattcgagactacaacagcagtcgcgaggacagcctgcaggatgcctgggactacgtgcaggctcaggtgaagtgctgcggctgggtcagcttctacaactggacagacaacgctgagctcatgaatcgccctgaggtcacctacccctgttcctgcga

SEQ ID NO: 3510 - DNA, 891 bp, Homo sapiens
  source 1..891: mol_type = unassigned DNA; mol_type = unassigned DNA
atggccatgctagtgcctgccaggcagggtgatgtcagagttggagacggcgtgtggaaagcccatgaggcacaaaacctcctccagctcgcttaggatgggggcctatgtcttcatcggcgtgggggcagtcactatgctcatgggcttcctgggctgcatcggcgccgtcaacgaggtccgctgcctgctggggctgtactttgctttcctgctcctgatcctcattgcccaggtgacggccggggccctcttctacttcaacatgggcaagctgaagcaggagatgggcggcatcgtgactgagctcattcgagactacaacagcagtcgcgaggacagcctgcaggatgcctgggactacgtgcaggctcaggtgaagtgctgcggctgggtcagcttctacaactggacagacaacgctgagctcatgaatcgccctgaggtcacctacccctgttcctgcgaagtcaagggggaagaggacaacagcctttctgtgaggaagggcttctgcgaggcccccggcaacaggacccagagtggcaaccaccctgaggactggcctgtgtaccaggagggctgcatggagaaggtgcaggcgtggctgcaggagaacctgggcatcatcctcggcgtgggcgtgggtgtggccatcatcgagctcctggggatggtcctgtccatctgcttgtgccggcacgtccattccgaagactacagcaaggtccccaagtactgaggcagctgctatccccatctccctgcctggcccccaacctcagggctcccaggggtctccctggctccctcctccaggcctgcctcccacttcactgcgaagaccctcttgcccatcctgactgaaagtagggggctttctggggccta

SEQ ID NO: 3511 - DNA, 757 bp, Homo sapiens
  source 1..757: mol_type = unassigned DNA; mol_type = unassigned DNA
gacaacagcctttctgtgaggaagggcttctgcgaggcccccggcaacaggacccagagtggcaaccaccctgaggactggcctgtgtaccaggagctcctggggatggtcctgtccatctgcttgtgccggcacgtccattccgaagactacagcaaggtccccaagtactgaggcagctgctatccccatctccctgcctggcccccaacctcagggctcccaggggtctccctggctccctcctccaggcctgcctcccacttcactgcgaagaccctcttgcccatcctgactgaaagtagggggctttctggggcctagcgatctctcctggcctatccgctgccagccttgagccctggctgttctgtggttcctctgctcaccgcccatcagggttctcttagcaactcagagaaaaatgctccccacagcgtccctggcgcaggtgggctggacttctacctgccctcaagggtgtgtatattgtataggggcaactgtatgaaaaattggggaggagggggccgggcgcggtggctcacgcctgtaatcccagcactttgggaggccgaggcgggtggatcacgaggtcaggagatcgagaccatcctggctaacatggtgaaaccccgtctctactaaaaatacaaaaaaaatttagccgggcgcggtggcgggcacctgtagtcccagctacttgggaggctgaggcaggagaatggtgtgaacccgggagcggaggttgcagtga

SEQ ID NO: 3512 - DNA, 2471 bp, Homo sapiens
  source 1..2471: mol_type = unassigned DNA; mol_type = unassigned DNA
gcgccccggcctaagcgggactaggagggcgcgccacccgcttccgctgcccgccggggaatcccccgggctggcgcgcagggaagttcccgaacgcgcgggcataaaagggcagccggcgcccgcgcgccacagctctgcagctcgtggcagcggcgcagcgctccagccatgtcgcgcggcctccagcttctgctcctgagctgcgcctacagcctggctcccgcgacgccggaggtgaaggtggcttgctccgaagatgtggacttgccctgcaccgccccctgggatccgcaggttccctacacggtctcctgggtcaagttattggagggtggtgaagagaggatggagacaccccaggaagaccacctcaggggacagcactatcatcagaaggggcaaaatggttctttcgacgcccccaatgaaaggccctattccctgaagatccgaaacactaccagctgcaactcggggacatacaggtgcactctgcaggacccggatgggcagagaaacctaagtggcaaggtgatcttgagagtgacaggatgccctgcacagcgtaaagaagagacttttaagaaatacagagcggagattgtcctgctgctggctctggttattttctacttaacactcatcattttcacttgtaagtttgcacggctacagagtatcttcccagatttttctaaagctggcatggaacgagcttttctcccagttacctccccaaataagcatttagggctagtgactcctcacaagacagaactggtatgagcaggatttctgcaggttcttcttcctgaagctgaggctcaggggtgtgcctgtctgttacactggaggagagaagaatgagcctacgctgaagatggcatcctgtgaagtccttcacctcactgaaaacatctggaaggggatcccaccccattttctgtgggcaggcctcgaaaaccatcacatgaccacatagcatgaggccactgctgcttctccatggccaccttttcagcgatgtatgcagctatctggtcaacctcctggacattttttcagtcatataaaagctatggtgagatgcagctggaaaagggtcttgggaaatatgaatgcccccagctggcccgtgacagactcctgaggacagctgtcctcttctgcatcttggggacatctctttgaattttctgtgttttgctgtaccagcccagatgttttacgtctgggagaaattgacagatcaagctgtgagacagtgggaaatatttagcaaataatttcctggtgtgaaggtcctgctattactaaggagtaatctgtgtacaaagaaataacaagtcgatgaactattccccagcagggtcttttcatctgggaaagacatccataaagaagcaataaagaagagtgccacatttatttttatatctatatgtacttgtcaaagaaggtttgtgtttttctgcttttgaaatctgtatctgtagtgagatagcattgtgaactgacaggcagcctggacatagagagggagaagaagtcagagagggtgacaagatagagagctatttaatggccggctggaaatgctgggctgacggtgcagtctgggtgctcgcccacttgtcccactatctgggtgcatgatcttgagcaagttccttctggtgtctgctttctccattgtaaaccacaaggctgttgcatgggctaatgaagatcatatacgtgaaaattatttgaaaacatataaagcactatacagattcgaaactccattgagtcattatccttgctatgatgatggtgttttggggatgagagggtgctatccatttctcatgttttccattgtttgaaacaaagaaggttaccaagaagcctttcctgtagccttctgtaggaattcttttggggaagtgaggaagccaggtccacggtctgttcttgaagcagtagcctaacacactccaagatatggacacacgggagccgctggcagaagggacttcacgaagtgttgcatggatgttttagccattgttggctttcccttatcaaacttgggcccttcccttcttggtttccaaaggcattttattgcttgagttatatgttcactgtccccctaatattagggagtaaaacggataccaagttgatttagtgtttttacctctgtcttggctttcatgttattaaacgtatgcatgtgaagaaagggtgtttttctgttttatattcaactcataagactttgggataggaaaaatgagtaatggttactaggcttaatacctgggtgattacataatctgtacaatgaacccccatgatgtaagtttacctatgtaacaaacctgcacttatacccatgaacttaaaatgaaagttaaaaataaaaaacatatacaaataaaaaaatcccgactttgggatgagtgctaggatgttgtaaa

SEQ ID NO: 3513 - DNA, 2307 bp, Homo sapiens
  source 1..2307: mol_type = unassigned DNA
gattatcacagattctggagaagagtgaggacttgggttcaccacctacagcctggctcccgcgacgccggaggtgaaggtggcttgctccgaagatgtggacttgccctgcaccgccccctgggatccgcaggttccctacacggtctcctgggtcaagttattggagggtggtgaagagaggatggagacaccccaggaagaccacctcaggggacagcactatcatcagaaggggcaaaatggttctttcgacgcccccaatgaaaggccctattccctgaagatccgaaacactaccagctgcaactcggggacatacaggtgcactctgcaggacccggatgggcagagaaacctaagtggcaaggtgatcttgagagtgacaggatgccctgcacagcgtaaagaagagacttttaagaaatacagagcggagattgtcctgctgctggctctggttattttctacttaacactcatcattttcacttgtaagtttgcacggctacagagtatcttcccagatttttctaaagctggcatggaacgagcttttctcccagttacctccccaaataagcatttagggctagtgactcctcacaagacagaactggtatgagcaggatttctgcaggttcttcttcctgaagctgaggctcaggggtgtgcctgtctgttacactggaggagagaagaatgagcctacgctgaagatggcatcctgtgaagtccttcacctcactgaaaacatctggaaggggatcccaccccattttctgtgggcaggcctcgaaaaccatcacatgaccacatagcatgaggccactgctgcttctccatggccaccttttcagcgatgtatgcagctatctggtcaacctcctggacattttttcagtcatataaaagctatggtgagatgcagctggaaaagggtcttgggaaatatgaatgcccccagctggcccgtgacagactcctgaggacagctgtcctcttctgcatcttggggacatctctttgaattttctgtgttttgctgtaccagcccagatgttttacgtctgggagaaattgacagatcaagctgtgagacagtgggaaatatttagcaaataatttcctggtgtgaaggtcctgctattactaaggagtaatctgtgtacaaagaaataacaagtcgatgaactattccccagcagggtcttttcatctgggaaagacatccataaagaagcaataaagaagagtgccacatttatttttatatctatatgtacttgtcaaagaaggtttgtgtttttctgcttttgaaatctgtatctgtagtgagatagcattgtgaactgacaggcagcctggacatagagagggagaagaagtcagagagggtgacaagatagagagctatttaatggccggctggaaatgctgggctgacggtgcagtctgggtgctcgcccacttgtcccactatctgggtgcatgatcttgagcaagttccttctggtgtctgctttctccattgtaaaccacaaggctgttgcatgggctaatgaagatcatatacgtgaaaattatttgaaaacatataaagcactatacagattcgaaactccattgagtcattatccttgctatgatgatggtgttttggggatgagagggtgctatccatttctcatgttttccattgtttgaaacaaagaaggttaccaagaagcctttcctgtagccttctgtaggaattcttttggggaagtgaggaagccaggtccacggtctgttcttgaagcagtagcctaacacactccaagatatggacacacgggagccgctggcagaagggacttcacgaagtgttgcatggatgttttagccattgttggctttcccttatcaaacttgggcccttcccttcttggtttccaaaggcattttattgcttgagttatatgttcactgtccccctaatattagggagtaaaacggataccaagttgatttagtgtttttacctctgtcttggctttcatgttattaaacgtatgcatgtgaagaaagggtgtttttctgttttatattcaactcataagactttgggataggaaaaatgagtaatggttactaggcttaatacctgggtgattacataatctgtacaatgaacccccatgatgtaagtttacctatgtaacaaacctgcacttatacccatgaacttaaaatgaaagttaaaaataaaaaacatatacaaataaaaaaatcccgactttgggatgagtgctaggatgttgtaaa

SEQ ID NO: 3514 - DNA, 1556 bp, Homo sapiens
  source 1..1556: mol_type = unassigned DNA
ctgcccagccctcagctgtgttattattcggtgataggtatttgctaattacttccaaaagcctcccatctgtcatcccacccagactgcgcgcttctaattcctcctaccccacatgctgtgcccaatgaaaagtatggtcagcgagcgaaggtttgcaaggagacagacgagggcgaaattaagccaggcggcttccctttaaatcctcgcaaagcagaagggcccctcactctggcagcaggccttggccaaggggcctttagccctgacgacccggggaagagtctcccaaagcagaacgcccggtccggcgcccagaccaaacgcgggggaaccggaagggcgaggcctccaccgccaggtcccgccagtcccagctgcgcgcgccccccagtcccgcacccgttcggcccaggctaagttagccctcaccatgccggtcaaaggaggcaccaagtgcatcaaatacctgctgttcggatttaacttcatcttctggcttgccgggattgctgtccttgccattggactatggctccgattcgactctcagaccaagagcatcttcgagcaagaaactaataataataattccagcttctacacaggagtctatattctgatcggagccggcgccctcatgatgctggtgggcttcctgggctgctgcggggctgtgcaggagtcccagtgcatgctgggactgttcttcggcttcctcttggtgatattcgccattgaaatagctgcggccatctggggatattcccacaaggatgaggtgattaaggaagtccaggagttttacaaggacacctacaacaagctgaaaaccaaggatgagccccagcgggaaacgctgaaagccatccactatgcgttgaactgctgtggtttggctgggggcgtggaacagtttatctcagacatctgccccaagaaggacgtactcgaaaccttcaccgtgaagtcctgtcctgatgccatcaaagaggtcttcgacaataaattccacatcatcggcgcagtgggcatcggcattgccgtggtcatgatatttggcatgatcttcagtatgatcttgtgctgtgctatccgcaggaaccgcgagatggtctagagtcagcttacatccctgagcaggaaagtttacccatgaagattggtgggattttttgtttgtttgttttgttttgtttgttgtttgttgtttgtttttttgccactaattttagtattcattctgcattgctagataaaagctgaagttactttatgtttgtcttttaatgcttcattcaatattgacatttgtagttgagcggggggtttggtttgctttggtttatattttttcagttgtttgtttttgcttgttatattaagcagaaatcctgcaatgaaaggtactatatttgctagactctagacaagatattgtacataaaagaatttttttgtctttaaatagatacaaatgtctatcaactttaatcaagttgtaacttatattgaagacaatttgatacataataaaaaattatgacaatgtc

SEQ ID NO: 3515 - DNA, 969 bp, Homo sapiens
  source 1..969: mol_type = unassigned DNA
gaaaagtatggtcagcgagcgaaggtttgcaaggagacagacgagggcgaaattaagccaggcggcttccctttaaatcctcgcaaagcagaagggcccctcactctggcagcaggccttggccaaggggcctttagccctgacgacccggggaagagtctcccaaagcagaacgcccggtccggcgcccagaccaaacgcgggggaaccggaagggcgaggcctccaccttgccgggattgctgtccttgccattggactatggctccgattcgactctcagaccaagagcatcttcgagcaagaaactaataataataattccagcttctacacaggagtctatattctgatcggagccggcgccctcatgatgctggtgggcttcctgggctgctgcggggctgtgcaggagtcccagtgcatgctgggactggtgagtatcccctcggcatccccacagccaccctgactcccaccaacaaaaacctcagcaggcccagacccagaccacagaacagatggagggggatggggtcaggaaggtacccaaagggcatgagctgtcctcagcctgggcccctccccgatgtgaggcgtcgcccctcttcctttctggagcctgtcttatcgcttcccctaggcaactaaaaggactatgtttcccccttttctcgaggaccacgtttgctttttttccctgaatccacaggtacctttgccttctccttcttgtttcaaaatctgttttggtcttttccgaactccacggagtggattcgctccctttacttgcccaaatctcttgtcttttgtgaacaatagtagttgcctgctcactgactcttaactaacgccttgtaaatgctagttctgggctcagctgtgctcagctctttcctcatgtccgggcaccttgcctcactgtggcctctgtcctgggcttggttaactgcctgttctgtgaac

SEQ ID NO: 3516 - DNA, 739 bp, Homo sapiens
  source 1..739: mol_type = unassigned DNA
aggagacagacgagggcgaaattaagccaggcggcttccctttaaatcctcgcaaagcagaagggcccctcactctggcagcaggccttggccaaggggcctttagccctgacgacccggggaagagtctcccaaagcagaacgcccggtccggcgcccagaccaaacgcgggggaaccggaagggcgaggcctccacccggagaccagcctacagccgcctgcatctgtatccagcgccaggtcccgccagtcccagctgcgcgcgccccccagtcccgcacccgttcggcccaggctaagttagccctcaccatgccggtcaaaggaggcaccaagtgcatcaaatacctgctgttcggatttaacttcatcttctggcttgccgggattgctgtccttgccattggactatggctccgattcgactctcagaccaagagcatcttcgagcaagaaactaataataataattccagcttctacacaggagtctatattctgatcggagccggcgccctcatgatgctggtgggcttcctgggctgctgcggggctgtgcaggagtcccagtgcatgctgggactgttcttcggcttcctcttggtgatattcgccattgaaatagctgcggccatctggggatattcccacaaggatgaggtgattaaggaagtccaggagttttacaaggacacctacaacaagctgaaaaccaaggatgagccccagcgggaaac

SEQ ID NO: 3517 - DNA, 800 bp, Homo sapiens
  source 1..800: mol_type = unassigned DNA
cggagaccagcctacagccgcctgcatctgtatccagcgccaggtcccgccagtcccagctgcgcgcgccccccagtcccgcacccgttcggcccaggctaagttagccctcaccatgccggtcaaaggaggcaccaagtgcatcaaatacctgctgttcggatttaacttcatcttctggcttgccgggattgctgtccttgccattggactatggctccgattcgactctcagaccaagagcatcttcgagcaagaaactaataataataattccagcttctacacaggagtctatattctgatcggagccggcgccctcatgatgctggtgggcttcctgggctgctgcggggctgtgcaggagtcccagtgcatgctgggactggcaactaaaaggactatgtttcccccttttctcgaggaccacgtttgctttttttccctgaatccacagttcttcggcttcctcttggtgatattcgccattgaaatagctgcggccatctggggatattcccacaaggatgaggtgattaaggaagtccaggagttttacaaggacacctacaacaagctgaaaaccaaggatgagccccagcgggaaacgctgaaagccatccactatgcgttgaactgctgtggtttggctgggggcgtggaacagtttatctcagacatctgccccaagaaggacgtactcgaaaccttcaccgtgaagtcctgtcctgatgccatcaaagaggtcttcgacaataaattccacatcatcggcgcagtgggcatcggcattgccgtgg

SEQ ID NO: 3518 - DNA, 1072 bp, Homo sapiens
  source 1..1072: mol_type = unassigned DNA
agccgcctgcatctgtatccagcgccaggtcccgccagtcccagctgcgcgcgccccccagtcccgcacccgttcggcccaggctaagttagccctcaccatgccggtcaaaggaggcaccaagtgcatcaaatacctgctgttcggatttaacttcatcttctggcttgccgggattgctgtccttgccattggactatggctccgattcgactctcagaccaagagcatcttcgagcaagaaactaataataataattccagcttctacacaggagtctatattctgatcggagccggcgccctcatgatgctggtgggcttcctgggctgctgcggggctgtgcaggagtcccagtgcatgctgggactggtgagtatcccctcggcatccccacagccaccctgactcccaccaacaaaaacctcagcaggcccagacccagaccacagaacagatggagggggatggggtcaggaaggtacccaaagggcatgagctgtcctcagcctgggcccctccccgatgtgaggcgtcgcccctcttcctttctggagcctgtcttatcgcttcccctaggcaactaaaaggactatgtttcccccttttctcgaggaccacgtttgctttttttccctgaatccacaggtacctttgccttctccttcttgtttcaaaatctgttttggtcttttccgaactccacggagtggattcgctccctttacttgcccaaatctcttgtcttttgtgaacaatagtagttgcctgctcactgactcttaactaacgccttgtaaatgctagttctgggctcagctgtgctcagctctttcctcatgtccgggcaccttgcctcactgtggcctctgtcctgggcttggttaactgcctgttctgtgaacttcttccctgcccctgctaggctattcatttgtgtcaccagatgcctgttcccagggagttgtccttcttccttgtcccaaaataccctttgattttcctggctggttggctgggactgttctcaccccgtcccctcgttgccttccagttcttcggcttcctctt

SEQ ID NO: 3519 - DNA, 564 bp, Homo sapiens
  source 1..564: mol_type = unassigned DNA
ctgtatccagcgccaggtcccgccagtcccagctgcgcgcgccccccagtcccgcacccgttcggcccaggctaagttagccctcaccatgccggtcaaaggaggcaccaagtgcatcaaatacctgctgttcggatttaacttcatcttctgggttggggtcagcgggactttatttggatccaccacaggtcttttcaaccaaagccttgcagaaacaggctttaccccatacacacagaagagcaacgacttccttgttaagagtctgaaaatctggcttgccgggattgctgtccttgccattggactatggctccgattcgactctcagaccaagagcatcttcgagcaagaaactaataataataattccagcttctacacaggagtctatattctgatcggagccggcgccctcatgatgctggtgggcttcctgggctgctgcggggctgtgcaggagtcccagtgcatgctgggactgttcttcggcttcctcttggtgatattcgccattgaaatagctgcggccatctggggatattcccacaaggatgaggt

SEQ ID NO: 3520 - DNA, 441 bp, Homo sapiens
  source 1..441: mol_type = unassigned DNA
agtcccagctgcgcgcgccccccagtcccgcacccgttcggcccaggctaagttagccctcaccatgccggtcaaaggaggcaccaagtgcatcaaatacctgctgttcggatttaacttcatcttctggcttgccgggattgctgtccttgccattggactatggctccgattcgactctcagaccaagagcatcttcgagcaagaaactaataataataattccagcttctacacaggtgagggacggggaaggctcagtgaattcagaccctggctccaacaaagttcctgcaactttggaggccccatgttgacccagggacttgggcttgggaaagacttttgctctagccacgctggccagtcgtgtccctttcaagttgtgcagtttttgtgtgtgtcgttgtgcctgggaatttgcgtttaactgatgtggtt

SEQ ID NO: 3521 - DNA, 1169 bp, Homo sapiens
  source 1..1169: mol_type = unassigned DNA
cgcgccccccagtcccgcacccgttcggcccaggctaagttagccctcaccatgccggtcaaaggaggcaccaagtgcatcaaatacctgctgttcggatttaacttcatcttctggcttgccgggattgctgtccttgccattggactatggctccgattcgactctcagaccaagagcatcttcgagcaagaaactaataataataattccagcttctacacaggagtctatattctgatcggagccggcgccctcatgatgctggtgggcttcctgggctgctgcggggctgtgcaggagtcccagtgcatgctgggactgttcttcggcttcctcttggtgatattcgccattgaaatagctgcggccatctggggatattcccacaaggatgaggtgattaaggaagtccaggagttttacaaggacacctacaacaagctgaaaaccaaggatgagccccagcgggaaacgctgaaagccatccactatgcgttgaactgctgtggtttggctgggggcgtggaacagtttatctcagacatctgccccaagaaggacgtactcgaaaccttcaccgtgaagtcctgtcctgatgccatcaaagaggtcttcgacaataaattccacatcatcggcgcagtgggcatcggcattgccgtggtcatgatatttggcatgatcttcagtatgatcttgtgctgtgctatccgcaggaaccgcgagatggtctagagtcagcttacatccctgagcaggaaagtttacccatgaagattggtgggattttttgtttgtttgttttgttttgtttgttgtttgttgtttgtttttttgccactaattttagtattcattctgcattgctagataaaagctgaagttactttatgtttgtcttttaatgcttcattcaatattgacatttgtagttgagcggggggtttggtttgctttggtttatattttttcagttgtttgtttttgcttgttatattaagcagaaatcctgcaatgaaaggtactatatttgctagactctagacaagatattgtacataaaagaatttttttgtctttaaatagatacaaatgtctatcaactttaatcaagttgtaacttatattgaagacaatttgatacataataaaaaattatgacaatg

SEQ ID NO: 3522 - DNA, 1229 bp, Homo sapiens
  source 1..1229: mol_type = unassigned DNA
gtggggagccgggccctcttgagatgaggcgtgcgggagggtcctgagcactttagctcgcctaggatttgagctggggtgtgtgtctgctcccagctcaagtccctccgagtgccagagaggaaggcagggagaagcggagcacccctctttgggccaaggccaaggaggactgtgcttgccgggattgctgtccttgccattggactatggctccgattcgactctcagaccaagagcatcttcgagcaagaaactaataataataattccagcttctacacaggagtctatattctgatcggagccggcgccctcatgatgctggtgggcttcctgggctgctgcggggctgtgcaggagtcccagtgcatgctgggactgttcttcggcttcctcttggtgatattcgccattgaaatagctgcggccatctggggatattcccacaaggatgaggtgattaaggaagtccaggagttttacaaggacacctacaacaagctgaaaaccaaggatgagccccagcgggaaacgctgaaagccatccactatgcgttgaactgctgtggtttggctgggggcgtggaacagtttatctcagacatctgccccaagaaggacgtactcgaaaccttcaccgtgaagtcctgtcctgatgccatcaaagaggtcttcgacaataaattccacatcatcggcgcagtgggcatcggcattgccgtggtcatgatatttggcatgatcttcagtatgatcttgtgctgtgctatccgcaggaaccgcgagatggtctagagtcagcttacatccctgagcaggaaagtttacccatgaagattggtgggattttttgtttgtttgttttgttttgtttgttgtttgttgtttgtttttttgccactaattttagtattcattctgcattgctagataaaagctgaagttactttatgtttgtcttttaatgcttcattcaatattgacatttgtagttgagcggggggtttggtttgctttggtttatattttttcagttgtttgtttttgcttgttatattaagcagaaatcctgcaatgaaaggtactatatttgctagactctagacaagatattgtacataaaagaatttttttgtctttaaatagatacaaatgtctatcaactttaatcaagttgtaacttatattgaagacaatttgatacataataaaaaattatgacaatg

SEQ ID NO: 3523 - DNA, 1280 bp, Homo sapiens
  source 1..1280: mol_type = unassigned DNA
ctttatcatttataggcacatgtaagcgtctagctctgtgtgcatccctaaacagcatagcgtttttaactacatggaatcatattgtgtgtgtgcctgtggctctggcttcttggtttagcattgtgagatgcactcatggtgttgcgtgtagctagagttactcgttttcactgctgtatagtgttctgttgcctataaaataccccttcagccaatgggcggcagcttgccgggattgctgtccttgccattggactatggctccgattcgactctcagaccaagagcatcttcgagcaagaaactaataataataattccagcttctacacaggagtctatattctgatcggagccggcgccctcatgatgctggtgggcttcctgggctgctgcggggctgtgcaggagtcccagtgcatgctgggactgttcttcggcttcctcttggtgatattcgccattgaaatagctgcggccatctggggatattcccacaaggatgaggtgattaaggaagtccaggagttttacaaggacacctacaacaagctgaaaaccaaggatgagccccagcgggaaacgctgaaagccatccactatgcgttgaactgctgtggtttggctgggggcgtggaacagtttatctcagacatctgccccaagaaggacgtactcgaaaccttcaccgtgaagtcctgtcctgatgccatcaaagaggtcttcgacaataaattccacatcatcggcgcagtgggcatcggcattgccgtggtcatgatatttggcatgatcttcagtatgatcttgtgctgtgctatccgcaggaaccgcgagatggtctagagtcagcttacatccctgagcaggaaagtttacccatgaagattggtgggattttttgtttgtttgttttgttttgtttgttgtttgttgtttgtttttttgccactaattttagtattcattctgcattgctagataaaagctgaagttactttatgtttgtcttttaatgcttcattcaatattgacatttgtagttgagcggggggtttggtttgctttggtttatattttttcagttgtttgtttttgcttgttatattaagcagaaatcctgcaatgaaaggtactatatttgctagactctagacaagatattgtacataaaagaatttttttgtctttaaatagatacaaatgtctatcaactttaatcaagttgtaacttatattgaagacaatttgatacataataaaaaattatgacaatg

SEQ ID NO: 3524 - DNA, 642 bp, Homo sapiens
  source 1..642: mol_type = unassigned DNA; mol_type = unassigned DNA
atctgctctgacagcgtcctctgtaaggcagggtcccagaagttagccagagtgtggaaggtatatgctaactagcttgagtggattcatcttgctggaaagagctgacagactggaccagtttgcattccgaatgtagggattcccgtggatattctctgtcctggattgagggctaatgggcaccttccagaagggctgagggtaaggagtctatattctgatcggagccggcgccctcatgatgctggtgggcttcctgggctgctgcggggctgtgcaggagtcccagtgcatgctgggactgttcttcggcttcctcttggtgatattcgccattgaaatagctgcggccatctggggatattcccacaaggatgaggtgattaaggaagtccaggagttttacaaggacacctacaacaagctgaaaaccaaggatgagccccagcgggaaacgctgaaagccatccactatgcgttgaactgctgtggtttggctgggggcgtggaacagtttatctcagacatctgccccaagaaggacgtactcgaaaccttcaccgtgaagtcctgtcctgatgccatcaaagaggtcttcgacaataaattccacatcatcggcgcagtgggcatcggcat

SEQ ID NO: 3525 - DNA, 1315 bp, Homo sapiens
  source 1..1315: mol_type = unassigned DNA; mol_type = unassigned DNA
cttttcccggcacatgcgcaccgcagcgggtcgcgcgccctaaggagtggcactttttaaaagtgcagccggagaccagcctacagccgcctgcatctgtatccagcgccaggtcccgccagtcccagctgcgcgcgccccccagtcccgcacccgttcggcccaggctaagttagccctcaccatgccggtcaaaggaggcaccaagtgcatcaaatacctgctgttcggatttaacttcatcttctggcttgccgggattgctgtccttgccattggactatggctccgattcgactctcagaccaagagcatcttcgagcaagaaactaataataataattccagcttctacacaggagtctatattctgatcggagccggcgccctcatgatgctggtgggcttcctgggctgctgcggggctgtgcaggagtcccagtgcatgctgggactgttcttcggcttcctcttggtgatattcgccattgaaatagctgcggccatctggggatattcccacaaggatgaggtgattaaggaagtccaggagttttacaaggacacctacaacaagctgaaaaccaaggatgagccccagcgggaaacgctgaaagccatccactatgcggttgaactgctgtggtttggctgggggcgtggaacagtttatctcagacatctgccccaagaaggacgtactcgaaaccttcaccgtgaagtcctgtcctgatgccatcaaagaggtcttcgacaataaattccacatcatcggcgcagtgggcatcggcattgccgtggtcatgatatttggcatgatcttcagtatgatcttgtgctgtgctatccgcaggaaccgcgagatggtctagagtcagcttacatccctgagcaggaaagtttacccatgaagattggtgggattttttgtttgtttgttttgttttgtttgttgtttgttgtttgtttttttgccactaattttagtattcattctgcattgctagataaaagctgaagttactttatgtttgtcttttaatgcttcattcaatattgacatttgtagttgagcggggggtttggtttgctttggtttatattttttcagttgtttgtttttgcttgttatattaagcagaaatcctgcaatgaaaggtactatatttgctagactctagacaagatattgtacataaaagaatttttttgtctttaaatagatacaaatgtctatcaactttaatcaagttgtaacttatattgaagacaatttgatacataataaaaaattatgacaatgtcctggactggt

SEQ ID NO: 3526 - DNA, 3386 bp, Homo sapiens
  source 1..3386: mol_type = unassigned DNA; mol_type = unassigned DNA
agtgggccgttgccttacagttgctgagaggaggcgagaggcgggggcgctagggccgagatcatgtctgactgggagaggtttccttggcagcagaggacgctaggtttgggatgaaagaagctgggcagatgcaaaatctggagagcgcgagggccgggcggtcagtcagcacccagactggcagcatgaccggtcagataccaaggctttctaaagtcaaccttttcactctgctcagcctctggatggagctctttccagcagaagcccagcggcaaaaatctcagaaaaatgaagagggaaagcatggacccttaggagataatgaagagaggaccagagtatctactgacaaaagacaggtaaagagaactggtcttgtggtggtgaaaaacatgaaaattgttggtctccactgttctagtgaagatttacatgccgggcagattgctcttattaaacatgggtcaaggctgaaaaactgtgatctttatttttccagaaaaccatgttctgcttgtttgaaaatgattgtaaatgctggagttaaccgaatttcatactggcctgctgatccagaaataagtttgcttacggaggcttctagttctgaagatgcaaagttagatgccaaagcagtggaaagattgaagtcaaacagtcgggcccatgtgtgtgtcttacttcaacctttggtgtgttatatggtgcagtttgtagaggagacctcttacaaatgtgactttattcaaaaaattacaaaaacattgccggatgctaacactgacttttattatgaatgtaaacaagaaagaataaaagaatatgaaatgttatttttggtttcaaatgaagaaatgcataagcaaatactgatgactataggtttggagaacctgtgtgaaaatccatactttagcaatctaaggcaaaacatgaaagaccttatcctacttttggccacagtagcttccagtgtgccgaactttaaacacttcggattttaccgtagcaatccagaacagattaatgaaattcacaatcaaagtttgccacaggaaattgcaaggcactgcatggttcaggccaggttattggcatatcgaactgaggatcataaaacaggagttggggcagtcatttgggcagaagggaaatctagaagttgtgatggaacaggtgccatgtactttgtaggatgtggttacaatgcttttcctgttggatctgagtatgctgacttcccacacatggatgacaagcagaaagacagagaaataaggaaattcagatacatcatacatgcggaacagaatgccttgacatttaggtgtcaagaaataaaaccagaagaaagaagcatgatttttgtgacaaagtgcccatgtgatgagtgtgtacctttaattaaaggtgcaggcataaaacaaatctatgcaggagatgtagatgttggaaaaaagaaggcagacatctcttacatgaggttcggggagcttgaaggtgttagcaaatttacgtggcagctgaatccatcaggagcttatggtcttgaacaaaatgagcctgaaaggagagaaaatggtgtgttgagacctgtcccacagaaggaagagcagcaccaggacaagaagctgcgcctcggaatccactaagaaggcctgtctacactgcaggggaacctcaagaacttttcattgcacttctaaaattcagccttgttcattcagaaaataaggatggattttgtgaataattgaaaagattttttaaggaagctaatttatttctaggatacaaatggtgttaataagaatatttgtcttttagatttatgtgtgggttttccataatgtagtagtgtgttattttattacacgaaatgagggagcaataacttcaaccaatgtaatcaccaacagggactgatttctatttatcttgactttatattagccaatttgaaagggtctgcttcacaagaggtcatgcctctgcagggaatcacacaccttttgagaaatattaattcttttgaattacaagagtgacagttagtaaactgctccagggaaataagtgtcatcttttaagagtcagtgtatagcaaaccaaaagatcacatttatacccaaagctttctagtaatcagaatttacttaattagaattgactcataaaaataaagttagtggactttgtctccatttttaaagtatattttgtaaatgttaattctgtggtcctgtttatcacagactttgggtagcaataggaagagagtgttattctgagacagtgtcgctgcttgatatcactgactcttgaaatcactaacagtgaacctcaaatttggttatgatgttaacagagaagaaatatttgagtctggaatattgaaactagctttcctagaattccattaataaatgctgctcccccatatagtcttcccttctgtataattaacataggttgtctcatggctttgatcttcaaaaggaagagccttttaaaaacatttgccaacctcaagaataaatactgaaagtcttgaaagtatggtcatttcagctattccagattgctgtctgtgatttctcacatttttatttgctgagaaacattcagaaaattattccaaaaatgaaggtacattttctgttctctcctaggttagagaggggtggcctggggtgcttcatgagaaatgtcttcctggatctgcggtggtcaggtttgcctctgcttttgttccctgcctttccgccacatcacacggcctcactgggcttcctaccagtttctcagaattacacgcacgaccatccaaacattggctccatgccagggctgtgactgcagcctgtgtaggaccatggggagttcagagtcatcatacaaggcagccaagaactgccataaacactacacagatggagggcatgggataggacaggagaggaggtgatgtacacttagaggtaactaaggctagtttgaaaaccgtgaattaagatattcttatcagtataaaaacactgagattgcttacctcccaaattgctttattgtattaactctcatgcttcagctcttggatttgttgtttctaactaacatgtcatgtacaccaaacattttataaatcaatcagtaaatattttgtaagacccaaaatcctggcatattgccaggtctgtggatttgcctgttgggtgttgggatgggatatcagaggaagaagcatacaagtgggaaaaactgtgattagaaagggaaaaataggcatttccacagtactattaagagaggcatgataatgccattttttttcttctgtacaactggtcagatttcaataaataatcattgatggttta

SEQ ID NO: 3527 - DNA, 706 bp, Homo sapiens
  source 1..706: mol_type = unassigned DNA; mol_type = unassigned DNA
gccttacagttgctgagaggaggcgagaggcgggggcgctagggccgagatcatgtctgactgggagaggtttccttggcagcagaggacgctaggtttgggatgaaagaagctgggcagatgcaaaatctggagagcgcgagggccgggcggtcagtcagcacccagactggcagcatgaccggtgagtgtccgggaccctgctcccgccaccctacctttcgctctgccctgtgcgtctcccgtcattgaactccagattccttgtctgagcctctttgcctcccctgctgcttttggatgtctcctgcccgccctctgcgtgtcccctccgcggtcgccaggaccaatcggctcggtcgcactggcttttgaagtctcgctttttacccctgttagctacttctcacaggacctagagctggggcctctgaggtcaaagagcctgaacatttccaaacggcgcttttgccttgatttccaaattaaccgcacgtgacgctttcctgtatttcgactgctttaccgtcgaaggtcagataccaaggctttctaaagtcaaccttttcactctgctcagcctctggatggagctctttccagcagaagcccagcggcaaaaatctcagaaaaatgaagagggaaagcatggacccttaggagataatgaagagaggaccagagtatctactgacaaaagacaggt

SEQ ID NO: 3528 - DNA, 688 bp, Homo sapiens
  source 1..688: mol_type = unassigned DNA; mol_type = unassigned DNA
acagttgctgagaggaggcgagaggcgggggcgctagggccgagatcatgtctgactgggagaggtttccttggcagcagaggacgctaggtttgggatgaaagaagctgggcagatgcaaaatctggagagcgcgagggccgggcggtcagtcagcacccagactggcagcatgaccggtcagataccaaggctttctaaagtcaaccttttcactctgctcagcctctggatggagctctttccagcagaagcccagcggcaaaaatctcagaaaaatgaagagggaaagcatggacccttaggagataatgaagagaggaccagagtatctactgacaaaagacaggtaaagagaactggtcttgtggtggtgaaaaacatgaaaattgttggtctccactgttctagtgaagatttacatgccgggcagattgctcttattaaacatgggtcaaggctgaaaaactgtgatctttatttttccagaaaaccatgttctgcttgtttgaaaatgattgtaaatggattactggaagcagctaagatgcctagatgaaaggtttaccatcactgctggttaggaaatggattatgagaactcgaacagagggaaggtgaaatgcaaccggaggaaacactctgatatgagctggagttaaccgaatttcatactggcctgctgatc

SEQ ID NO: 3529 - DNA, 677 bp, Homo sapiens
  source 1..677: mol_type = unassigned DNA; mol_type = unassigned DNA
gctgagaggaggcgagaggcgggggcgctagggccgagatcatgtctgactgggagaggtttccttggcagcagaggacgctaggtttgggatgaaagaagctgggcagatgcaaaatctggagagcgcgagggccgggcggtcagtcagcacccagactggcagcatgaccggtcagataccaaggctttctaaagtcaaccttttcactctgctcagcctctggatggagctctttccagcagaagcccagcggcaaaaatctcagaaaaatgaagagggaaagcatggacccttaggagataatgaagagaggaccagagtatctactgacaaaagacagaaaaccatgttctgcttgtttgaaaatgattgtaaatgctggagttaaccgaatttcatactggcctgctgatccagaaataagtttgcttacggaggcttctagttctgaagatgcaaagttagatgccaaagcagtggaaagattgaagtcaaacagtcgggcccatgtgtgtgtcttacttcaacctttggtgtgttatatggtgcagtttgtagaggagacctcttacaaatgtgactttattcaaaaaattacaaaaacattgccggatgctaacactgacttttattatgaatgtaaacaagaaagaataaaagaatatgaaatgtta

SEQ ID NO: 3530 - DNA, 644 bp, Homo sapiens
  source 1..644: mol_type = unassigned DNA; mol_type = unassigned DNA
gggccgagatcatgtctgactgggagaggtttccttggcagcagaggacgctaggtttgggatgaaagaagctgggcagatgcaaaatctggagagcgcgagggccgggcggtcagtcagcacccagactggcagcatgaccggtcagataccaaggctttctaaagtcaaccttttcactctgctcagcctctggatggagctctttccagcagaagcccagcggcaaaaatctcagaaaaatgaagagggaaagcatggacccttaggagataatgaagagaggaccagagtatctactgacaaaagacagaaaaccatgttctgcttgtttgaaaatgattgtaaatggattactggaagcagctaagatgcctagatgaaaggtttaccatcactgctggttaggaaatggattatgagaactcgaacagagggaaggtgaaatgcaaccggaggaaacactctgatatgagctggagttaaccgaatttcatactggcctgctgatccagaaataagtttgcttacggaggcttctagttctgaagatgcaaagttagatgccaaagcagtggaaagattgaagtcaaacagtcgggcccatgtgtgtgtcttacttcaacctttggtgtgttatatgg

SEQ ID NO: 3531 - DNA, 290 bp, Homo sapiens
  source 1..290: mol_type = unassigned DNA; mol_type = unassigned DNA
ctgggcagatgcaaaatctggagagcgcgagggccgggcggtcagtcagcacccagactggcagcatgaccggtcagataccaaggctttctaaagtcaaccttttcactctgctcagcctctggatggagctctttccagcagaagcccagcggcaaaaatctcagaaaaatgaagagggaaagcatggacccttaggagataatgaagagaggaccagagtatctactgacaaaagacaggattactggaagcagctaagatgcctagatgaaaggtttaccatcact

SEQ ID NO: 3532 - DNA, 4960 bp, Homo sapiens
  source 1..4960: mol_type = unassigned DNA; mol_type = unassigned DNA
cacggaacagccctcctggggtccccacgagccgcgtcctgctgtgccccggcgcctacgcagcagcggccgcggccgcggtgggcacgcacggttaccccgggcagctccggccgccagctgcagccccgtcgcctcggccgcgccagccggctgcgggcacctgggggcgggctgggggcgccggccgcggcaggaggcgctgtagcgagggctgcggcgccggtcctgcggcggccgcgggaggcagcggggcaggcgctgtgggccgggctcctcctccggctcctgcgcgaccgcctcccgccgggctctgccggcgcccgccgtccccgcagcgccgctctgcgcccgccgccccgagcgcccgcgcggggctggcgggagcctcggcgggcgcgcgggcgcgcggggccatggtcgtggccccctgacgggccgcggccgcctccatgaagcggaaaagcgagcggcggtcgagctgggccgccgcgcccccctgctcgcggcgctgctcgtcgacctcgccgggtgtgaagaagatccgcagctccacgcagcaagacccgcgccgccgggacccccaggacgacgtgtacctggacatcaccgatcgcctttgttttgccattctctacagcagaccaaagagtgcatcaaatgtacattatttcagcatagataatgaacttgaatatgagaacttctacgcagattttggaccactcaatctggcaatggtttacagatattgttgcaagatcaataagaaattaaagtccattacaatgttaaggaagaaaattgttcattttactggctctgatcagagaaaacaagcaaatgctgccttccttgttggatgctacatggttatatatttggggagaaccccagaagaagcatatagaatattaatctttggagagacatcctatattcctttcagagatgctgcctatggaagttgcaatttctacattacacttcttgactgttttcatgcagtaaagaaggcaatgcagtatggcttccttaatttcaactcatttaaccttgatgaatatgaacactatgaaaaagcagaaaatggagatttaaattggataataccagaccgatttattgccttctgtggacctcattcaagagccagacttgaaagtggttaccaccaacattctcctgagacttatattcaatattttaagaatcacaatgttactaccattattcgtctgaataaaaggatgtatgatgccaaacgctttacggatgctggcttcgatcaccatgatcttttctttgcggatggcagcacccctactgatgccattgtcaaagaattcctagatatctgtgaaaatgctgagggtgccattgcagtacattgcaaagctggccttggtcgcacgggcactctgatagcctgctacatcatgaagcattacaggatgacagcagccgagaccattgcgtgggtcaggatctgcagacctggctcggtgattgggcctcagcagcagtttttggtgatgaagcaaaccaacctctggctggaaggggactattttcgtcagaagttaaaggggcaggagaatggacaacacagagcagccttctccaaacttctctctggcgttgatgacatttccataaatggggtcgagaatcaagatcagcaagaacccgaaccgtacagtgatgatgacgaaatcaatggagtgacacaaggtgatagacttcgggccttgaaaagcagaagacaatccaaaacaaacgctattcctctcaccgatggttggctgtcccaggctgtcacctttctagaccggcttctgatctggctcgggatccacaaggactagacctgcggggaaggtctctcctggacacgcccgttgcccactgcaagttctctccaggtgcaattgaagcctctcagcagcggaggccgccatgtggagagagcaggcaggcccactgctgctgagaacagggcaggcacgggcagctcctgttctgcctttcccagcttcggagacgcaggctcagctgctccgaagcacctgccagcaccgcacagtacagtttcagaggacagcagtctccttcccgtgaagctcccatgtgctggaatggcatggacttgctgatcaacagaaggaaatggtctgaagtctgaccagcacaaggaaggaggctggctggctcagaggggcccaccttgcgtggaatgaaaacgccaaaggctcatgagcaacattaggctagaggggtcttgttcaaagcatccaactctgacttcggaggcattcccagccggcagcagtgtgtccagcctgcctcttcccaggctggtctgacatgcagcttaggctttcatcccaagttaggtactgacccctccctcttgggcagcacctccctttttaaaaaaatttttttttcttccaaagacagagtcttgctcttgttgtccaggctggagtgcagtggcgcgatctaggctcactgcaacctccttctcccaggttcaagcgactctcctgcctcagcctcctgagtagctgggattataggcgtctgccaccacgcccggctaatttctgtatttttagtagagacagggtttcaccatgttggccaggctggtctcgaactcctgacctcaagtgatctgcctgccttggcctcccaaagtgctgggattacaggtgtcagccaccgcacccagccaagcacccctatctctagaggatctggccccccagcccagttactgcagggcagctttccccacctggtgacaggctgtgcgcagcagccccaggacctcaccctgagctgagtcttcaggagccgccctggtggcacaactcagacacccctgaggcctagcagtcaactcctgattcagacatgatccagtccagcctgggcttggctataaccagctcaaacttgcttgacctccacttttcaggagacttggggacgacagccctcatcggcgtctttcatggggttaatctgcttgagtctaagtcgccagccagaaacgtggtgcccagggtgccctgcctcaggacatgtccacacccacgtcacaagcacctgaggagtccggccggggcactgtggtccaaaaggtcctgccgcctccgcatctgactgtcccaacggcatgctggtgacacccccctgcccttcgcttctgtcctccctggcttctctggggcacttggggctatgtacaacctggcacgatccagaaagggtgcaaacaaaatgcctacatccaggcacacgaccaagtcagcgagagctagccctggtaagcaaacatagcccattacaggttcagaacgtgcaccgggttccccaaaactgtcttcaaccacatgactcaacagctctatgggataggaactgtcagtgtttttgcaactgcaacattaaaccaagtgctgtgggcttttcaagtattattcacaacactaaaggaaagtttcttcaaagggctctctggctaatcttcaaagccgcagttaggcaaaatgacagtgtgacagcttcaaagccactgactcatgacacagccctgatgttgtaccggctaggttcagatttcagaaatcagggcacttgcatccattgccttttccaggaaagggaagaaaacactcagttgataaaccttagtactcagataataaataagagaccaaaagtaggctatcacccaaagcaaacatccttaactgaccctaacgtgtatggattcaactttgattattcaacaaaatcatgaccgactgctgtggcctggagtaaccaaaggactgttttctctacacaaagtcaggagcgaataccaacctttatttgcacttgggttccagttcaaagccaccttagacagtgtggcaaagtgggaaaaagcacagatcctgggaccaaggttcagattccatctcaagcgagcatatgaactgtgtgacaacaggcagacagtacctctgtgtctatgagaaagcggggagagcaacaccccagcttctagcagctctacagctgcctggacctgcaggccctcctaggcccacttcctccccagcacagtgtgtgttcccgggcgtgtgtggctctgggtccagctctgttcagggtgggactccaggtgaattactgaacctctgaggtgtacccccaaccccaaactttcaccaaaagcaataaagaggaactctagaactggagccaggactaagtgagaaaaactgcttataagtgcttaataaatactagttatttacaacttttgctcaagccgagggcagaggcctttgtacgcagctgccgaactctgactctagttctgcggaagaaaaggatgcggtatttgcttttgccatgatccctttccatttgattggcaggttaaataacatggtttttgaagtcacatacttaatattcttcctaaaaaccacccaaacactagatgtgtgtgtgcacacacacagaaaccacgaggtagtttaaatcaccattaaaaatcaacgctttctctgattctgtgtcacagagtggtggccagtggctacacaatagcgatttttaaatgattggttaagtgaaaaccagaactcaaaatattccaggagagaagataacatttacaagtaaacagtaagtgcaattgtattttaatttcttggtctccgaaaactcagctgtgactgctttccattaacagttccagctctatgtgtttcctctaacgctaaaggcacagcccccgggaatctactgcttcctaagagtctccatggagtctattttacaacctcctttccctccatgcttccgcggaggagtctatactatctctatatacacattttaaacattattcttcatttgaaattccttcaataaaaacacagtcaccatt

SEQ ID NO: 3533 - DNA, 5271 bp, Homo sapiens
  source 1..5271: mol_type = unassigned DNA; mol_type = unassigned DNA
gagcggcggtcgagctgggccgccgcgcccccctgctcgcggcgctgctcgtcgacctcgccgggtgtgaagaagatccgcagctccacgcagcaagacccgcgccgccgggacccccaggacgacgtgtacctggacatcaccgatcgcctttgttttgccattctctacagcagaccaaagagtgcatcaaatgtacattatttcagcatagataatgaacttgaatatgagaacttctacgcagattttggaccactcaatctggcaatggtttacagatattgttgcaagatcaataagaaattaaagtccattacaatgttaaggaagaaaattgttcattttactggctctgatcagagaaaacaagcaaatgctgccttccttgttggatgctacatggttatatatttggggagaaccccagaagaagcatatagaatattaatctttggagagacatcctatattcctttcagagatgctgcctatggaagttgcaatttctacattacacttcttgactgttttcatgcagtaaagaaggcaatgcagtatggcttccttaatttcaactcatttaaccttgatgaatatgaacactatgaaaaagcagaaaatggagatttaaattggataataccagaccgatttattgccttctgtggacctcattcaagagccagacttgaaagtggttaccaccaacattctcctgagacttatattcaatattttaagaatcacaatgttactaccattattcgtctgaataaaaggatgtatgatgccaaacgctttacggatgctggcttcgatcaccatgatcttttctttgcggatggcagcacccctactgatgccattgtcaaagaattcctagatatctgtgaaaatgctgagggtgccattgcagtacattgcaaagctggccttggtcgcacgggcactctgatagcctgctacatcatgaagcattacaggatgacagcagccgagaccattgcgtgggtcaggatctgcagacctggctcggtgattgggcctcagcagcagtttttggtgatgaagcaaaccaacctctggctggaaggggactattttcgtcagaagttaaaggggcaggagaatggacaacacagagcagccttctccaaacttctctctggcgttgatgacatttccataaatggggtcgagaatcaagatcagcaagaacccgaaccgtacagtgatgatgacgaaatcaatggagtgacacaaggtgatagacttcgggccttgaaaagcagaagacaatccaaaacaaacgctattcctctcacatgtcccctagctgtgctgacctctgcactgtgtagtgttgtcatctggtggattgtttgtgactacattcttcccatcctgctattctgtctcgatggtttcagaacacagtagccatcaggaccccctgacagatagctgctagtaattcttcaatccagtgttcagagctgtaaaacatctgaacctaacatttctggcagtgcaggcattactaaaagaaccaccagatctgcttcaaggaaaagcagtgttaaaagtctctccatttcaaggactaaaacagtcttgcgttaagtaaaaacctgtgaccagagctgaaggaagactctaggactgaaaactgcaacagaaattagcacaatttgaaaacaaaacaaaattgcaaaagccttagttgctttttccacctaagaagttgatcaatggagaaaatgtccactggagtttgaataatgaactttgagtttgggtgcaagcaaatgactcagagaagggtccagctctcaagctgaatgacaaacatgctgttgtaaatttagtctcaggtgtaaatacccaagccctctggtacccagggagctggctggtctgtggtgcatgtgtgtccctgtgatggcaatcattgtagttgctggccttcagaagaattgaggatctgatggaggttttttatgtatttattttctgttcaccttgtgaccctgtgtcaaaatttataaagatacaaaaggcattactgaaatggtactttctgtaatttgatactatttggcttaatcatcttcacttgactatttgtaatactgttgtaatgttaactctgttaagtacccaagctgcttgtcttccaccaaagagtgctttattaacaagaatctgtgaaaatcacatttaaacactgttgcatgttgtaagaccaggtggtaccttagtaacctaaaacttgcaagagaatattaatggtagctttagaagactcaggaggagaaactgacttcagagttggaagatgttgcaagtcgttcctttttctgtccttcagggactgaagaactgggaggctgcccattgtttggttgccagtcatacaaattaaaatcatatttccttccatgaatggaagaaacacactattggtttttccccttggaaacagcaatcccaaataatgtcggcttacaaaaaaaaaaagttaccacttttttagagtccttccctgtaacattggattttttttttcccttatgagatccacctaaggccattgacgtggcctgcgatctcagtgacaatgatctgcttctggatctcactgttgcctttggttagggaacacaactagtaactctgcagagtgccttctcccgcagccctactggaacacagcagagtctgtgccatgaagcagttacagaaacagaattgatgtgctgctaaaaaaaaaaaaaaaaatggggcccgaaataaaagaatatatagtactcacctcagttccttccataagaagtgggtggtttaatgattgttaagccatttttgcctgtgccgggagcatggagggctgagatgtcgacaggcagtgggaaacaaatgccctcctaagccacaaggcgtgcgccagattagtaggcaactccattttaagaagctgcctttttcacaaaactggaagaaataaaagcggttggaataaacaagttaaaagtctttaatgcaaaaagtaattgaaaggcagtgcctccattttggtgtactttcttggaagaaagtataaaattgaccggcatcatgagagacggaagatgccgtgttctcagccaaacaagcaactctttccccgccaggcactgtcgggtggggtcaggccagcttttaaacactggggactggatcacagaaaaacagtggttttctgtccctggaaatgaataggcacaaagacccacttggctgtgggcagactactcttcaataagatttgggtgggaggaggaacattccttttgctattttgagctgagacaatataaatattcaaactgtgccatgcataaagcattgaattctcagggcacctcttcttccccttaccccttttaaggccatcccctccattaataataatccaggtagttgtgaaaatcgtgcttctatctgatcccttcttagtttggcttttcatcccatcagaacaagtaaacgtaggcgccacagctcttgtgagtactgtctccctcacggtgaatgagcctcctggtgtttcgtccaagaaaagaaagggtgtcactggaaccacagccctttttcattttataaactgcctcttcatgttgcctgctcaagtttccacctagaattgctatcactgtggctctttctaaaaatctttctatttaactggttcactgaaattagtcatagaaaacttgtgatttggtgaagaggcattccttgtaataaccaaatgacttgggatggtgtgcatagcaagggcagtgttacacttatgaggactgtctctagcatccaggaagtctctgggtctgagggatggaaagttcttcctgctatgaatgagagtggactcttcccctcacccccaactgaaaccacaaacaaccagaatcttctggaattctgacttagagtcgttgttatagaagaccttgttgctatggaacatgaaactgtgtgtcagatggagagatccccttaacctaagagccttaaatagccctgaaagtacactgggacggtttgcgatggaattaaaattggaagtgaatatttttaggtgctcttgaagctttctggggactcaaaattatcaaaagtcagggacagtccggaggaagagcgtctgcaaaactgggttcctagaagtatagacggacttagctttttgtagaatttggtgaggagcagcgcctcgtgagagcagaatggcctggcgtggccagtgcttcccggcagcacgcagctctgcggcctccagaattcccctgttctgagcttgatgcccctagcctgtcccctacctacttcctcccctcctctctagccctctcacaggggtgattgctacctctctgttttcttgggcctaggcaagttttagaggagttcccaagcattgttatgaggccagtgtgctcgctgggctgggcgggatggcctgggcttgtgtgtggcctgagggctctcctggggccttctcttttcccagtcacctttggagccacagaagcagtgcactcattggatgtctgttcttaacacagcttctctttctacattaaaaaaaatcattattgcattttggaaagcagtgctcatcaaaagcaacttttaaaacctattttattgttcctttaaatgttctctcccgctgaaactgccctggagaggctatctgctgctcttccatttacccacatcaggttattctccatgtcactcagtggagatgactccagatgtgtttaaagactggacaattcacctatactgtgtaggaaattacctccttaattacctggtagaattgtcagcagacatgttcatccgatgatagtactgcagttttctattaataatttgcagacttttatctaacctgcactcatgtacagattattaaaagttttaaaatgtaactgatcagtattgatcaatcattgtcttgatttttttttacagcgtatatttctaatcatattttttaaagccaagagaactggttgaatgaatgtttattttcctgaaggtatttttaagataaagcttcctaatggcgtgtaaactttgcatatgtatgtagtttgatacatattgtcacatttgaaaatcttgtgggttgtaactggttttatacaaaatatcgaatagtggaaattgtataattacaatcatgtaattaaaagtattaacccaacagcc

SEQ ID NO: 3534 - DNA, 5589 bp, Homo sapiens
  source 1..5589: mol_type = unassigned DNA; mol_type = unassigned DNA
cacggaacagccctcctggggtccccacgagccgcgtcctgctgtgccccggcgcctacgcagcagcggccgcggccgcggtgggcacgcacggttaccccgggcagctccggccgccagctgcagccccgtcgcctcggccgcgccagccggctgcgggcacctgggggcgggctgggggcgccggccgcggcaggaggcgctgtagcgagggctgcggcgccggtcctgcggcggccgcgggaggcagcggggcaggcgctgtgggccgggctcctcctccggctcctgcgcgaccgcctcccgccgggctctgccggcgcccgccgtccccgcagcgccgctctgcgcccgccgccccgagcgcccgcgcggggctggcgggagcctcggcgggcgcgcgggcgcgcggggccatggtcgtggccccctgacgggccgcggccgcctccatgaagcggaaaagcgagcggcggtcgagctgggccgccgcgcccccctgctcgcggcgctgctcgtcgacctcgccgggtgtgaagaagatccgcagctccacgcagcaagacccgcgccgccgggacccccaggacgacgtgtacctggacatcaccgatcgcctttgttttgccattctctacagcagaccaaagagtgcatcaaatgtacattatttcagcatagataatgaacttgaatatgagaacttctacgcagattttggaccactcaatctggcaatggtttacagatattgttgcaagatcaataagaaattaaagtccattacaatgttaaggaagaaaattgttcattttactggctctgatcagagaaaacaagcaaatgctgccttccttgttggatgctacatggttatatatttggggagaaccccagaagaagcatatagaatattaatctttggagagacatcctatattcctttcagagatgctgcctatggaagttgcaatttctacattacacttcttgactgttttcatgcagtaaagaaggcaatgcagtatggcttccttaatttcaactcatttaaccttgatgaatatgaacactatgaaaaagcagaaaatggagatttaaattggataataccagaccgatttattgccttctgtggacctcattcaagagccagacttgaaagtggttaccaccaacattctcctgagacttatattcaatattttaagaatcacaatgttactaccattattcgtctgaataaaaggatgtatgatgccaaacgctttacggatgctggcttcgatcaccatgatcttttctttgcggatggcagcacccctactgatgccattgtcaaagaattcctagatatctgtgaaaatgctgagggtgccattgcagtacattgcaaagctggccttggtcgcacgggcactctgatagcctgctacatcatgaagcattacaggatgacagcagccgagaccattgcgtgggtcaggatctgcagacctggctcggtgattgggcctcagcagcagtttttggtgatgaagcaaaccaacctctggctggaaggggactattttcgtcagaagttaaaggggcaggagaatggacaacacagagcagccttctccaaacttctctctggcgttgatgacatttccataaatggggtcgagaatcaagatcagcaagaacccgaaccgtacagtgatgatgacgaaatcaatggagtgacacaaggtgatagacttcgggccttgaaaagcagaagacaatccaaaacaaacgctattcctctcacagtaattcttcaatccagtgttcagagctgtaaaacatctgaacctaacatttctggcagtgcaggcattactaaaagaaccaccagatctgcttcaaggaaaagcagtgttaaaagtctctccatttcaaggactaaaacagtcttgcgttaagtaaaaacctgtgaccagagctgaaggaagactctaggactgaaaactgcaacagaaattagcacaatttgaaaacaaaacaaaattgcaaaagccttagttgctttttccacctaagaagttgatcaatggagaaaatgtccactggagtttgaataatgaactttgagtttgggtgcaagcaaatgactcagagaagggtccagctctcaagctgaatgacaaacatgctgttgtaaatttagtctcaggtgtaaatacccaagccctctggtacccagggagctggctggtctgtggtgcatgtgtgtccctgtgatggcaatcattgtagttgctggccttcagaagaattgaggatctgatggaggttttttatgtatttattttctgttcaccttgtgaccctgtgtcaaaatttataaagatacaaaaggcattactgaaatggtactttctgtaatttgatactatttggcttaatcatcttcacttgactatttgtaatactgttgtaatgttaactctgttaagtacccaagctgcttgtcttccaccaaagagtgctttattaacaagaatctgtgaaaatcacatttaaacactgttgcatgttgtaagaccaggtggtaccttagtaacctaaaacttgcaagagaatattaatggtagctttagaagactcaggaggagaaactgacttcagagttggaagatgttgcaagtcgttcctttttctgtccttcagggactgaagaactgggaggctgcccattgtttggttgccagtcatacaaattaaaatcatatttccttccatgaatggaagaaacacactattggtttttccccttggaaacagcaatcccaaataatgtcggcttacaaaaaaaaaaagttaccacttttttagagtccttccctgtaacattggattttttttttcccttatgagatccacctaaggccattgacgtggcctgcgatctcagtgacaatgatctgcttctggatctcactgttgcctttggttagggaacacaactagtaactctgcagagtgccttctcccgcagccctactggaacacagcagagtctgtgccatgaagcagttacagaaacagaattgatgtgctgctaaaaaaaaaaaaaaaaatggggcccgaaataaaagaatatatagtactcacctcagttccttccataagaagtgggtggtttaatgattgttaagccatttttgcctgtgccgggagcatggagggctgagatgtcgacaggcagtgggaaacaaatgccctcctaagccacaaggcgtgcgccagattagtaggcaactccattttaagaagctgcctttttcacaaaactggaagaaataaaagcggttggaataaacaagttaaaagtctttaatgcaaaaagtaattgaaaggcagtgcctccattttggtgtactttcttggaagaaagtataaaattgaccggcatcatgagagacggaagatgccgtgttctcagccaaacaagcaactctttccccgccaggcactgtcgggtggggtcaggccagcttttaaacactggggactggatcacagaaaaacagtggttttctgtccctggaaatgaataggcacaaagacccacttggctgtgggcagactactcttcaataagatttgggtgggaggaggaacattccttttgctattttgagctgagacaatataaatattcaaactgtgccatgcataaagcattgaattctcagggcacctcttcttccccttaccccttttaaggccatcccctccattaataataatccaggtagttgtgaaaatcgtgcttctatctgatcccttcttagtttggcttttcatcccatcagaacaagtaaacgtaggcgccacagctcttgtgagtactgtctccctcacggtgaatgagcctcctggtgtttcgtccaagaaaagaaagggtgtcactggaaccacagccctttttcattttataaactgcctcttcatgttgcctgctcaagtttccacctagaattgctatcactgtggctctttctaaaaatctttctatttaactggttcactgaaattagtcatagaaaacttgtgatttggtgaagaggcattccttgtaataaccaaatgacttgggatggtgtgcatagcaagggcagtgttacacttatgaggactgtctctagcatccaggaagtctctgggtctgagggatggaaagttcttcctgctatgaatgagagtggactcttcccctcacccccaactgaaaccacaaacaaccagaatcttctggaattctgacttagagtcgttgttatagaagaccttgttgctatggaacatgaaactgtgtgtcagatggagagatccccttaacctaagagccttaaatagccctgaaagtacactgggacggtttgcgatggaattaaaattggaagtgaatatttttaggtgctcttgaagctttctggggactcaaaattatcaaaagtcagggacagtccggaggaagagcgtctgcaaaactgggttcctagaagtatagacggacttagctttttgtagaatttggtgaggagcagcgcctcgtgagagcagaatggcctggcgtggccagtgcttcccggcagcacgcagctctgcggcctccagaattcccctgttctgagcttgatgcccctagcctgtcccctacctacttcctcccctcctctctagccctctcacaggggtgattgctacctctctgttttcttgggcctaggcaagttttagaggagttcccaagcattgttatgaggccagtgtgctcgctgggctgggcgggatggcctgggcttgtgtgtggcctgagggctctcctggggccttctcttttcccagtcacctttggagccacagaagcagtgcactcattggatgtctgttcttaacacagcttctctttctacattaaaaaaaatcattattgcattttggaaagcagtgctcatcaaaagcaacttttaaaacctattttattgttcctttaaatgttctctcccgctgaaactgccctggagaggctatctgctgctcttccatttacccacatcaggttattctccatgtcactcagtggagatgactccagatgtgtttaaagactggacaattcacctatactgtgtaggaaattacctccttaattacctggtagaattgtcagcagacatgttcatccgatgatagtactgcagttttctattaataatttgcagacttttatctaacctgcactcatgtacagattattaaaagttttaaaatgtaactgatcagtattgatcaatcattgtcttgatttttttttacagcgtatatttctaatcatattttttaaagccaagagaactggttgaatgaatgtttattttcctgaaggtatttttaagataaagcttcctaatggcgtgtaaactttgcatatgtatgtagtttgatacatattgtcacatttgaaaatcttgtgggttgtaactggttttatacaaaatatcgaatagtggaaattgtataattacaatcatgtaattaaaagtattaacccaa

SEQ ID NO: 3535 - DNA, 2547 bp, Homo sapiens
  source 1..2547: mol_type = unassigned DNA; mol_type = unassigned DNA
atgaagcggaaaagcgagcggcggtcgagctgggccgccgcgcccccctgctcgcggcgctgctcgtcgacctcgccgggtgtgaagaagatccgcagctccacgcagcaagacccgcgccgccgggacccccaggacgacgtgtacctggacatcaccgatcgcctttgttttgccattctctacagcagaccaaagagtgcatcaaatgtacattatttcagcatagataatgaacttgaatatgagaacttctacgcagattttggaccactcaatctggcaatggtttacagatattgttgcaagatcaataagaaattaaagtccattacaatgttaaggaagaaaattgttcattttactggctctgatcagagaaaacaagcaaatgctgccttccttgttggatgctacatggttatatatttggggagaaccccagaagaagcatatagaatattaatctttggagagacatcctatattcctttcagagatgctgcctatggaagttgcaatttctacattacacttcttgactgttttcatgcagtaaagaaggcaatgcagtatggcttccttaatttcaactcatttaaccttgatgaatatgaacactatgaaaaagcagaaaatggagatttaaattggataataccagaccgatttattgccttctgtggacctcattcaagagccagacttgaaagtggttaccaccaacattctcctgagacttatattcaatattttaagaatcacaatgttactaccattattcgtctgaataaaaggatgtatgatgccaaacgctttacggatgctggcttcgatcaccatgatcttttctttgcggatggcagcacccctactgatgccattgtcaaagaattcctagatatctgtgaaaatgctgagggtgccattgcagtacattgcaaagctggccttggtcgcacgggcactctgatagcctgctacatcatgaagcattacaggatgacagcagccgagaccattgcgtgggtcaggatctgcagacctggctcggtgattgggcctcagcagcagtttttggtgatgaagcaaaccaacctctggctggaaggggactattttcgtcagaagttaaaggggcaggagaatggacaacacagagcagccttctccaaacttctctctggcgttgatgacatttccataaatggggtcgagaatcaagatcagcaagaacccgaaccgtacagtgatgatgacgaaatcaatggagtgacacaaggtgatagacttcgggccttgaaaagcagaagacaatccaaaacaaacgctattcctctcactctctccatttcaaggactaaaacagtcttgcgttaagtaaaaacctgtgaccagagctgaaggaagactctaggactgaaaactgcaacagaaattagcacaatttgaaaacaaaacaaaattgcaaaagccttagttgctttttccacctaagaagttgatcaatggagaaaatgtccactggagtttgaataatgaactttgagtttgggtgcaagcaaatgactcagagaagggtccagctctcaagctgaatgacaaacatgctgttgtaaatttagtctcaggtgtaaatacccaagccctctggtacccagggagctggctggtctgtggtgcatgtgtgtccctgtgatggcaatcattgtagttgctggccttcagaagaattgaggatctgatggaggttttttatgtatttattttctgttcaccttgtgaccctgtgtcaaaatttataaagatacaaaaggcattactgaaatggtactttctgtaatttgatactatttggcttaatcatcttcacttgactatttgtaatactgttgtaatgttaactctgttaagtacccaagctgcttgtcttccaccaaagagtgctttattaacaagaatctgtgaaaatcacatttaaacactgttgcatgttgtaagaccaggtggtaccttagtaacctaaaacttgcaagagaatattaatggtagctttagaagactcaggaggagaaactgacttcagagttggaagatgttgcaagtcgttcctttttctgtccttcagggactgaagaactgggaggctgcccattgtttggttgccagtcatacaaattaaaatcatatttccttccatgaatggaagaaacacactattggtttttccccttggaaacagcaatcccaaataatgtcggcttacaaaaaaaaaaagttaccacttttttagagtccttccctgtaacattggattttttttttcccttatgagatccacctaaggccattgacgtggcctgcgatctcagtgacaatgatctgcttctggatctcactgttgcctttggttagggaacacaactagtaactctgcagagtgccttctcccgcagccctactggaacacagcagagtctgtgccatgaagcagttacagaaacagaattgatgtgctgctaaaaaaaaaaaaaaaaatggggcccg

SEQ ID NO: 3536 - DNA, 2965 bp, Homo sapiens
  source 1..2965: mol_type = unassigned DNA; mol_type = unassigned DNA
ccttttgctcgaagtcctttaatcgctaaggagctttcccagactcttccctctgcaggcccgctggcctctgacgcatgtcccctctgcggagcgtttgggcactggaggagccctggttggcacaggccgccccgcgttcccagctggggaaggaaggcgggcggccaggcggggggaaagaaagcgggaggtggggcggggtgctgtccgtccccacggcctcgtcgcgcgcggggctttttccaggacttggggacttccggggttgcgctgtcgtgtcaggccgttgggccgccgaggggtgtcgctgcgcccgctgccccgcgcggccctttaaactttgttttttaaacttcgggggtgtggtcgcggcgcctcccctctcggcggctggcagtccttgcctctgccccgccttccagatgctttggagtcatgagccgggagggcgcgggggcagctttggtagccgaggtgatcaaagatcgcctttgttttgccattctctacagcagaccaaagagtgcatcaaatgtacattatttcagcatagataatgaacttgaatatgagaacttctacgcagattttggaccactcaatctggcaatggtttacagatattgttgcaagatcaataagaaattaaagtccattacaatgttaaggaagaaaattgttcattttactggctctgatcagagaaaacaagcaaatgctgccttccttgttggatgctacatggttatatatttggggagaaccccagaagaagcatatagaatattaatctttggagagacatcctatattcctttcagagatgctgcctatggaagttgcaatttctacattacacttcttgactgttttcatgcagtaaagaaggcaatgcagtatggcttccttaatttcaactcatttaaccttgatgaatatgaacactatgaaaaagcagaaaatggagatttaaattggataataccagaccgatttattgccttctgtggacctcattcaagagccagacttgaaagtggttaccaccaacattctcctgagacttatattcaatattttaagaatcacaatgttactaccattattcgtctgaataaaaggatgtatgatgccaaacgctttacggatgctggcttcgatcaccatgatcttttctttgcggatggcagcacccctactgatgccattgtcaaagaattcctagatatctgtgaaaatgctgagggtgccattgcagtacattgcaaagctggccttggtcgcacgggcactctgatagcctgctacatcatgaagcattacaggatgacagcagccgagaccattgcgtgggtcaggatctgcagacctggctcggtgattgggcctcagcagcagtttttggtgatgaagcaaaccaacctctggctggaaggggactattttcgtcagaagttaaaggggcaggagaatggacaacacagagcagccttctccaaacttctctctggcgttgatgacatttccataaatggggtcgagaatcaagatcagcaagaacccgaaccgtacagtgatgatgacgaaatcaatggagtgacacaaggtgatagacttcgggccttgaaaagcagaagacaatccaaaacaaacgctattcctctcacagtaattcttcaatccagtgttcagagctgtaaaacatctgaacctaacatttctggcagtgcaggcattactaaaagaaccaccagatctgcttcaaggaaaagcagtgttaaaagtctctccatttcaaggactaaaacagtcttgcgttaagtaaaaacctgtgaccagagctgaaggaagactctaggactgaaaactgcaacagaaattagcacaatttgaaaacaaaacaaaattgcaaaagccttagttgctttttccacctaagaagttgatcaatggagaaaatgtccactggagtttgaataatgaactttgagtttgggtgcaagcaaatgactcagagaagggtccagctctcaagctgaatgacaaacatgctgttgtaaatttagtctcaggtgtaaatacccaagccctctggtacccagggagctggctggtctgtggtgcatgtgtgtccctgtgatggcaatcattgtagttgctggccttcagaagaattgaggatctgatggaggttttttatgtatttattttctgttcaccttgtgaccctgtgtcaaaatttataaagatacaaaaggcattactgaaatggtactttctgtaatttgatactatttggcttaatcatcttcacttgactatttgtaatactgttgtaatgttaactctgttaagtacccaagctgcttgtcttccaccaaagagtgctttattaacaagaatctgtgaaaatcacatttaaacactgttgcatgttgtaagaccaggtggtaccttagtaacctaaaacttgcaagagaatattaatggtagctttagaagactcaggaggagaaactgacttcagagttggaagatgttgcaagtcgttcctttttctgtccttcagggactgaagaactgggaggctgcccattgtttggttgccagtcatacaaattaaaatcatatttccttccatgaatggaagaaacacactattggtttttccccttggaaacagcaatcccaaataatgtcggcttacaaaaaaaaaaagttaccacttttttagagtccttccctgtaacattggattttttttttcccttatgagatccacctaaggccattgacgtggcctgcgatctcagtgacaatgatctgcttctggatctcactgttgcctttggttagggaacacaactagtaactctgcagagtgccttctcccgcagccctactggaacacagcagagtctgtgccatgaagcagttacagaaacagaattgatgtgctgct

SEQ ID NO: 3537 - DNA, 1734 bp, Homo sapiens
  source 1..1734: mol_type = unassigned DNA; mol_type = unassigned DNA
ctgacgggccgcggccgcctccatgaagcggaaaagcgagcggcggtcgagctgggccgccgcgcccccctgctcgcggcgctgctcgtcgacctcgccgggtgtgaagaagatccgcagctccacgcagcaagacccgcgccgccgggacccccaggacgacgtgtacctggacatcaccgatcgcctttgttttgccattctctacagcagaccaaagagtgcatcaaatgtacattatttcagcatagataatgaacttgaatatgagaacttctacgcagattttggaccactcaatctggcaatggtttacagatattgttgcaagatcaataagaaattaaagtccattacaatgttaaggaagaaaattgttcattttactggctctgatcagagaaaacaagcaaatgctgccttccttgttggatgctacatggttatatatttggggagaaccccagaagaagcatatagaatattaatctttggagagacatcctatattcctttcagagatgctgcctatggaagttgcaatttctacattacacttcttgactgttttcatgcagtaaagaaggcaatgcagtatggcttccttaatttcaactcatttaaccttgatgaatatgaacactatgaaaaagcagaaaatggagatttaaattggataataccagaccgatttattgccttctgtggacctcattcaagagccagacttgaaagtggttaccaccaacattctcctgagacttatattcaatattttaagaatcacaatgttactaccattattcgtctgaataaaaggatgtatgatgccaaacgctttacggatgctggcttcgatcaccatgatcttttctttgcggatggcagcacccctactgatgccattgtcaaagaattcctagatatctgtgaaaatgctgagggtgccattgcagtacattgcaaagctggccttggtcgcacgggcactctgatagcctgctacatcatgaagcattacaggatgacagcagccgagaccattgcgtgggtcaggatctgcagacctggctcggtgattgggcctcagcagcagtttttggtgatgaagcaaaccaacctctggctggaaggggactattttcgtcagaagttaaaggggcaggagaatggacaacacagagcagccttctccaaacttctctctggcgttgatgacatttccataaatggggtcgagaatcaagatcagcaagaacccgaaccgtacagtgatgatgacgaaatcaatggagtgacacaaggtgatagacttcgggccttgaaaagcagaagacaatccaaaacaaacgctattcctctcacatgtcccctagctgtgctgacctctgcactgtgtagtgttgtcatctggtggattgtttgtgactacattcttcccatcctgctattctgtctcgatggtttcagaacacagtagccatcaggaccccctgacagatagctgcttctctccatttcaaggactaaaacagtcttgcgttaagtaaaaacctgtgaccagagctgaaggaagactctaggactgaaaactgcaacagaaattagcacaatttgaaaacaaaacaaaattgcaaaagccttagttgctttttccacctaagaagttgatcaatggagaaaatgtccactggagtttgaataatgaactttgagtttgggtgcaagcaaatg

SEQ ID NO: 3538 - DNA, 689 bp, Homo sapiens
  source 1..689: mol_type = unassigned DNA; mol_type = unassigned DNA
tacagtgatgatgacgaaatcaatggagtgacacaaggtgatagacttcgggccttgaaaagcagaagacaatccaaaacaaacgctattcctctcacatgtcccctagctgtgctgacctctgcactgtgtagtgttgtcatctggtggattgtttgtgactacattcttcccatcctgctattctgtctcgatggtttcagaacacagtagccatcaggaccccctgacagatagctgctacatagccagaatgcctttaataggctaatagcagcaaatctgtattctcttgagatctttcatctttgaaatgaagaccttaacagcgaagaggctttatttctgcagaagaatgtacaagaggcccacttgtggaacagcatgttgaagacccccagaaggcgggtgtgtccgtgtcacggggtccaccgccacccttctgtgtctgagctgcgttcttccttctctgaagctttttccttaactcatattttaagaatttcttctcttgtctcctcttggacttggaagttatgaaagaatgcaaaagttccttgcaagatctcttccaaagaaaaattccattgcaaccaactctggtactttgtggtttcactgagtattttcacatagctgagaaagatttaaaaatcaagctgatttcactcttcagaattaggcaaaac

SEQ ID NO: 3539 - DNA, 804 bp, Homo sapiens
  source 1..804: mol_type = unassigned DNA; mol_type = unassigned DNA
gatgctttggagtcatgagccgggagggcgcgggggcagctttggtagccgaggtgatcaaaggaaggaacattgcaatttttccatttcagatcgcctttgttttgccattctctacagcagaccaaagagtgcatcaaatgtacattatttcagcatagataatgaacttgaatatgagaacttctacgcagattttggaccactcaatctggcaatggtttacagatattgttgcaagatcaataagaaattaaagtccattacaatgttaaggaagaaaattgttcattttactggctctgatcagagaaaacaagcaaatgctgccttccttgttggatgctacatggttatatatttggggagaaccccagaagaagcatatagaatattaatctttggagagacatcctatattcctttcagagatgctgcctatggaagttgcaatttctacattacacttcttgactgttttcatgcagtaaagaaggcaatgcagtatggcttccttaatttcaactcatttaaccttgatgaatatgaacactatgaaaaagcagaaaatggagatttaaattggataataccagaccgatttattgccttctgtggacctcattcaagagccagacttgaaagtggttaccaccaacattctcctgagacttatattcaatattttaagaatcacaatgttactaccattattcgtctgaataaaaggatgtatgatgccaaacgctttacggatgctggcttcgatcaccatgatcttttctttgcggatggcagcacccc

SEQ ID NO: 3540 - DNA, 684 bp, Homo sapiens
  source 1..684: mol_type = unassigned DNA; mol_type = unassigned DNA
gctccccgccggggcctcgagaaggaaggtgtcacgttggtggcattcgagccagccggcaagacgaatgtccgggttgtcacttttgagaaatcccagccagccagagcagatcgcctttgttttgccattctctacagcagaccaaagagtgcatcaaatgtacattatttcagcatagataatgaacttgaatatgagaacttctacgcagattttggaccactcaatctggcaatggtttacagatattgttgcaagatcaataagaaattaaagtccattacaatgttaaggaagaaaattgttcattttactggctctgatcagagaaaacaagcaaatgctgccttccttgttggatgctacatggttatatatttggggagaaccccagaagaagcatatagaatattaatctttggagagacatcctatattcctttcagagatgctgcctatggaagttgcaatttctacattacacttcttgactgttttcatgcagtaaagaaggcaatgcagtatggcttccttaatttcaactcatttaaccttgatgaatatgaacactatgaaaaagcagaaaatggagatttaaattggataataccagaccgatttattgccttctgtggacctcattcaagagccagacttgaaagtggttaccaccaacattct

SEQ ID NO: 3541 - DNA, 459 bp, Homo sapiens
  source 1..459: mol_type = unassigned DNA; mol_type = unassigned DNA
ggaccactcaatctggcaatggtttacagatattgttgcaagatcaataagaaattaaagtccattacaatgttaaggaagaaaattgttcattttactggctctgatcagagaaaacaagcaaatgctgccttccttgttggatgctacatggttatatatttggggagaaccccagaagaagcatatagaatattaatctttggagagacatcctatattcctttcagagatgctgcctatggaagttgcaatttctacattacacttcttgactgttttcatgcagtaaagaaggcaatgcagtatggcttccttaatttcaactcatttaaccttgatgaatatgaacactatgaaagagagaccaagtctcgctctgttacctaggctgaagtgcagtggtatacatggctcactgcagccttgaacttctgggattaaatgatcctctctctt

SEQ ID NO: 3542 - DNA, 649 bp, Homo sapiens
  source 1..649: mol_type = unassigned DNA; mol_type = unassigned DNA
gtgaagaagatccgcagctccacgcagcaagacccgcgccgccgggacccccaggacgacgtgtacctggacatcaccgatcgcctttgttttgccattctctacagcagaccaaagagtgcatcaaatgtacattatttcagcatagataatgaacttgaatatgagaacttctacgcagattttggaccactcaatctggcaatggtttacagatattgttgcaagatcaataagaaattaaagtccattacaatgttaaggaagaaaattgttcattttactggctctgatcagagaaaacaagcaaatgctgccttccttgttggatgctacatggttatatatttggggagaaccccagaagaagcatatagaatattaatctttggagagacatcctatattcctttcagagatgctgcctatggaagttgcaatttctacattacacttcttgactgttttcatgcagtaaagaaggcaatgcagtatggcttccttaatttcaactcatttaaccttgatgaatatgaacactatgaagtaagtcttcaaggatcatgttttcaactcttcctccccccgcccagctttattgaggggaataattgacaaataaaacttatatatacttaagatgtacaaa

SEQ ID NO: 3543 - DNA, 553 bp, Homo sapiens
  source 1..553: mol_type = unassigned DNA; mol_type = unassigned DNA
aaacccccgctgctccgtagccttgggaccctgggcgccgcgttgcccgtccggcgcgtaagcccgagcccctctcctgggcctcccgcgccctgccccctagcgcgccccccgaacgcctccgcctcccggggtccgctccccgccggggcctcgagaaggaaggtgtcacgttggtggcattcgagccagccggcaagacgaatgtccgggttgtcacttttgagaaatcccagccagccagagcagcagaccaaagagtgcatcaaatgtacattatttcagcatagataatgaacttgaatatgagaacttctacgcagattttggaccactcaatctggcaatggtttacagatattgttgcaagatcaataagaaattaaagtccattacaatgttaaggaagaaaattgttcattttactggctctgatcagagaaaacaagcaaatgctgccttccttgttggatgctacatggttatatatttggggagaaccccagaagaagcatatagaatattaatctttggagagacatcctatattcct

SEQ ID NO: 3544 - DNA, 350 bp, Homo sapiens
  source 1..350: mol_type = unassigned DNA; mol_type = unassigned DNA
ttatttcagcatagataatgaacttgaatatgagaacttctacgcagattttggaccactcaatctggcaatggtttacagatattgttgcaagatcaataagaaattaaagtccattacaatgttaaggaagaaaattgttcattttactggctctgatcagagaaaacaagcaaatgctgccttccttgttggatgctacatggtaagtatttgttttcctaatgtattcataaaaatgcacacaacagtggttctttacatttgcagttggaattttgaaatcaagataatgtcttgatttctcttcagaaagaacgtgttttgcttttaaaaaattgaccaattca

SEQ ID NO: 3545 - DNA, 2181 bp, Homo sapiens
  source 1..2181: mol_type = unassigned DNA; mol_type = unassigned DNA
gatccagcccgcggagcccgcggccagggcggcgcagaccggcccagcgactctcccgggctgccagccgggacgcgcggccgccgccgctgcagacgacgagtccgccctcgtcccgcgcccccggggctcgcggagccaggtctccacctctgggcaggagagttgccgaccacctcgggggtgctttctctgcgcttgaacatctatagctgcttctgaggggctgggagccgggcccctgggagagacgagccatgaaccccccacagcctctgcatttggggacctcaccttaggagagtgccatttacagcttccgccagggcaaaggagctgagcagccatcccaagcccagcccacctccctcccccggcccctggtaggcatggactagcagctgtgagcagccagagctgatgcccggcccccaggggggcagaggcgccgccaccatgagcctgggcaagctctcgcctgtgggctgggtgtccagttcacagggaaagaggcggctgactgcagacatgatcagccacccactcggggacttccgccacaccatgcatgtgggccgtggcggggatgtcttcggggacacgtccttcctcagcaaccacggtggcagctccgggagcacccatcgctcaccccgcagcttcctggccaagaagctgcagctggtgcggagggtgggggcgcccccccggaggatggcatctccccctgcaccctccccggctccaccggccatctcccccatcatcaagaacgccatctccctgccccagctcaaccaggccgcctacgacagcctcgtggttggcaagctcagcttcgacagcagccccaccagctccacggacggccactccagctacggcctggactctgggttctgcaccatctcccgcctgccccgctcggaaaagccgcatgaccgagaccgggatggttccttcccctctgagcccgggcttcgccgctctgactctctcttgtccttccgcctggacctcgaccttgggccctcactcctcagcgagctgctaggggtcatgagcctcccagaagcccctgcagctgagactccagcccccgctgcaaaccccccagcccctactgcaaaccccacgggtcctgctgcaaaccccccagccactactgcaaaccccccagcgcctgctgcaaacccctcagcacctgccgcaacccccacgggtcctgctgcaaatcccccagcccctgccgcaagctccacaccccatggacactgtcccaatggggtaacagctgggttgggcccagtggctgaggtgaagtccagcccagtgggagggggtccccgaggacctgctggccctgccctcggcaggcactggggagcaggctgggatggcggccaccactacccagagatggatgcgcggcaggagcgggtggaggtgctgccccaagcccgggcctcctgggagagcctggacgaagagtggagggcgccccaggcaggcagcaggaccccagtgcccagcacagtgcaagcaaacacctttgaatttgcggatgctgaggaggatgatgaggtcaaggtgtgaggggctggggcacggtcccagggccccacctaggtgcagagccggcccctcacctaacagctggttcctaccagaccggagaggggagaagtcatgttgcccctaaacccctccccacctctgcaggacagacatgggagggaggacagggaaggccaggcttgctctgggacttttatgctcccagaggccctgccaaactgaccacctcccccgactgccactctggacctaatagctgttccttaggccccactccatgccacccccaccagctggaggacccagcctcacagtgtgtcctttgtgccagaccaagcggcccgtggggggtggggggcagggagtgtaccacacagggccattgtctcacctcccaaagggaccgcctgcccccagctcatcccagagcgtccctgctgcaaccctgacagccgtctcccaggccgcttccccaacatccccgccccagcctccctcttaccccagaaaggtcaggtatgacctcccggggaggaatcccacctgcctgtataccccagacttgcctctggggcctgattaaataaggctgttttgataaaa

SEQ ID NO: 3546 - DNA, 720 bp, Homo sapiens
  source 1..720: mol_type = unassigned DNA; mol_type = unassigned DNA
gcagaccggcccagcgactctcccgggctgccagccgggacgcgcggccgccgccgctgcagacgacgagtccgccctcgtcccgcgcccccggggctcgcggagccagacggaatgttgctcttgttgccgaggctggagtgccgtgatgtgatcttggctcactgcaacctctgcctccaaggttcaagtgattctcctgccacagcttcctgggtagctgggattacaggtctccacctctgggcaggagagttgccgaccacctcgggggtgctttctctgcgcttgaacatctatagctgcttctgaggggctgggagccgggcccctgggagagacgagccatgaaccccccacagcctctgcatttggggacctcaccttaggagagtgccatttacagcttccgccagggcaaaggagctgagcagccatcccaagcccagcccacctccctcccccggcccctggtaggcatggactagcagctgtgagcagccagagctgatgcccggcccccaggggggcagaggcgccgccaccatgagcctgggcaagctctcgcctgtgggctgggtgtccagttcacagggaaagaggcggctgactgcagacatgatcagccacccactcggggacttccgccacaccatgcatgtgggccgtggcggggatgtcttcggggacacgtccttcctcagcaaccacggtggcagc

SEQ ID NO: 3547 - DNA, 588 bp, Homo sapiens
  source 1..588: mol_type = unassigned DNA; mol_type = unassigned DNA
agtattgagatttctatgcttggaggtggcagcaatggttttaaaaaaggaagaaggctgagccgcagacataggtgttcttaaggatcattattgacttttatcagctgaggtcccaggtctgtgtaggtctccacctctgggcaggagagttgccgaccacctcgggggtgctttctctgcgcttgaacatctatagctgcttctgaggggctgggagccgggcccctgggagagacgagccatgaaccccccacagcctctgcatttggggacctcaccttaggagagtgccatttacagcttccgccagggcaaaggagctgagcagccatcccaagcccagcccacctccctcccccggcccctggtaggcatggactagcagctgtgagcagccagagctgatgcccggcccccaggggggcagaggcgccgccaccatgagcctgggcaagctctcgcctgtgggctgggtgtccagttcacagggaaagaggcggctgactgcagacatgatcagccacccactcggggacttccgccacaccatgcatgtgggccgtggcggggatgtcttcggggaca

SEQ ID NO: 3548 - DNA, 564 bp, Homo sapiens
  source 1..564: mol_type = unassigned DNA; mol_type = unassigned DNA
ttgaatatgctcacgcatggaggaggcagctggaaaaagccacttttgaccacaggatccttattccaggaagctccttgaaggtggatggttcagaggaacctctgctctggctgtttacccagcttcacaaagctttggtctccacctctgggcaggagagttgccgaccacctcgggggtgctttctctgcgcttgaacatctatagctgcttctgaggggctgggagccgggcccctgggagagacgagccatgaaccccccacagcctctgcatttggggacctcaccttaggagagtgccatttacagcttccgccagggcaaaggagctgagcagccatcccaagcccagcccacctccctcccccggcccctggtaggcatggactagcagctgtgagcagccagagctgatgcccggcccccaggggggcagaggcgccgccaccatgagcctgggcaagctctcgcctgtgggctgggtgtccagttcacagggaaagaggcggctgactgcagacatgatcagccacccactcggggacttccgccacaccat

SEQ ID NO: 3549 - DNA, 5700 bp, Homo sapiens
  source 1..5700: mol_type = unassigned DNA; mol_type = unassigned DNA
ccggagcccgggctgagagggacctggggagctgcggcctggccggggcggcgcactcaggtggcctcgcttccctgcgggtcaccgcccgccactcgcacagctaggtcggcctgttgggatcgggagaggtgggcgcacgagttttagtgcgggagtccggggtgcgggcggagtcctattgtccccgtgcacccgggcggcagcacctccgggtccctctttaaaccgagcgtccggcgacctttctttgtgcttagggagtcgaaagcggcatcttctccgagagaagtcgcctactggggggtggcgctggggaggtaacaatgggcgcccattgtcctccgagggtccaacggtgacccccccccgcgcgcgcgcccggccaccggttggccccgggccagggcacaggtaccgcggctgggagggtcggccccgctgcccgcgccctccgccccgccccagtgagtccccgcgccgccggccccgccccgcgccgccccgccctccgcaggttcagtcctcgcgtccggccgccccgcgctcagtcgcgcgcaccttctctcgcggccgggggaccgcagcgcggggctagcccggagacccggccaccggcctggggcgccttcacgccgtctcggagcggataatgcggtgagcaggcaccacgccggcagactcggctggatctgcgcacagcggcagggattgcgtgcgcccgcgggaggcccggggcagcggctgggatcctcagcggcggccggtttgtcctggttgtggtcaagactggatgatgtaactggctctctaggaagcctcacttggccgtaacctcaggaaggttctctttgaccccatctcatttcgaagccacttctgaagccacttgagaaaaatgatgtgacagttcctatcaaaaaggattcagaaacatataccatctgtgaagaaagtggccctttctcccgcttgcaaaatagacattctcaaattccaaaatgccagccaagaccccaatttacctgaaagcagccaataacaagaaaggaaagaaatttaaactgagggacattctgtctcctgatatgatcagtcccccgcttggagactttcgccacaccatccacattggcaaagagggccagcacgatgtctttggagatatttcctttcttcaagggaactacgagcttttacctggaaaccaggagaaagcacacctgggccagttccctgggcataatgagttcttccgggccaacagcacctcggactctgtgttcacagaaacgccctccccggtgctcaaaaatgccatctccctcccgaccattggaggatcccaagctctcatgttgcccttattgtcaccagtgacatttaattccaaacaggagtccttcgggccagcaaagctgcccaggcttagctgcgagcccgtcatggaggaaaaagctcaggagaaaagcagtctgttggagaatgggacagtccaccagggagacacctcgtggggctccagcggttctgcatctcagtccagccaaggcagagacagccactcctccagcctgtccgaacagtaccccgactggccagccgaggacatgtttgaccatcccaccccatgcgagctcatcaagggaaagactaagtcagaggagtccctctctgaccttacaggttccctcctctccctgcagcttgatcttgggccctcacttttggatgaggtgctgaatgtaatggataaaaataagtaacaagatgccaacttttttcctttggggtaaaaggtacaaaaacaaactaaccacagttgaagagaagggcttccggagctgtatttgcagttttgtgttgggttttctaaaataatattcttacaaagtatttttttacctgttatgccctgtttgcaaaaacaatttagaaaaaaacaacaaagcaaaacctatcttggcaaaaaaaggaagtgagtcagagcccattttcaggaggcattggtgatgttcggctcacatattgtttgcagacacacaagaaatctggcttggccaggattggcactagctatgaagggctgagcgagtcacattaaggaacttcacggaactttatagcactccgacattttctgagcaagaggaagtcaaaatttatttaacacctaagcctttttgtagactcttttctatatattgcttaggctcaccatagcgaattctccagtgttaaaacttttctgttttcacatttgaactttatgggttttggggattttcttgtagttcttatatatccctatatattatatctatattgcaaaattttgactgtcagctacatgttggtaagacacaggcaaagtattactgtaactaagttatttttaaagttaaaatatatttttacgtgcctttggctttttattgcagagtctacattttatagattctacatcagatgttgtcacttatttccattgggattccattgtaagctgtgtatgtgcgtgtttggaaaagtgtattcatacttagtttttttttcttcatctgttatcatacttttaacagcaaccaataacggattgtaaagtgtaaaggcacaggttactcatgatgcttctgcagagactgtgggctacaccacatatgttatttggaaatataggtattttagtacagtacatacttgcattacataggtacttcaagcaacacaataaaaagtaaatgataaagtgaacttgcttgtttatagtaataaacaagaccataagagaataagtatagctagagaaattgcttctctgaaatgtacatgagcccttaaggtaagagatgatttccatctactctcattttgattacttccttatggtttgagaggctagaaactgagcctctctacttttggaaaaatgaacatgtgaggtcagatttttttttttttttttaagtcagcactgatgccaccctctcagtggtcatttctgagcatcttcctgacttgaacaccttctacagcaaactcttgcaagtccagtttcatccctgtaaggcaaatgtcttttcacgcagaaagtgccatatagacgagataaaggcagctaaaacgagggcagtagagagcacttacccgaccccaaggtgccagagatgccctgaggatggtggttaaggaaacaggagcaggaaatgtacacacagattcctgtccctttgccaactactccttccccatcaaagaaaaacacttgcacacagtaactaccagctccttctctcaaacttgtatttctcctggaaatgtatctcagaaatgacctcctctcccaaccacttcaacgattctttctttgggtttggggttcttgcagttctatcatctaaaataacctttggactgcaggtaaaatgcaattaggacaactaaccaagtagacgaaacaagttcccctaggcaggggtgtccaatattttagcttccctggaccgcattggaagaattttcttgggccacatgtaaaacacactaacactaaccatagttgatgagcttaaaaaaataaaaatagaaaattgcaaaaaaaaaaaaaaaaaaaaatctcagactgttttaagaaagtttaaaaatttgtgttggacttcatgcgggccacaggttggacaagcttgccctagggcattgtgtgctttccgtaacttctcagttgtatttcgttatccatgactctccagtgttttttctgttggaccacacccgtcacagttcacagttccaaagagaaatttcccagcctattctaaatcttgttaatgacgaagagtccaatgtatctcattatttgtagccaattttagactcttttcaatacctcccccccattttaattagtattgatcatattcagtctttcattttactcttcatctgtagcgtgacctcaaggtaaagatgaaactatttcatgaaaaggggaggagtatggctgtgcattagctctactccctctctggtaagtactggggagagaacagccctgccagtactgggtttgatagattctaaatattaatcacacatcctgcctacagttagccattttagtttctgggagttctttcatgtacattttcttccattaattgaattaggtataattgagatggcaataaatatgcccgtattagaaagaggaaacaaagctacatgcggcttatgattttgttgagtcacttctcccgaggcagcctttccaatgcctggtcccttcccctgagagcaggtggactgctggtggtggctttctttcctgcagagaggcactttagacccatacctgctgtgagctgaattgatgttctcatcctgtgaaccttctcccactttaacctaatttatctttacttgtttaaagataaggaaacccaagatgtactttatttgcaaactcaaagcaaatggcgagccacctgtgacccagtaaccagaaaagaaaccatgccatttgtataagtagagacacttcttgttgaggtaggcaaggctcttgtgagcgatttttttcccctagtgagacctaacaaaagacaagctatatcatttctgcctgaaattatctgcttgaaaagatcaaaatatcaggatacttagctcttcacaaatatgaagtcattatcacatttcactgagccagaaatcactgttaacagcacacacaaaagactacactggttgaacagcaaagagaaacccgggtctccagaatcacagtttagtccttctatattactgcaagtgacctgttttttctgaaggctccccgcaaatgaagtcctggaatggaaaaaatccataagtccataaattaacttgataaatattttagaacagacaaaagaaaatattgagtgatgtagttctaatcctcctaatatggaacctggcaagactgaatcattttactgtgaaatatataaacacaatagaatgagccaacatgatggtttctctccagtaagagtttttcttttggaaatgaggttaacctagccccaaatctagcaattctcataaaatccgattttagaattagcctcccagattaatctgaatgattgacttattttttcttaggcaagtcagtaagccacccactagacagccatatccagcaaaataagagaagtttccagatgccaaatgataagccaccatcaacccagcggggaagccttctggttggtttggctgtatgagattcaggaaggccagaatacccaaaattattcacacgacgttaacttattggtactggctaagcaatacatgtatttcctaaaggaggagatggtcttttggttgatttatggacacacttgtttcatctgactgtaaatatattgcatgctttattctgatggtgcactatttcatccagcaagcttttcatctgagaatgtttaatgttgaccttattcttagagcaagtagatctaaatatttttcagctgagttattagggagtcattattctgtggtacaatgctgcaaaaagcatcatgtggaagaatgggaactatgcttactttatgaagtgatgtataacacaatgaaatctgttttacaactactgtgctgcatttaattatcttccatttttgctgttaaaaaaaaaaaatccgttaa

SEQ ID NO: 3550 - DNA, 997 bp, Homo sapiens
  source 1..997: mol_type = unassigned DNA; mol_type = unassigned DNA
cgcgcccaccggagcccgggctgagagggacctggggagctgcggcctggccggggcggcgcactcaggtggcctcgcttccctgcgggtcaccgcccgccactcgcacagctaggtttgtcctggttgtggtcaagactggatgatgtaactggctctctaggaagcctcacttggccgtaacctcaggaaggttctctttgaccccatctcatttcgaagccacttctgaagccacttgagaaaaatgatgtgacagttcctatcaaaaaggattcagaaacatataccatctgtgaagaaagtggccctttctcccgcttgcaaaatagacattctcaaattccaaaatgccagccaagaccccaatttacctgaaagcagccaataacaagaaaggaaagaaatttaaactgagggacattctgtctcctgatatgatcagtcccccgcttggagactttcgccacaccatccacattggcaaagagggccagcacgatgtctttggagatatttcctttcttcaagggaactacgagcttttacctggaaaccaggagaaagcacacctgggccagttccctgggcataatgagttcttccgggccaacagcacctcggactctgtgttcacagaaacgccctccccggtgctcaaaaatgccatctccctcccgaccattggaggatcccaagctctcatgttgcccttattgtcaccagtgacatttaattccaaacaggagtccttcgggccagcaaagctgcccaggcttagctgcgagcccgtcatggaggaaaaagctcaggagaaaagcagtctgttggagaatgggacagtccaccagggagacacctcgtggggctccagcggttctgcatctcagtccagccaaggcagagacagccactcctccagcctgtccgaacagtaccccgactggccagccgaggacatgtttgaccatcccaccccatgcgagctcatcaaggg

SEQ ID NO: 3551 - DNA, 953 bp, Homo sapiens
  source 1..953: mol_type = unassigned DNA; mol_type = unassigned DNA
ccacaagcaaggctttgcctatgttttctcctggctccttctgcctcctgaccaaccctggtgcttccccgtgtggacccctgtgacatggcatgcccttcttgggagctgcagaaacgagtaatgtgagagcctgcaattgtaatcttcataaagtatatcacataccgttcaaaaacatcaagtggcatgttaaataagcttttggagaataagttgagcgtgacaccacaagaagaaaaacagaatccatgacttctcaaaacatgatcttgcttcagatgagaaagctctgtgcttagtttgctgtgagtacttctttgtgtccattgtggcctcctatctaacataaggattcctttccccaagtggtggaacagtgggtaggagagtctgttcatatcccaaaggtgtgccaaaaggatttatcaagaaggggatgacggaggttgctcttccaaaagcgtccagagtcactgagacctgacctgtgtattttgtatcctatccatgtcagcacttctccttgctgccaccgtgtgaagaaggacgtgtttgcttccccttccaccatgattgtaagtttcctgaggcctccccagccatgctgaactgtttgtcctggttgtggtcaagactggatgatgtaactggctctctaggaagcctcacttggccgtaacctcaggaaggttctctttgaccccatctcatttcgaagccacttctgaagccacttgagaaaaatgatgtgacagttcctatcaaaaaggattcagaaacatataccatctgtgaagaaagtggccctttctcccgcttgcaaaatagacattctcaaattccaaaatgccagccaagaccccaatttacctgaaagcagccaataacaagaaaggaaagaaatttaaactgagggacattctgtctcctgatatgatcagtcccccgct

SEQ ID NO: 3552 - DNA, 542 bp, Homo sapiens
  source 1..542: mol_type = unassigned DNA; mol_type = unassigned DNA
gcagatcatgggggctcccttcgaattctgcctactgcatggaggatatagccttatcagtaatgtttcagaagtgttcccaagtgaaggcccagcctgtaatagagattcacaatgttttctctttgaagtgaagcagttttgttcatttcctcccatctcagaatgacttcaaatcctgacatcctcgacagcccaatactttgccacaacctgattacaactctagctctcttatttactggctatatgttattgagaaaaggtttgtcctggttgtggtcaagactggatgatgtaactggctctctaggaagcctcacttggccgtaacctcaggaaggttctctttgaccccatctcatttcgaagccacttctgaagccacttgagaaaaatgatgtgacagttcctatcaaaaaggattcagaaacatataccatctgtgaagaaagtggccctttctcccgcttgcaaaatagacattctcaaattccaaaatgccagccaagaccccaatttacctgaaagcagccaataac

SEQ ID NO: 3553 - DNA, 3726 bp, Homo sapiens
  source 1..3726: mol_type = unassigned DNA; mol_type = unassigned DNA
atgccaggcattgtcctaaaacaaaagatgaagcacttctccttgctgccaccgtgtgaagaaggacgtgtttgcttccccttccaccatgattgtaagtttcctgaggcctccccagccatgctgaactgtgagtcagttaaacctctttcctttataaattacctggtctcaggtttgtctttattaacagcgtgaaaatggagtaagacactggggatggtagaagatgaggttagagaggtaggcacagccagggaatgacagaatatttttgtagtcagctgagtactttgtattttatcctgatggctatgagaagccacatgcggtggtccaatctatttgacttggtgactaatgggatctggggagaaggtgtaaaggaaccaggtgagatatgatgacagcctcaaccaaagatataattgacaaataaatggcctcatgtgatcccataggtttcactaggcaggagaagaaaatagaataattctcctatcagtaatattattctccaatgactactcggtaccttttttcattatttatgtaaattttattgcccctattcaatcatcaggtccttgaaggaagatcagagagacctgtgtctaattcatgtttgtgctgctcacactttctaacacagatcttgcacatatcaaagatgctataaatatatattgaataaatattaacacagaatttgtggggggtggtggtgccagagtcagtatttaaaccaagagaaagcccttcaactccctcctttgcagagagattactcattctgccatactgcacatccacaagacatttacagcctaccagagacctttaaagaaagtttcataacatccctgctgaccatctttttggagatggtgggtactagagtctatataatttctacaagattctaaagtagactgccagacattagaaaatgatctgaatttatgagtcagtcatccacaagagctacatgtttgtcagtggcagggccaaaatcaacaggaccttcttgccaaagtttcgagatacccactcacctatttattgatatctaagggttcagggtcatcaggattctctaaagtcatccatttgcaaacatgttccaagaccagcagtattttgtatatgaaagctatcttgcaatgtagactagctgaatgaaatgtctgtctttgtcatgaactttcatgttttcatttcagtaatgcaaaccacaacagtgctatgatcaaccctcatcatcagtatagaagaaattatctagtcctaacccatgttcttactggtttaatcatttatttccagctttctgctctttgtttattatttatgtaagatgttgtagctctgtatgctgagttaaaatgtaatcattttattaatattttttaaaaagttaaatttctaaccataaattataggatgattagttaaagacagaaatcagttttaagcaaaataactaagggcatatcctcttcccagcattttttattaaagaagtattttattttaaaatatttctagacttaacagaaaaattgcaaagataatacagagtcccacataccctatacccattctcacttattaacatcttacattaatattgtccatttgtgataagtaatgaaccaatattgatatatagtttttaattaaagtctatcatgtattaagatttccttagtttttaactaacattctttttctgttccaggatcccatcaacataactcattaaatttagtggttgtgtctctttaggcccttgtttgccatgactgttaagacttcccttgctttttatgaccttgacagttttgaggagttctcctgtcatttctcctcacatattttgtagaatgtcccctaattgggaattatatgatggctttctcgtgattaggctggagttatggatttatgagatgaagaccacagaggtaaaatgtcattctcatcatatatcaaggctgcgtactatcaacaagatttatgactgctgatattgaccttaatcacctgcttggggtggtgtttgttagttttctccactgtaaagttactcctctcatcttttatttgtattttatattattgttattatttgtttatttgttattattttagagacagactctcactctgtcacccaggctagagggcagtggtgtgatcatagcttactgcaaccttgaactcctgggttcaagtgatcctcccacctcgacttccacaagcgctaggattacagcccttctcccccactgcacctccccacatttttatattatactctggaaggaagccacaaggcatagcacacaattaagaagcagcgatttatactccactctttgatggcaaaatatctacagaaattatttgaacttcttctgcccgggagatttatctattgtcccccattgatttatttattcaatcatttgtttgtatcattatggtctcatggatatctattttgcactttcaatactattttattttgttgctcaagttgttccagccctggccatggagaatacattcagttggctcctgtgtccctgtaacatagccctgtcattattggatttggttgagcactttcttactttcaggagctacaaaatgctctaggttcgtcttgtatatttcctgctccatcctagagtccatgtctccaaggagcttggttcttttattggagaatgtattagaaaccaagacctggacatgctccttgttgcaaaggtgttattgcttctaggctcagctgacagagaaataacatatatgtgtgtaaattaacccatgtctatacacatatatctacaaatccttctctttgtaactatctgtatctatattaagctaaatatgagttgatactgatgtctccaatcccaacccagtagcacatagataattctaaccttctcccccttgcttgtttcctctccctcctacaatgaagaacctggcttctgccatcagccattcgtttatttcattgttcaattccagtctcctgtagagtacttccataattgttaagccatacccacatagaaataactttataagtttgagtgcttatacagagctctttttgcctttaatcttacagactcgattcatttccaaacttacttacgtaagcattttctctcacatccccttcagtacgcttatttcatgcatttgtaatacagttagattattttgccatattttacatttcatcctggaatcctccaaccttctaaatattttttaaattttgtataattaagtttctctatgccatgaagttctatgggctttgacaagtgcatagtgtcatgtatctagtattatcacaatatcataaaaagatagttttaccaccctttaaaaaatccctagtggttgacctattcaattcctttcaccaagagtttctgaaaccactggtctatttgccatctccataagagttttgccttttccaggatattacttaaatggaattataccttatgtagccttttaagactggcttttttcacttagcaacatgcatttaagattcatctatgtcttcctgtggtttgacagctcattccattgtgtggatgtgccacagtttatttagccattcacctactaaagtttacttctagtttttggtagttgtaaataaaactgctataaaattct

SEQ ID NO: 3554 - DNA, 5124 bp, Homo sapiens
  source 1..5124: mol_type = unassigned DNA; mol_type = unassigned DNA
cgctggcggtggccgggtgaccggcgggcgcaggtgccaccgcggcctgaattttactctctcgggccggcagctgcgccacttgcgcctcgtcgcgcgtctggggcagccgccaccggcttgccccagctttaggcaaatccttttgaaagaccctgagggagaagaaacgcctccctctgggtttgtcctggttgtggtcaagactggatgatgtaactggctctctaggaagcctcacttggccgtaacctcaggaaggttctctttgaccccatctcatttcgaagccacttctgaagccacttgagaaaaatgatgtgacagttcctatcaaaaaggattcagaaacatataccatctgtgaagaaagtggccctttctcccgcttgcaaaatagacattctcaaattccaaaatgccagccaagaccccaatttacctgaaagcagccaataacaagaaaggaaagaaatttaaactgagggacattctgtctcctgatatgatcagtcccccgcttggagactttcgccacaccatccacattggcaaagagggccagcacgatgtctttggagatatttcctttcttcaagggaactacgagcttttacctggaaaccaggagaaagcacacctgggccagttccctgggcataatgagttcttccgggccaacagcacctcggactctgtgttcacagaaacgccctccccggtgctcaaaaatgccatctccctcccgaccattggaggatcccaagctctcatgttgcccttattgtcaccagtgacatttaattccaaacaggagtccttcgggccagcaaagctgcccaggcttagctgcgagcccgtcatggaggaaaaagctcaggagaaaagcagtctgttggagaatgggacagtccaccagggagacacctcgtggggctccagcggttctgcatctcagtccagccaaggcagagacagccactcctccagcctgtccgaacagtaccccgactggccagccgaggacatgtttgaccatcccaccccatgcgagctcatcaagggaaagactaagtcagaggagtccctctctgaccttacaggttccctcctctccctgcagcttgatcttgggccctcacttttggatgaggtgctgaatgtaatggataaaaataagtaacaagatgccaacttttttcctttggggtaaaaggtacaaaaacaaactaaccacagttgaagagaagggcttccggagctgtatttgcagttttgtgttgggttttctaaaataatattcttacaaagtatttttttacctgttatgccctgtttgcaaaaacaatttagaaaaaaacaacaaagcaaaacctatcttggcaaaaaaaggaagtgagtcagagcccattttcaggaggcattggtgatgttcggctcacatattgtttgcagacacacaagaaatctggcttggccaggattggcactagctatgaagggctgagcgagtcacattaaggaacttcacggaactttatagcactccgacattttctgagcaagaggaagtcaaaatttatttaacacctaagcctttttgtagactcttttctatatattgcttaggctcaccatagcgaattctccagtgttaaaacttttctgttttcacatttgaactttatgggttttggggattttcttgtagttcttatatatccctatatattatatctatattgcaaaattttgactgtcagctacatgttggtaagacacaggcaaagtattactgtaactaagttatttttaaagttaaaatatatttttacgtgcctttggctttttattgcagagtctacattttatagattctacatcagatgttgtcacttatttccattgggattccattgtaagctgtgtatgtgcgtgtttggaaaagtgtattcatacttagtttttttttcttcatctgttatcatacttttaacagcaaccaataacggattgtaaagtgtaaaggcacaggttactcatgatgcttctgcagagactgtgggctacaccacatatgttatttggaaatataggtattttagtacagtacatacttgcattacataggtacttcaagcaacacaataaaaagtaaatgataaagtgaacttgcttgtttatagtaataaacaagaccataagagaataagtatagctagagaaattgcttctctgaaatgtacatgagcccttaaggtaagagatgatttccatctactctcattttgattacttccttatggtttgagaggctagaaactgagcctctctacttttggaaaaatgaacatgtgaggtcagatttttttttttttttttaagtcagcactgatgccaccctctcagtggtcatttctgagcatcttcctgacttgaacaccttctacagcaaactcttgcaagtccagtttcatccctgtaaggcaaatgtcttttcacgcagaaagtgccatatagacgagataaaggcagctaaaacgagggcagtagagagcacttacccgaccccaaggtgccagagatgccctgaggatggtggttaaggaaacaggagcaggaaatgtacacacagattcctgtccctttgccaactactccttccccatcaaagaaaaacacttgcacacagtaactaccagctccttctctcaaacttgtatttctcctggaaatgtatctcagaaatgacctcctctcccaaccacttcaacgattctttctttgggtttggggttcttgcagttctatcatctaaaataacctttggactgcaggtaaaatgcaattaggacaactaaccaagtagacgaaacaagttcccctaggcaggggtgtccaatattttagcttccctggaccgcattggaagaattttcttgggccacatgtaaaacacactaacactaaccatagttgatgagcttaaaaaaataaaaatagaaaattgcaaaaaaaaaaaaaaaaaaaaatctcagactgttttaagaaagtttaaaaatttgtgttggacttcatgcgggccacaggttggacaagcttgccctagggcattgtgtgctttccgtaacttctcagttgtatttcgttatccatgactctccagtgttttttctgttggaccacacccgtcacagttcacagttccaaagagaaatttcccagcctattctaaatcttgttaatgacgaagagtccaatgtatctcattatttgtagccaattttagactcttttcaatacctcccccccattttaattagtattgatcatattcagtctttcattttactcttcatctgtagcgtgacctcaaggtaaagatgaaactatttcatgaaaaggggaggagtatggctgtgcattagctctactccctctctggtaagtactggggagagaacagccctgccagtactgggtttgatagattctaaatattaatcacacatcctgcctacagttagccattttagtttctgggagttctttcatgtacattttcttccattaattgaattaggtataattgagatggcaataaatatgcccgtattagaaagaggaaacaaagctacatgcggcttatgattttgttgagtcacttctcccgaggcagcctttccaatgcctggtcccttcccctgagagcaggtggactgctggtggtggctttctttcctgcagagaggcactttagacccatacctgctgtgagctgaattgatgttctcatcctgtgaaccttctcccactttaacctaatttatctttacttgtttaaagataaggaaacccaagatgtactttatttgcaaactcaaagcaaatggcgagccacctgtgacccagtaaccagaaaagaaaccatgccatttgtataagtagagacacttcttgttgaggtaggcaaggctcttgtgagcgatttttttcccctagtgagacctaacaaaagacaagctatatcatttctgcctgaaattatctgcttgaaaagatcaaaatatcaggatacttagctcttcacaaatatgaagtcattatcacatttcactgagccagaaatcactgttaacagcacacacaaaagactacactggttgaacagcaaagagaaacccgggtctccagaatcacagtttagtccttctatattactgcaagtgacctgttttttctgaaggctccccgcaaatgaagtcctggaatggaaaaaatccataagtccataaattaacttgataaatattttagaacagacaaaagaaaatattgagtgatgtagttctaatcctcctaatatggaacctggcaagactgaatcattttactgtgaaatatataaacacaatagaatgagccaacatgatggtttctctccagtaagagtttttcttttggaaatgaggttaacctagccccaaatctagcaattctcataaaatccgattttagaattagcctcccagattaatctgaatgattgacttattttttcttaggcaagtcagtaagccacccactagacagccatatccagcaaaataagagaagtttccagatgccaaatgataagccaccatcaacccagcggggaagccttctggttggtttggctgtatgagattcaggaaggccagaatacccaaaattattcacacgacgttaacttattggtactggctaagcaatacatgtatttcctaaaggaggagatggtcttttggttgatttatggacacacttgtttcatctgactgtaaatatattgcatgctttattctgatggtgcactatttcatccagcaagcttttcatctgagaatgtttaatgttgaccttattcttagagcaagtagatctaaatatttttcagctgagttattagggagtcattattctgtggtacaatgctgcaaaaagcatcatgtggaagaatgggaactatgcttactttatgaagtgatgtataacacaatgaaatctgttttacaactactgtgctgcatttaattatcttccatttttgctgttaaaaaaaaaaaatccgttaatgatgtc

SEQ ID NO: 3555 - DNA, 3272 bp, Homo sapiens
  source 1..3272: mol_type = unassigned DNA; mol_type = unassigned DNA
agtttgaaccgaggaggccgagcagtcgggcagaggttcccgacggccattggctgctgcggcgccgtgacatcagcgcagaggggtgcgcggggagggttgcgcggggcgggcgcgggcggagcctggaaggggagtgtcctggaggctcccagccctgaaagcccgagagccagagggaaacaaacgccggcgctgacaggggccgccagcccctccgccgcgcggagcccacgaaggggacagcgcagccggcccagagctcgggtctccggggaccgagccttatgatctcctcattgcgtccccctctgcccactggacttggacttcagatctgaccccagacctgccggctacctcgggagggcccacctccccgcccatccagcaagatgccaatcctcaagcaactggtgtccagctcggtgcactccaagcgccgttcccgagcggacctcacggccgagatgatcagcgccccgctgggcgacttccgccacaccatgcacgttggccgggccggagacgcctttggggacacctccttcctcaatagcaaggctggcgagcccgacggcgagtccttggacgaacagccctcttcttcatcttccaaacgcagtctcctgtccaggaagttccggggcagcaagcggtcacagtcggtgaccaggggggagcgggagcagcgtgacatgctgggctccctgcgggactcggccctgtttgtcaagaatgccatgtccctgccccagctcaatgagaaggaggccgcggagaagggcaccagtaagctgcccaagagcctgtcatccagccccgtgaagaaggccaatgacggggagggcggcgatgaggaggcgggcacggaggaggcagtgccccgtcggaatggggccgcgggtccacattcccctgaccccctcctcgatgagcaggcctttggggatctgacagatctgcctgtcgtgcccaaggccacgtacgggctgaagcatgcggagtccatcatgtccttccacatcgacctggggccctccatgctgggtgacgtcctcagcatcatggacaaggaggagtgggaccccgaggagggggagggtggttaccatggcgatgagggcgccgctggcaccatcacccaggctcccccgtacgccgtggcggcccctcccctggcaaggcaggaaggcaaggctggcccagacttgccctccctcccctcccatgctctggaggatgaggggtgggcagcagcggcccccagccccggctcagcccgcagcatgggcagccacaccacacgggacagcagctccctctccagctgcacctcaggcatcctggaggagcgcagccctgccttccgggggccggacagggcccgggctgctgtctcaagacagccagacaaggagttctccttcatggatgaggaggaggaggatgaaatccgtgtgtgaggcggacagtgggtggccaccgggagctcttggctgcatcttctccctgcccccaccccactatgacctttgaccctacggcgcaggggcagccaggacccttgattcagaccatggaccctggaccttgtagatgagggacactggcctggccctcgggtcttcggaggacgtagggggctggcatgggtgccgactggctgcctgacttcatcatgctccctgcacttaggctgcgtgggacaagggctgtgttgtcacagcaggaataggttttcctctgttggcctccctttcctccaccctggcctcaaatggatgccagatgccaaccccagttctggccacgtacagccagcgggtcagcccagaggcagcctcagctccagggctaaggactctcggctcccattttctctgctggcgtttctgctgtgcccagcagtggctgctggggaagcagctgcagcaggagggagacggtcttgcctctcagcccctccctgccccaccccagctcctgccctggaaatctggagccccttggagctgagctggacggggggccagctgcgagcatgtgcactaaacgcagccctttccaggggaagagaacaggatggagaatggaaggaaagccccccaggcttcgtgaattgcaagaagggacccttccaggatgacactaggaacagggctagggcactcgctcagtccctaggggcttgtttgttctttattattgtgtttaaatccttatagagcaatatcaggatggtgttaataggtctgcctcagaatgagaatcaatccttttagaaaacctttatactaagcctcctcttcaaaattcacagtggcgattagcggactggagtctggtggcgattagcggactggagtctggggacatccgtggcaaagacaccagctcaactttagtgcttcccaactttatttagaatgacatggggtgggtgtctggtgtgtgtgttttccctacgcacctcccatagctattaacaactgaggaaggccagtgcagaatatttttggagaacgattttttttttaaataatatatcattcctatggggggaaagccttttttttctttttggctgagttattccctccctcccctcaataccctcagtactgactacttccctttcttttctcaggcctccccccaccgacttttgaggccagggttggccagatttagcaaaaccaaaacagagtgctgagttaaacgcaaatttcaggtaaacaaaagataattttctagcattaatatgccccacgcaatatttggaacacttatgtgaaaaatgatttgtttttctgaaattcacgtttctctctgagtcctgtaactgtccccgaggggattgagcagaagctcgggtatgagccctgaggttgactgccggttatttttctgtcctgggaacagcctgacccacctccctgtctccatgtagccagtgaggggagggggagacacagaaccaaccacagccaggggcgtccccatggcgactgtggcccggcccctcctctcttgcctgactctcctctcttgcctgactctagacactaacttagttccaggttcggtgccctgttggtgctcctgtttccaatagcttaggtcccatggtgggggaggaacctcaggggctatgcagcccccgccagctgccctcgaatcccgtccaggccaattccagattctaaactgatttttttcatgatattgtcaaaacagtgaggaaacattaaaaaaaaagccctaaagca

SEQ ID NO: 3556 - DNA, 2879 bp, Homo sapiens
  source 1..2879: mol_type = unassigned DNA; mol_type = unassigned DNA
acaaacgccggcgctgacaggggccgccagcccctccgccgcgcggagcccacgaaggggacagcgcagccggcccagagctcgggtctccggggaccgagccttatgatctcctcattgcgtccccctctgcccactggacttggacttcagatctgaccccagacctgccggctacctcgggagggcccacctccccgcccatccagcaagatgccaatcctcaagcaactggtgtccagctcggtgcactccaagcgccgttcccgagcggacctcacggccgagatgatcagcgccccgctgggcgacttccgccacaccatgcacgttggccgggccggagacgcctttggggacacctccttcctcaatagcaaggccgcggagaagggcaccagtaagctgcccaagagcctgtcatccagccccgtgaagaaggccaatgacggggagggcggcgatgaggaggcgggcacggaggaggcagtgccccgtcggaatggggccgcgggtccacattcccctgaccccctcctcgatgagcaggcctttggggatctgacagatctgcctgtcgtgcccaaggccacgtacgggctgaagcatgcggagtccatcatgtccttccacatcgacctggggccctccatgctgggtgacgtcctcagcatcatggacaaggaggagtgggaccccgaggagggggagggtggttaccatggcgatgagggcgccgctggcaccatcacccaggctcccccgtacgccgtggcggcccctcccctggcaaggcaggaaggcaaggctggcccagacttgccctccctcccctcccatgctctggaggatgaggggtgggcagcagcggcccccagccccggctcagcccgcagcatgggcagccacaccacacgggacagcagctccctctccagctgcacctcaggcatcctggaggagcgcagccctgccttccgggggccggacagggcccgggctgctgtctcaagacagccagacaaggagttctccttcatggatgaggaggaggaggatgaaatccgtgtgtgaggcggacagtgggtggccaccgggagctcttggctgcatcttctccctgcccccaccccactatgacctttgaccctacggcgcaggggcagccaggacccttgattcagaccatggaccctggaccttgtagatgagggacactggcctggccctcgggtcttcggaggacgtagggggctggcatgggtgccgactggctgcctgacttcatcatgctccctgcacttaggctgcgtgggacaagggctgtgttgtcacagcaggaataggttttcctctgttggcctccctttcctccaccctggcctcaaatggatgccagatgccaaccccagttctggccacgtacagccagcgggtcagcccagaggcagcctcagctccagggctaaggactctcggctcccattttctctgctggcgtttctgctgtgcccagcagtggctgctggggaagcagctgcagcaggagggagacggtcttgcctctcagcccctccctgccccaccccagctcctgccctggaaatctggagccccttggagctgagctggacggggggccagctgcgagcatgtgcactaaacgcagccctttccaggggaagagaacaggatggagaatggaaggaaagccccccaggcttcgtgaattgcaagaagggacccttccaggatgacactaggaacagggctagggcactcgctcagtccctaggggcttgtttgttctttattattgtgtttaaatccttatagagcaatatcaggatggtgttaataggtctgcctcagaatgagaatcaatccttttagaaaacctttatactaagcctcctcttcaaaattcacagtggcgattagcggactggagtctggtggcgattagcggactggagtctggggacatccgtggcaaagacaccagctcaactttagtgcttcccaactttatttagaatgacatggggtgggtgtctggtgtgtgtgttttccctacgcacctcccatagctattaacaactgaggaaggccagtgcagaatatttttggagaacgattttttttttaaataatatatcattcctatggggggaaagccttttttttctttttggctgagttattccctccctcccctcaataccctcagtactgactacttccctttcttttctcaggcctccccccaccgacttttgaggccagggttggccagatttagcaaaaccaaaacagagtgctgagttaaacgcaaatttcaggtaaacaaaagataattttctagcattaatatgccccacgcaatatttggaacacttatgtgaaaaatgatttgtttttctgaaattcacgtttctctctgagtcctgtaactgtccccgaggggattgagcagaagctcgggtatgagccctgaggttgactgccggttatttttctgtcctgggaacagcctgacccacctccctgtctccatgtagccagtgaggggagggggagacacagaaccaaccacagccaggggcgtccccatggcgactgtggcccggcccctcctctcttgcctgactctcctctcttgcctgactctagacactaacttagttccaggttcggtgccctgttggtgctcctgtttccaatagcttaggtcccatggtgggggaggaacctcaggggctatgcagcccccgccagctgccctcgaatcccgtccaggccaattccagattctaaactgatttttttcatgatattgtcaaaacagtgaggaaacattaaaaaaaaagccctaaagc

SEQ ID NO: 3557 - DNA, 737 bp, Homo sapiens
  source 1..737: mol_type = unassigned DNA; mol_type = unassigned DNA
ggaaacaaacgccggcgctgacaggggccgccagcccctccgccgcgcggagcccacgaaggggacagcgcagccggcccagagctcgggtctccggggaccgagccttatgatctcctcattgcgtccccctctgcccactggacttggacttcagatctgaccccagacctgccggctacctcgggagggcccacctccccgcccatccagcaagatgccaatcctcaagcaactggtgtccagctcggtgcactccaagcgccgttcccgagcggacctcacggccgagatgatcagcgccccgctgggcgacttccgccacaccatgcaccagctccctctccagctgcacctcaggcatcctggaggagcgcagccctgccttccgggggccggacagggcccgggctgctgtctcaagacagccagacaaggagttctccttcatggatgaggaggaggaggatgaaatccgtgtgtgaggcggacagtgggtggccaccgggagctcttggctgcatcttctccctgcccccaccccactatgacctttgaccctacggcgcaggggcagccaggacccttgattcagaccatggaccctggaccttgtagatgagggacactggcctggccctcgggtcttcggaggacgtagggggctggcatgggtgccgactggctgcctgacttcatcatgctccctgcacttaggctgcgtgggacaagggctg

SEQ ID NO: 3558 - DNA, 1022 bp, Homo sapiens
  source 1..1022: mol_type = unassigned DNA; mol_type = unassigned DNA
agaaccgaattctccgcctgtacgggcagaggcgtgtacacatctcgctctcgtacacacactgcagcacacgccacccaatgtcacccggccgggaagccagagggaaggagctgtctggaagggaatggccgaaggaacaaatggtcctcctttcccctactcccgccccgcgaacccttccctcccccgccaggctcccgccccgcccgctccctcggaagcccgggaggccgaggcgcctcctggcggggtgcggggggagggcagtcgagccacccgcccccttggagccggggagacggccgctcctgggctagtgcgccccgagctcagcgcgctcagcgggatcgcaggcgggagcggtcggttaatgatttaatcgcccgcttggggcgggtgcgcgcggatcggccgtccctggccccgccccctctccggagcgcccccagccggggttacaaaactgccccctgcccccggcgcgtcccccaggagccatcctgcccgcggggatcccgtcagccgccttatgatctcctcattgcgtccccctctgcccactggacttggacttcagatctgaccccagacctgccggctacctcgggagggcccacctccccgcccatccagcaagatgccaatcctcaagcaactggtgtccagctcggtgcactccaagcgccgttcccgagcggacctcacggccgagatgatcagcgccccgctgggcgacttccgccacaccatgcacgttggccgggccggagacgcctttggggacacctccttcctcaatagcaaggctggcgagcccgacggcgagtccttggacgaacagccctcttcttcatcttccaaacgcagtctcctgtccaggaagttccggggcagcaagcggtcacagtcggtgaccaggggggagcgggagcagcgtgacatgctgggctccctgcgggactcggccctgtttgtcaagaatgccatgtccctgccccagctcaatgagaaggaggccg

SEQ ID NO: 3559 - DNA, 580 bp, Homo sapiens
  source 1..580: mol_type = unassigned DNA; mol_type = unassigned DNA
agagggaaacaaacgccggcgctgacaggggccgccagcccctccgccgcgcggagcccacgaaggggacagcgcagccggcccagagctcgggtctccggggaccgagtttcagggaaagtgtgtccgaggctactggaactctaaccagatttgcaaaatcactcctctactctgaatgcctgcggatgaagaaacaggcagggttataccatggattgctggcttatttcacagcatttaactttgccttatgatctcctcattgcgtccccctctgcccactggacttggacttcagatctgaccccagacctgccggctacctcgggagggcccacctccccgcccatccagcaagatgccaatcctcaagcaactggtgtccagctcggtgcactccaagcgccgttcccgagcggacctcacggccgagatgatcagcgccccgctgggcgacttccgccacaccatgcacgttggccgggccggagacgcctttggggacacctccttcctcaatagcaaggctggcgagcccgacggcgagtccttggacgaacagccctcttcttcatct

SEQ ID NO: 3560 - DNA, 539 bp, Homo sapiens
  source 1..539: mol_type = unassigned DNA; mol_type = unassigned DNA
aacaggccacaaaggaagggattgctgagctgcggatttctgatttctcccagaaatcgggagttggctgggactgagccaggccctaagagagcccctggcagccccaggggctcctggggcaataacagggcatccaccaggatctcctgaggctctatctctgctgagaagccagtgcctactgaatgcgggggtgccctgccggttcctgctctcatcaactgccctgtgtgagctgcacatgtgactgactgattagtggggtggcttatctcctctgaacttggactttgcctctccactccttgaagacagctgctccttcccacaaggggtgttcagtgaatttggggagatcccaagtggattcccaggcatcctggtggacccctgcagggactaggaggggcccgctgtgatcatatgggcggtggttctgggccttatgatctcctcattgcgtccccctctgcccactggacttggacttcagatctgaccccagacctgccggctacctcgggagggcccacctc

SEQ ID NO: 3561 - DNA, 660 bp, Homo sapiens
  source 1..660: mol_type = unassigned DNA; mol_type = unassigned DNA
actccttgaagacagctgctccttcccacaaggggtgttcagtgaatttggggagatcccaagtggattcccaggcatcctggtggacccctgcagggactaggaggggcccgctgtgatcatatgggcggtggttctggggcactgccagcttgcagctctgggctctgtgccaggatggcagtgctggcatccaaagccctcccttgccaggaacaggggaactggctgtctccactcaagctgaggaagggtctctcttttgggattcagatggagctgaaggcatctggaaaaaccacagtgccaggcaagaaggatccctggatgtctgtgctcagccagagctgcttcagccaccatcttctgccttggccatcacggtagcagaggttgtctggggcagcctccacctcccagcatgagactctgggttcttcttttgcccagacacctgcagttctggcagtcactgaacttggtctggagaccccagctttgaatctctccaagtgtgccaacaaagccaggttctgtgtgctggcttctctttcctgcctgtccttcctctctacctcgggtcttcactcagtgcaaccttcttatttccttacactgttgcctccaaccctgaagcatcagaaagggacctgttcccct

SEQ ID NO: 3562 - DNA, 572 bp, Homo sapiens
  source 1..572: mol_type = unassigned DNA; mol_type = unassigned DNA
agccagagggaaacaaacgccggcgctgacaggggccgccagcccctccgccgcgcggagcccacgaaggggacagcgcagccggcccagagctcgggtctccggggaccgaggaatggggtgtgtgtcggtgtgggcaggagcgcagcaatcggcggcgcgcggcccgcgatctccgcgaggggggcgtgtgtgcgcccggagttctccatgaataagaaccgaattctccgcctgtacgggcagaggcgtgtacacatctcgctctcgtacacacactgcagcacacgccacccaatgtcacccggccgggaagccagagggaaggagctgtctggaagggaatggccgaaggaacaaatggtcctcctttcccctactcccgccccgcgaacccttccctcccccgccaggctcccgccccgcccgctccctcggaagcccgggaggccgaggcgcctcctggcggggtgcggggggagggcagtcgagccacccgcccccttggagccggggagacggccgctcctgggctagtgcgccccgagctcagcgcgctcagcgggatcgca

SEQ ID NO: 3563 - DNA, 240 bp, Homo sapiens
  source 1..240: mol_type = unassigned DNA; mol_type = unassigned DNA
atgccaatcctcaagcaactggtgtccagctcggtgcactccaagcgccgttcccgagcggacctcacggccgagatgatcagcgccccgctgggcgacttccgccacaccatgcaccagctccctctccagctgcacctcaggcatcctggaggagcgcagccctgccttccgggggccggacagggcccgggctgctgtctcaagacagccagacaaggagttctccttcatggatga

SEQ ID NO: 3564 - DNA, 4889 bp, Homo sapiens
  source 1..4889: mol_type = unassigned DNA; mol_type = unassigned DNA
agccaatcagcggtacggggggcggtgcctccggggctcacctggctgcagccacgcaccccctctcagtggcgtcggaactgcaaagcacctgtgagcttgcggaagtcagttcagactccagcccgctccagcccggcccgacccgaccgcacccggcgcctgccctcgctcggcgtccccggccagccatgggcccttggagccgcagcctctcggcgctgctgctgctgctgcaggtctcctcttggctctgccaggagccggagccctgccaccctggctttgacgccgagagctacacgttcacggtgccccggcgccacctggagagaggccgcgtcctgggcagagtgaattttgaagattgcaccggtcgacaaaggacagcctatttttccctcgacacccgattcaaagtgggcacagatggtgtgattacagtcaaaaggcctctacggtttcataacccacagatccatttcttggtctacgcctgggactccacctacagaaagttttccaccaaagtcacgctgaatacagtggggcaccaccaccgccccccgccccatcaggcctccgtttctggaatccaagcagaattgctcacatttcccaactcctctcctggcctcagaagacagaagagagactgggttattcctcccatcagctgcccagaaaatgaaaaaggcccatttcctaaaaacctggttcagatcaaatccaacaaagacaaagaaggcaaggttttctacagcatcactggccaaggagctgacacaccccctgttggtgtctttattattgaaagagaaacaggatggctgaaggtgacagagcctctggatagagaacgcattgccacatacactctcttctctcacgctgtgtcatccaacgggaatgcagttgaggatccaatggagattttgatcacggtaaccgatcagaatgacaacaagcccgaattcacccaggaggtctttaaggggtctgtcatggaaggtgctcttccaggaacctctgtgatggaggtcacagccacagacgcggacgatgatgtgaacacctacaatgccgccatcgcttacaccatcctcagccaagatcctgagctccctgacaaaaatatgttcaccattaacaggaacacaggagtcatcagtgtggtcaccactgggctggaccgagagagtttccctacgtataccctggtggttcaagctgctgaccttcaaggtgaggggttaagcacaacagcaacagctgtgatcacagtcactgacaccaacgataatcctccgatcttcaatcccaccacgtacaagggtcaggtgcctgagaacgaggctaacgtcgtaatcaccacactgaaagtgactgatgctgatgcccccaataccccagcgtgggaggctgtatacaccatattgaatgatgatggtggacaatttgtcgtcaccacaaatccagtgaacaacgatggcattttgaaaacagcaaagggcttggattttgaggccaagcagcagtacattctacacgtagcagtgacgaatgtggtaccttttgaggtctctctcaccacctccacagccaccgtcaccgtggatgtgctggatgtgaatgaagcccccatctttgtgcctcctgaaaagagagtggaagtgtccgaggactttggcgtgggccaggaaatcacatcctacactgcccaggagccagacacatttatggaacagaaaataacatatcggatttggagagacactgccaactggctggagattaatccggacactggtgccatttccactcgggctgagctggacagggaggattttgagcacgtgaagaacagcacgtacacagccctaatcatagctacagacaatggttctccagttgctactggaacagggacacttctgctgatcctgtctgatgtgaatgacaacgcccccataccagaacctcgaactatattcttctgtgagaggaatccaaagcctcaggtcataaacatcattgatgcagaccttcctcccaatacatctcccttcacagcagaactaacacacggggcgagtgccaactggaccattcagtacaacgacccaacccaagaatctatcattttgaagccaaagatggccttagaggtgggtgactacaaaatcaatctcaagctcatggataaccagaataaagaccaagtgaccaccttagaggtcagcgtgtgtgactgtgaaggggccgctggcgtctgtaggaaggcacagcctgtcgaagcaggattgcaaattcctgccattctggggattcttggaggaattcttgctttgctaattctgattctgctgctcttgctgtttcttcggaggagagcggtggtcaaagagcccttactgcccccagaggatgacacccgggacaacgtttattactatgatgaagaaggaggcggagaagaggaccaggactttgacttgagccagctgcacaggggcctggacgctcggcctgaagtgactcgtaacgacgttgcaccaaccctcatgagtgtcccccggtatcttccccgccctgccaatcccgatgaaattggaaattttattgatgaaaatctgaaagcggctgatactgaccccacagccccgccttatgattctctgctcgtgtttgactatgaaggaagcggttccgaagctgctagtctgagctccctgaactcctcagagtcagacaaagaccaggactatgactacttgaacgaatggggcaatcgcttcaagaagctggctgacatgtacggaggcggcgaggacgactaggggactcgagagaggcgggccccagacccatgtgctgggaaatgcagaaatcacgttgctggtggtttttcagctcccttcccttgagatgagtttctggggaaaaaaaagagactggttagtgatgcagttagtatagctttatactctctccactttatagctctaataagtttgtgttagaaaagtttcgacttatttcttaaagcttttttttttttcccatcactctttacatggtggtgatgtccaaaagatacccaaattttaatattccagaagaacaactttagcatcagaaggttcacccagcaccttgcagattttcttaaggaattttgtctcacttttaaaaagaaggggagaagtcagctactctagttctgttgttttgtgtatataattttttaaaaaaaatttgtgtgcttctgctcattactacactggtgtgtccctctgccttttttttttttttaagacagggtctcattctatcggccaggctggagtgcagtggtgcaatcacagctcactgcagccttgtcctcccaggctcaagctatccttgcacctcagcctcccaagtagctgggaccacaggcatgcaccactacgcatgactaattttttaaatatttgagacggggtctccctgtgttacccaggctggtctcaaactcctgggctcaagtgatcctcccatcttggcctcccagagtattgggattacagacatgagccactgcacctgcccagctccccaactccctgccattttttaagagacagtttcgctccatcgcccaggcctgggatgcagtgatgtgatcatagctcactgtaacctcaaactctggggctcaagcagttctcccaccagcctcctttttatttttttgtacagatggggtcttgctatgttgcccaagctggtcttaaactcctggcctcaagcaatccttctgccttggccccccaaagtgctgggattgtgggcatgagctgctgtgcccagcctccatgttttaatatcaactctcactcctgaattcagttgctttgcccaagataggagttctctgatgcagaaattattgggctcttttagggtaagaagtttgtgtctttgtctggccacatcttgactaggtattgtctactctgaagacctttaatggcttccctctttcatctcctgagtatgtaacttgcaatgggcagctatccagtgacttgttctgagtaagtgtgttcattaatgtttatttagctctgaagcaagagtgatatactccaggacttagaatagtgcctaaagtgctgcagccaaagacagagcggaactatgaaaagtgggcttggagatggcaggagagcttgtcattgagcctggcaatttagcaaactgatgctgaggatgattgaggtgggtctacctcatctctgaaaattctggaaggaatggaggagtctcaacatgtgtttctgacacaagatccgtggtttgtactcaaagcccagaatccccaagtgcctgcttttgatgatgtctacagaaaatgctggctgagctgaacacatttgcccaattccaggtgtgcacagaaaaccgagaatattcaaaattccaaatttttttcttaggagcaagaagaaaatgtggccctaaagggggttagttgaggggtagggggtagtgaggatcttgatttggatctctttttatttaaatgtgaatttcaacttttgacaatcaaagaaaagacttttgttgaaatagctttactgtttctcaagtgttttggagaaaaaaatcaaccctgcaatcactttttggaattgtcttgatttttcggcagttcaagctatatcgaatatagttctgtgtagagaatgtcactgtagttttgagtgtatacatgtgtgggtgctgataattgtgtattttctttgggggtggaaaaggaaaacaattcaagctgagaaaagtattctcaaagatgcatttttataaattttattaaacaattttgttaaaccattgtcaaa

SEQ ID NO: 3565 - DNA, 4138 bp, Homo sapiens
  source 1..4138: mol_type = unassigned DNA; mol_type = unassigned DNA
gcacctgtgagcttgcggaagtcagttcagactccagcccgctccagcccggcccgacccgaccgcacccggcgcctgccctcgctcggcgtccccggccagccatgggcccttggagccgcagcctctcggcgctgctgctgctgctgcaggtctcctcttggctctgccaggagccggagccctgccaccctggctttgacgccgagagctacacgttcacggtgccccggcgccacctggagagaggccgcgtcctgggcagagtgaattttgaagattgcaccggtcgacaaaggacagcctatttttccctcgacacccgattcaaagtgggcacagatggtgtgattacagtcaaaaggcctctacggtttcataacccacagatccatttcttggtctacgcctgggactccacctacagaaagttttccaccaaagtcacgctgaatacagtggggcaccaccaccgccccccgccccatcaggcctccgtttctggaatccaagcagaattgctcacatttcccaactcctctcctggcctcagaagacagaagagagactgggttattcctcccatcagctgcccagaaaatgaaaaaggcccatttcctaaaaacctggttcagatcaaatccaacaaagacaaagaaggcaaggttttctacagcatcactggccaaggagctgacacaccccctgttggtgtctttattattgaaagagaaacaggatggctgaaggtgacagagcctctggatagagaacgcattgccacatacactctcttctctcacgctgtgtcatccaacgggaatgcagttgaggatccaatggagattttgatcacggtaaccgatcagaatgacaacaagcccgaattcacccaggaggtctttaaggggtctgtcatggaaggtgctcttccaggaacctctgtgatggaggtcacagccacagacgcggacgatgatgtgaacacctacaatgccgccatcgcttacaccatcctcagccaagatcctgagctccctgacaaaaatatgttcaccattaacaggaacacaggagtcatcagtgtggtcaccactgggctggaccgagagagtttccctacgtataccctggtggttcaagctgctgaccttcaaggtgaggggttaagcacaacagcaacagctgtgatcacagtcactgacaccaacgataatcctccgatcttcaatcccaccacgtacaagggtcaggtgcctgagaacgaggctaacgtcgtaatcaccacactgaaagtgactgatgctgatgcccccaataccccagcgtgggaggctgtatacaccatattgaatgatgatggtggacaatttgtcgtcaccacaaatccagtgaacaacgatggcattttgaaaacagcaaagggcttggattttgaggccaagcagcagtacattctacacgtagcagtgacgaatgtggtaccttttgaggtctctctcaccacctccacagccaccgtcaccgtggatgtgctggatgtgaatgaagcccccatctttgtgcctcctgaaaagagagtggaagtgtccgaggactttggcgtgggccaggaaatcacatcctacactgcccaggagccagacacatttatggaacagaaaataacgttctccagttgctactggaacagggacacttctgctgatcctgtctgatgtgaatgacaacgcccccataccagaacctcgaactatattcttctgtgagaggaatccaaagcctcaggtcataaacatcattgatgcagaccttcctcccaatacatctcccttcacagcagaactaacacacggggcgagtgccaactggaccattcagtacaacgacccaacccaagaatctatcattttgaagccaaagatggccttagaggtgggtgactacaaaatcaatctcaagctcatggataaccagaataaagaccaagtgaccaccttagaggtcagcgtgtgtgactgtgaaggggccgctggcgtctgtaggaaggcacagcctgtcgaagcaggattgcaaattcctgccattctggggattcttggaggaattcttgctttgctaattctgattctgctgctcttgctgtttcttcggaggagagcggtggtcaaagagcccttactgcccccagaggatgacacccgggacaacgtttattactatgatgaagaaggaggcggagaagaggaccaggactttgacttgagccagctgcacaggggcctggacgctcggcctgaagtgactcgtaacgacgttgcaccaaccctcatgagtgtcccccggtatcttccccgccctgccaatcccgatgaaattggaaattttattgatgaaaatctgaaagcggctgatactgaccccacagccccgccttatgattctctgctcgtgtttgactatgaaggaagcggttccgaagctgctagtctgagctccctgaactcctcagagtcagacaaagaccaggactatgactacttgaacgaatggggcaatcgcttcaagaagctggctgacatgtacggaggcggcgaggacgactaggggactcgagagaggcgggccccagacccatgtgctgggaaatgcagaaatcacgttgctggtggtttttcagctcccttcccttgagatgagtttctggggaaaaaaaagagactggttagtgatgcagttagtatagctttatactctctccactttatagctctaataagtttgtgttagaaaagtttcgacttatttcttaaagcttttttttttttcccatcactctttacatggtggtgatgtccaaaagatacccaaattttaatattccagaagaacaactttagcatcagaaggttcacccagcaccttgcagattttcttaaggaattttgtctcacttttaaaaagaaggggagaagtcagctactctagttctgttgttttgtgtatataattttttaaaaaaaatttgtgtgcttctgctcattactacactggtgtgtccctctgccttttttttttttttaagacagggtctcattctatcggccaggctggagtgcagtggtgcaatcacagctcactgcagccttgtcctcccaggctcaagctatccttgcacctcagcctcccaagtagctgggaccacaggcatgcaccactacgcatgactaattttttaaatatttgagacggggtctccctgtgttacccaggctggtctcaaactcctgggctcaagtgatcctcccatcttggcctcccagagtattgggattacagacatgagccactgcacctgcccagctccccaactccctgccattttttaagagacagtttcgctccatcgcccaggcctgggatgcagtgatgtgatcatagctcactgtaacctcaaactctggggctcaagcagttctcccaccagcctcctttttatttttttgtacagatggggtcttgctatgttgcccaagctggtcttaaactcctggcctcaagcaatccttctgccttggccccccaaagtgctgggattgtgggcatgagctgctgtgcccagcctccatgttttaatatcaactctcactcctgaattcagttgctttgcccaagataggagttctctgatgcagaaattattgggctcttttagggtaagaagtttgtgtctttgtctggccacatcttgactaggtattgtctactctgaagacctttaatggcttccctctttcatctcctgagtatgtaacttgcaatgggcagctatccagtgacttgttctgagtaagtgtgttcattaatgtttatttagctctgaagcaagagtgatatactccaggacttagaatagtgcctaaagtgctgcagccaaagacagagcggaactatgaaaagtgggcttggagatggcaggagagcttgtcattgagcctggcaatttagcaaactgatgctgaggatgattgaggtgggtctacctcatctctgaaaattctggaaggaatggaggagtctcaacatgtgtttctgacacaagatccgtggtttgtactcaaagcccagaatccccaag

SEQ ID NO: 3566 - DNA, 2567 bp, Homo sapiens
  source 1..2567: mol_type = unassigned DNA; mol_type = unassigned DNA
gctccagcccggcccgacccgaccgcacccggcgcctgccctcgctcggcgtccccggccagccatgggcccttggagccgcagcctctcggcgctgctgctgctgctgcaggtctcctcttggctctgccaggagccggagccctgccaccctggctttgacgccgagagctacacgttcacggtgccccggcgccacctggagagaggccgcgtcctgggcagagtgaattttgaagattgcaccggtcgacaaaggacagcctatttttccctcgacacccgattcaaagtgggcacagatggtgtgattacagtcaaaaggcctctacggtttcataacccacagatccatttcttggtctacgcctgggactccacctacagaaagttttccaccaaagtcacgctgaatacagtggggcaccaccaccgccccccgccccatcaggcctccgtttctggaatccaagcagaattgctcacatttcccaactcctctcctggcctcagaagacagaagagagactgggttattcctcccatcagctgcccagaaaatgaaaaaggcccatttcctaaaaacctggttcagatcaaatccaacaaagacaaagaaggcaaggttttctacagcatcactggccaaggagctgacacaccccctgttggtgtctttattattgaaagagaaacaggatggctgaaggtgacagagcctctggatagagaacgcattgccacatacactctcttctctcacgctgtgtcatccaacgggaatgcagttgaggatccaatggagattttgatcacggtaaccgatcagaatgacaacaagcccgaattcacccaggaggtctttaaggggtctgtcatggaaggtgctcttccaggaacctctgtgatggaggtcacagccacagacgcggacgatgatgtgaacacctacaatgccgccatcgcttacaccatcctcagccaagatcctgagctccctgacaaaaatatgttcaccattaacaggaacacaggagtcatcagtgtggtcaccactgggctggaccgagagagtttccctacgtataccctggtggttcaagctgctgaccttcaaggtgaggggttaagcacaacagcaacagctgtgatcacagtcactgacaccaacgataatcctccgatcttcaatcccaccacgggcttggattttgaggccaagcagcagtacattctacacgtagcagtgacgaatgtggtaccttttgaggtctctctcaccacctccacagccaccgtcaccgtggatgtgctggatgtgaatgaagcccccatctttgtgcctcctgaaaagagagtggaagtgtccgaggactttggcgtgggccaggaaatcacatcctacactgcccaggagccagacacatttatggaacagaaaataacatatcggatttggagagacactgccaactggctggagattaatccggacactggtgccatttccactcgggctgagctggacagggaggattttgagcacgtgaagaacagcacgtacacagccctaatcatagctacagacaatggttctccagttgctactggaacagggacacttctgctgatcctgtctgatgtgaatgacaacgcccccataccagaacctcgaactatattcttctgtgagaggaatccaaagcctcaggtcataaacatcattgatgcagaccttcctcccaatacatctcccttcacagcagaactaacacacggggcgagtgccaactggaccattcagtacaacgacccaacccaagaatctatcattttgaagccaaagatggccttagaggtgggtgactacaaaatcaatctcaagctcatggataaccagaataaagaccaagtgaccaccttagaggtcagcgtgtgtgactgtgaaggggccgctggcgtctgtaggaaggcacagcctgtcgaagcaggattgcaaattcctgccattctggggattcttggaggaattcttgctttgctaattctgattctgctgctcttgctgtttcttcggaggagagcggtggtcaaagagcccttactgcccccagaggatgacacccgggacaacgtttattactatgatgaagaaggaggcggagaagaggaccaggactttgacttgagccagctgcacaggggcctggacgctcggcctgaagtgactcgtaacgacgttgcaccaaccctcatgagtgtcccccggtatcttccccgccctgccaatcccgatgaaattggaaattttattgatgaaaatctgaaagcggctgatactgaccccacagccccgccttatgattctctgctcgtgtttgactatgaaggaagcggttccgaagctgctagtctgagctccctgaactcctcagagtcagacaaagaccaggactatgactacttgaacgaatggggcaatcgcttcaagaagctggctgacatgtacggaggcggcgaggacgactaggggactcgagagaggcgggccccagacccatgtgctg

SEQ ID NO: 3567 - DNA, 2661 bp, Homo sapiens
  source 1..2661: mol_type = unassigned DNA; mol_type = unassigned DNA
gctccagcccggcccgacccgaccgcacccggcgcctgccctcgctcggcgtccccggccagccatgggcccttggagccgcagcctctcggcgctgctgctgctgctgcaggtctcctcttggctctgccaggagccggagccctgccaccctggctttgacgccgagagctacacgttcacggtgccccggcgccacctggagagaggccgcgtcctgggcagagtgaattttgaagattgcaccggtcgacaaaggacagcctatttttccctcgacacccgattcaaagtgggcacagatggtgtgattacagtcaaaaggcctctacggtttcataacccacagatccatttcttggtctacgcctgggactccacctacagaaagttttccaccaaagtcacgctgaatacagtggggcaccaccaccgccccccgccccatcaggcctccgtttctggaatccaagcagaattgctcacatttcccaactcctctcctggcctcagaagacagaagagagactgggttattcctcccatcagctgcccagaaaatgaaaaaggcccatttcctaaaaacctggttcagctcttctctcacgctgtgtcatccaacgggaatgcagttgaggatccaatggagattttgatcacggtaaccgatcagaatgacaacaagcccgaattcacccaggaggtctttaaggggtctgtcatggaaggtgctcttccaggaacctctgtgatggaggtcacagccacagacgcggacgatgatgtgaacacctacaatgccgccatcgcttacaccatcctcagccaagatcctgagctccctgacaaaaatatgttcaccattaacaggaacacaggagtcatcagtgtggtcaccactgggctggaccgagagagtttccctacgtataccctggtggttcaagctgctgaccttcaaggtgaggggttaagcacaacagcaacagctgtgatcacagtcactgacaccaacgataatcctccgatcttcaatcccaccacgtacaagggtcaggtgcctgagaacgaggctaacgtcgtaatcaccacactgaaagtgactgatgctgatgcccccaataccccagcgtgggaggctgtatacaccatattgaatgatgatggtggacaatttgtcgtcaccacaaatccagtgaacaacgatggcattttgaaaacagcaaaggtttgtatggtacctggcaagatgcagaaactggcatcctcacagctgttcatacccttgtcccctgggcttggattttgaggccaagcagcagtacattctacacgtagcagtgacgaatgtggtaccttttgaggtctctctcaccacctccacagccaccgtcaccgtggatgtgctggatgtgaatgaagcccccatctttgtgcctcctgaaaagagagtggaagtgtccgaggactttggcgtgggccaggaaatcacatcctacactgcccaggagccagacacatttatggaacagaaaataacatatcggatttggagagacactgccaactggctggagattaatccggacactggtgccatttccactcgggctgagctggacagggaggattttgagcacgtgaagaacagcacgtacacagccctaatcatagctacagacaatggttctccagttgctactggaacagggacacttctgctgatcctgtctgatgtgaatgacaacgcccccataccagaacctcgaactatattcttctgtgagaggaatccaaagcctcaggtcataaacatcattgatgcagaccttcctcccaatacatctcccttcacagcagaactaacacacggggcgagtgccaactggaccattcagtacaacgacccaacccaagaatctatcattttgaagccaaagatggccttagaggtgggtgactacaaaatcaatctcaagctcatggataaccagaataaagaccaagtgaccaccttagaggtcagcgtgtgtgactgtgaaggggccgctggcgtctgtaggaaggcacagcctgtcgaagcaggattgcaaattcctgccattctggggattcttggaggaattcttgctttgctaattctgattctgctgctcttgctgtttcttcggaggagagcggtggtcaaagagcccttactgcccccagaggatgacacccgggacaacgtttattactatgatgaagaaggaggcggagaagaggaccaggactttgacttgagccagctgcacaggggcctggacgctcggcctgaagtgactcgtaacgacgttgcaccaaccctcatgagtgtcccccggtatcttccccgccctgccaatcccgatgaaattggaaattttattgatgaaaatctgaaagcggctgatactgaccccacagccccgccttatgattctctgctcgtgtttgactatgaaggaagcggttccgaagctgctagtctgagctccctgaactcctcagagtcagacaaagaccaggactatgactacttgaacgaatggggcaatcgcttcaagaagctggctgacatgtacggaggcggcgaggacgactaggggactcgagagaggcgggccccagacccatgtgctg

SEQ ID NO: 3568 - DNA, 2759 bp, Homo sapiens
  source 1..2759: mol_type = unassigned DNA; mol_type = unassigned DNA
aaacacagcctgccaatcctggagaatgcctggtgggggtgctgggggaagaagtccaatttcagctgggaaaatgggacaggagccttgggagtgggtttacacctcaaattcccttatggccacagtccattggcccctagcctcctccccactttacagatgaagagactgaggtttagagagaggaacagccggcttggcagaggcaactgctgaggcagttgaggaaagtgaattttgaagattgcaccggtcgacaaaggacagcctatttttccctcgacacccgattcaaagtgggcacagatggtgtgattacagtcaaaaggcctctacggtttcataacccacagatccatttcttggtctacgcctgggactccacctacagaaagttttccaccaaagtcacgctgaatacagtggggcaccaccaccgccccccgccccatcaggcctccgtttctggaatccaagcagaattgctcacatttcccaactcctctcctggcctcagaagacagaagagagactgggttattcctcccatcagctgcccagaaaatgaaaaaggcccatttcctaaaaacctggttcagatcaaatccaacaaagacaaagaaggcaaggttttctacagcatcactggccaaggagctgacacaccccctgttggtgtctttattattgaaagagaaacaggatggctgaaggtgacagagcctctggatagagaacgcattgccacatacactctcttctctcacgctgtgtcatccaacgggaatgcagttgaggatccaatggagattttgatcacggtaaccgatcagaatgacaacaagcccgaattcacccaggaggtctttaaggggtctgtcatggaaggtgctcttccaggaacctctgtgatggaggtcacagccacagacgcggacgatgatgtgaacacctacaatgccgccatcgcttacaccatcctcagccaagatcctgagctccctgacaaaaatatgttcaccattaacaggaacacaggagtcatcagtgtggtcaccactgggctggaccgagagagtttccctacgtataccctggtggttcaagctgctgaccttcaaggtgaggggttaagcacaacagcaacagctgtgatcacagtcactgacaccaacgataatcctccgatcttcaatcccaccacgtacaagggtcaggtgcctgagaacgaggctaacgtcgtaatcaccacactgaaagtgactgatgctgatgcccccaataccccagcgtgggaggctgtatacaccatattgaatgatgatggtggacaatttgtcgtcaccacaaatccagtgaacaacgatggcattttgaaaacagcaaagggcttggattttgaggccaagcagcagtacattctacacgtagcagtgacgaatgtggtaccttttgaggtctctctcaccacctccacagccaccgtcaccgtggatgtgctggatgtgaatgaagcccccatctttgtgcctcctgaaaagagagtggaagtgtccgaggactttggcgtgggccaggaaatcacatcctacactgcccaggagccagacacatttatggaacagaaaataacatatcggatttggagagacactgccaactggctggagattaatccggacactggtgccatttccactcgggctgagctggacagggaggattttgagcacgtgaagaacagcacgtacacagccctaatcatagctacagacaatggttctccagttgctactggaacagggacacttctgctgatcctgtctgatgtgaatgacaacgcccccataccagaacctcgaactatattcttctgtgagaggaatccaaagcctcaggtcataaacatcattgatgcagaccttcctcccaatacatctcccttcacagcagaactaacacacggggcgagtgccaactggaccattcagtacaacgacccaacccaagaatctatcattttgaagccaaagatggccttagaggtgggtgactacaaaatcaatctcaagctcatggataaccagaataaagaccaagtgaccaccttagaggtcagcgtgtgtgactgtgaaggggccgctggcgtctgtaggaaggcacagcctgtcgaagcaggattgcaaattcctgccattctggggattcttggaggaattcttgctttgctaattctgattctgctgctcttgctgtttcttcggaggagagcggtggtcaaagagcccttactgcccccagaggatgacacccgggacaacgtttattactatgatgaagaaggaggcggagaagaggaccaggactttgacttgagccagctgcacaggggcctggacgctcggcctgaagtgactcgtaacgacgttgcaccaaccctcatgagtgtcccccggtatcttccccgccctgccaatcccgatgaaattggaaattttattgatgaaaatctgaaagcggctgatactgaccccacagccccgccttatgattctctgctcgtgtttgactatgaaggaagcggttccgaagctgctagtctgagctccctgaactcctcagagtcagacaaagaccaggactatgactacttgaacgaatggggcaatcgcttcaagaagctggctgacatgtacggaggcggcgaggacgactaggggactcgagagaggcgggccccagacccatgtgctggg

SEQ ID NO: 3569 - DNA, 969 bp, Homo sapiens
  source 1..969: mol_type = unassigned DNA; mol_type = unassigned DNA
cacttttaggttgggccaactgagaattttggggactttccttgctgtgaatgtggaattaaattgcttttttatttttattttttatttttcgagatggagtctcgctctgtcgccaggtacagtggcgtgatctcggctcactgcaacctctgcctcctgggttcaagcgatttgcctgcctcagcctcctgagtagctgggactacaggcaactgccaccacacctggctaatttttgtatttttggtagagacagggtttctccatgttggccaggatggtctcgatctcctgacctcatgatccgtccgcctcggcctcccaaagtgctgggattacaggcgtgagccactgcgcctggctgctttttaatttttttggaaaggtaggggggatttggtcaatgattaatccatctggagtttggtaacggatccagcagtgaattttgaagattgcaccggtcgacaaaggacagcctatttttccctcgacacccgattcaaagtgggcacagatggtgtgattacagtcaaaaggcctctacggtttcataacccacagatccatttcttggtctacgcctgggactccacctacagaaagttttccaccaaagtcacgctgaatacagtggggcaccaccaccgccccccgccccatcaggcctccgtttctggaatccaagcagaattgctcacatttcccaactcctctcctggcctcagaagacagaagagagactgggttattcctcccatcagctgcccagaaaatgaaaaaggcccatttcctaaaaacctggttcagatcaaatccaacaaagacaaagaaggcaaggttttctacagcatcactggccaaggagctgacacaccccctgttggtgtctttattattgaaagagaaacaggatggctgaaggtgacagagcctctggatagagaacgcattgccacatacact

SEQ ID NO: 3570 - DNA, 581 bp, Homo sapiens
  source 1..581: mol_type = unassigned DNA; mol_type = unassigned DNA
gaagtgatgcaaaccagaccgtgcagccaactcctgcgtcaggttccataggaatcctttccccgccagtggaggaggctctcccgtcttttggaaatgatgtgcaggagacagagctgattctcatttcttccatggacacggctaagtgcgggctgtgaattttgaagattgcaccggtcgacaaaggacagcctatttttccctcgacacccgattcaaagtgggcacagatggtgtgattacagtcaaaaggcctctacggtttcataacccacagatccatttcttggtctacgcctgggactccacctacagaaagttttccaccaaagtcacgctgaatacagtggggcaccaccaccgccccccgccccatcaggcctccgtttctggaatccaagcagaattgctcacatttcccaactcctctcctggcctcagaagacagaagagagactgggttattcctcccatcagctgcccagaaaatgaaaaaggcccatttcctaaaaacctggttcagatcaaatccaacaaagacaaagaaggcaaggttttctacagcatcactggccaag

SEQ ID NO: 3571 - DNA, 736 bp, Homo sapiens
  source 1..736: mol_type = unassigned DNA; mol_type = unassigned DNA
cacagatggtgtgattacagtcaaaaggcctctacggtttcataacccacagatccatttcttggtctacgcctgggactccacctacagaaagttttccaccaaagtcacgctgaatacagtggggcaccaccaccgccccccgccccatcaggcctccgtttctggaatccaagcagaattgctcacatttcccaactcctctcctggcctcagaagacagaagagagactgggttattcctcccatcagctgcccagaaaatgaaaaaggcccatttcctaaaaacctggttcagatcaaatccaacaaagacaaagaaggcaaggttttctacagcatcactggccaaggagctgacacaccccctgttggtgtctttattattgaaagagaaacaggatggctgaaggtgacagagcctctggatagagaacgcattgccacatacactgaacctctgtgatggaggtcacagccacagacgcggacgatgatgtgaacacctacaatgccgccatcgcttacaccatcctcagccaagatcctgagctccctgacaaaaatatgttcaccattaacaggaacacaggagtcatcagtgtggtcaccactgggctggaccgagagagtttccctacgtataccctggtggttcaagctgctgaccttcaaggtgaggggttaagcacaacagcaacagctgtgatcacagtcactgacaccaacgataatc

SEQ ID NO: 3572 - DNA, 352 bp, Homo sapiens
  source 1..352: mol_type = unassigned DNA; mol_type = unassigned DNA
cagaaaatgaaaaaggcccatttcctaaaaacctggttcagatcaaatccaacaaagacaaagaaggcaaggttttctacagcatcactggccaaggagctgacacaccccctgttggtgtctttattattgaaagagaaacaggatggctgaaggtgacagagcctctggatagagaacgcattgccacatacactgtaagtatctcttagaagcttgttgacaccggggtaacatccacccaggattttttggtcaacccatgctggatccgcagatcagaggctctgaacacatgaggagcttaacttgacacctcttgacctgttgctaaggagaagtgatgggagaa

SEQ ID NO: 3573 - DNA, 282 bp, Homo sapiens
  source 1..282: mol_type = unassigned DNA; mol_type = unassigned DNA
aaaggtggctagtgttcctggtcctgacttggttgtgtcgatctctctgcagagtttccctacgtataccctggtggttcaagctgctgaccttcaaggtgaggggttaagcacaacagcaacagctgtgatcacagtcactgacaccaacgataatcctccgatcttcaatcccaccacgtacaagggtcaggtgcctgagaacgaggctaacgtcgtaatcaccacactgaaagtgactgatgctgatgcccccaataccccagcgtgggaggctgtata

SEQ ID NO: 3574 - DNA, 952 bp, Homo sapiens
  source 1..952: mol_type = unassigned DNA; mol_type = unassigned DNA
aaaaaaaaaaagtacatacctaaataaaacccaagcagctctgctctcttcactcggcttgcgggtgtctttagttcactagcaattttattctggaatgagctttttattttcctcccctggtctcatcatttctttttattgctttctccagcccaagaatctatcattttgaagccaaagatggccttagaggtgggtgactacaaaatcaatctcaagctcatggataaccagaataaagaccaagtgaccaccttagaggtcagcgtgtgtgactgtgaaggggccgctggcgtctgtaggaaggcacagcctgtcgaagcaggattgcaaattcctgccattctggggattcttggaggaattcttgctttgctaattctgattctgctgctcttgctgtttcttcggaggagagcggtggtcaaagagcccttactgcccccagaggatgacacccgggacaacgtttattactatgatgaagaaggaggcggagaagaggaccaggactttgacttgagccagctgcacaggggcctggacgctcggcctgaagtgactcgtaacgacgttgcaccaaccctcatgagtgtcccccggtatcttccccgccctgccaatcccgatgaaattggaaattttattgatgaaaatctgaaagcggctgatactgaccccacagccccgccttatgattctctgctcgtgtttgactatgaaggaagcggttccgaagctgctagtctgagctccctgaactcctcagagtcagacaaagaccaggactatgactacttgaacgaatggggcaatcgcttcaagaagctggctgacatgtacggaggcggcgaggacgactaggggactcgagagaggcgggccccagacccatgtgctgggaaatgcagaaatcacgttgctggtggtttttcagctcccttccctt

SEQ ID NO: 3575 - DNA, 2068 bp, Homo sapiens
  source 1..2068: mol_type = unassigned DNA; mol_type = unassigned DNA
agtggcgtcggaactgcaaagcacctgtgagcttgcggaagtcagttcagactccagcccgctccagcccggcccgacccgaccgcacccggcgcctgccctcgctcggcgtccccggccagccatgggcccttggagccgcagcctctcggcgctgctgctgctgctgcaggtctcctcttggctctgccaggagccggagccctgccaccctggctttgacgccgagagctacacgttcacggtgccccggcgccacctggagagaggccgcgtcctgggcagagtgaattttgaagattgcaccggtcgacaaaggacagcctatttttccctcgacacccgattcaaagtgggcacagatggtgtgattacagtcaaaaggcctctacggtttcataacccacagatccatttcttggtctacgcctgggactccacctacagaaagttttccaccaaagtcacgctgaatacagtggggcaccaccaccgccccccgccccatcaggcctccgtttctggaatccaagcagaattgctcacatttcccaactcctctcctggcctcagaagacagaagagagactgggttattcctcccatcagctgcccagaaaatgaaaaaggcccatttcctaaaaacctggttcagatcaaatccaacaaagacaaagaaggcaaggttttctacagcatcactggccaaggagctgacacaccccctgttggtgtctttattattgaaagagaaacaggatggctgaaggtgacagagcctctggatagagaacgcattgccacatacactctcttctctcacgctgtgtcatccaacgggaatgcagttgaggatccaatggagattttgatcacggtaaccgatcagaatgacaacaagcccgaattcacccaggaggtctttaaggggtctgtcatggaaggtgctcttccaggaacctctgtgatggaggtcacagccacagacgcggacgatgatgtgaacacctacaatgccgccatcgcttacaccatcctcagccaagatcctgagctccctgacaaaaatatgttcaccattaacaggaacacaggagtcatcagtgtggtcaccactgggctggaccgagagagtttccctacgtataccctggtggttcaagctgctgaccttcaaggtgaggggttaagcacaacagcaacagctgtgatcacagtcactgacaccaacgataatcctccgatcttcaatcccaccacgtacaagggtcaggtgcctgagaacgaggctaacgtcgtaatcaccacactgaaagtgactgatgctgatgcccccaataccccagcgtgggaggctgtatacaccatattgaatgatgatggtggacaatttgtcgtcaccacaaatccagtgaacaacgatggcattttgaaaacagcaaagggcttggattttgaggccaagcagcagtacattctacacgtagcagtgacgaatgtggtaccttttgaggtctctctcaccacctccacagccaccgtcaccgtggatgtgctggatgtgaatgaagcccccatctttgtgcctcctgaaaagagagtggaagtgtccgaggactttggcgtgggccaggaaatcacatcctacactgcccaggagccagacacatttatggaacagaaaataacatatcggatttggagagacactgccaactggctggagattaatccggacactggtgccatttccactcgggctgagctggacagggaggattttgagcacgtgaagaacagcacgtacacagccctaatcatagctacagacaatggttctccagttgctactggaacagggacacttctgctgatcctgtctgatgtgaatgacaacgcccccataccagaacctcgaactatattcttctgtgagaggaatccaaagcctcaggtggcaggattgcttgaacctagtgatcctcccatcttggcctcccagagtattgggattacagacatgagccactgcacctgcccagctccccaactccctgccattttttaa

SEQ ID NO: 3576 - DNA, 3304 bp, Homo sapiens
  source 1..3304: mol_type = unassigned DNA; mol_type = unassigned DNA
aaagcacctgtgagcttgcggaagtcagttcagactccagcccgctccagcccggcccgacccgaccgcacccggcgcctgccctcgctcggcgtccccggccagccatgggcccttggagccgcagcctctcggcgctgctgctgctgctgcaggtctcctcttggctctgccaggagccggagccctgccaccctggctttgacgccgagagctacacgttcacggtgccccggcgccacctggagagaggccgcgtcctgggcagagtgaattttgaagattgcaccggtcgacaaaggacagcctatttttccctcgacacccgattcaaagtgggcacagatggtgtgattacagtcaaaaggcctctacggtttcataacccacagatccatttcttggtctacgcctgggactccacctacagaaagttttccaccaaagtcacgctgaatacagtggggcaccaccaccgccccccgccccatcaggcctccgtttctggaatccaagcagaattgctcacatttcccaactcctctcctggcctcagaagacagaagagagactgggttattcctcccatcagctgcccagaaaatgaaaaaggcccatttcctaaaaacctggttcagatcaaatccaacaaagacaaagaaggcaaggttttctacagcatcactggccaaggagctgacacaccccctgttggtgtctttattattgaaagagaaacaggatggctgaaggtgacagagcctctggatagagaacgcattgccacatacactctcttctctcacgctgtgtcatccaacgggaatgcagttgaggatccaatggagattttgatcacggtaaccgatcagaatgacaacaagcccgaattcacccaggaggtctttaaggggtctgtcatggaaggtgctcttccaggaacctctgtgatggaggtcacagccacagacgcggacgatgatgtgaacacctacaatgccgccatcgcttacaccatcctcagccaagatcctgagctccctgacaaaaatatgttcaccattaacaggaacacaggagtcatcagtgtggtcaccactgggctggaccgagagagtttccctacgtataccctggtggttcaagctgctgaccttcaaggtgaggggttaagcacaacagcaacagctgtgatcacagtcactgacaccaacgataatcctccgatcttcaatcccaccacgtacaagggtcaggtgcctgagaacgaggctaacgtcgtaatcaccacactgaaagtgactgatgctgatgcccccaataccccagcgtgggaggctgtatacaccatattgaatgatgatggtggacaatttgtcgtcaccacaaatccagtgaacaacgatggcattttgaaaacagcaaagggcttggattttgaggccaagcagcagtacattctacacgtagcagtgacgaatgtggtaccttttgaggtctctctcaccacctccacagccaccgtcaccgtggatgtgctggatgtgaatgaagcccccatctttgtgcctcctgaaaagagagtggaagtgtccgaggactttggcgtgggccaggaaatcacatcctacactgcccaggagccagacacatttatggaacagaaaataacatatcggatttggagagacactgccaactggctggagattaatccggacactggtgccatttccactcgggctgagctggacagggaggattttgagcacgtgaagaacagcacgtacacagccctaatcatagctacagacaatggttctccagttgctactggaacagggacacttctgctgatcctgtctgatgtgaatgacaacgcccccataccagaacctcgaactatattcttctgtgagaggaatccaaagcctcaggtcataaacatcattgatgcagaccttcctcccaacttggcctcccagagtattgggattacagacatgagccactgcacctgcccagctccccaactccctgccattttttaagagacagtttcgctccatcgcccaggcctgggatgcagtgatgtgatcatagctcactgtaacctcaaactctggggctcaagcagttctcccaccagcctcctttttatttttttgtacagatggggtcttgctatgttgcccaagctggtcttaaactcctggcctcaagcaatccttctgccttggccccccaaagtgctgggattgtgggcatgagctgctgtgcccagcctccatgttttaatatcaactctcactcctgaattcagttgctttgcccaagataggagttctctgatgcagaaattattgggctcttttagggtaagaagtttgtgtctttgtctggccacatcttgactaggtattgtctactctgaagacctttaatggcttccctctttcatctcctgagtatgtaacttgcaatgggcagctatccagtgacttgttctgagtaagtgtgttcattaatgtttatttagctctgaagcaagagtgatatactccaggacttagaatagtgcctaaagtgctgcagccaaagacagagcggaactatgaaaagtgggcttggagatggcaggagagcttgtcattgagcctggcaatttagcaaactgatgctgaggatgattgaggtgggtctacctcatctctgaaaattctggaaggaatggaggagtctcaacatgtgtttctgacacaagatccgtggtttgtactcaaagcccagaatccccaagtgcctgcttttgatgatgtctacagaaaatgctggctgagctgaacacatttgcccaattccaggtgtgcacagaaaaccgagaatattcaaaattccaaatttttttcttaggagcaagaagaaaatgtggccctaaagggggttagttgaggggtagggggtagtgaggatcttgatttggatctctttttatttaaatgtgaatttcaacttttgacaatcaaagaaaagacttttgttgaaatagctttactgtttctcaagtgttttggagaaaaaaatcaaccctgcaatcactttttggaattgtcttgatttttcggcagttcaagctatatcgaatatagttctgtgtagagaatgtcactgtagttttgagtgtatacatgtgtgggtgctgataattgtgtattttctttgggggtggaaaaggaaaacaattcaagctgagaaaagtattctcaaagatgcatttttataaattttattaaacaattttgtt

SEQ ID NO: 3577 - DNA, 4878 bp, Homo sapiens
  source 1..4878: mol_type = unassigned DNA; mol_type = unassigned DNA
agtggcgtcggaactgcaaagcacctgtgagcttgcggaagtcagttcagactccagcccgctccagcccggcccgacccgaccgcacccggcgcctgccctcgctcggcgtccccggccagccatgggcccttggagccgcagcctctcggcgctgctgctgctgctgcaggtctcctcttggctctgccaggagccggagccctgccaccctggctttgacgccgagagctacacgttcacggtgccccggcgccacctggagagaggccgcgtcctgggcagagtgaattttgaagattgcaccggtcgacaaaggacagcctatttttccctcgacacccgattcaaagtgggcacagatggtgtgattacagtcaaaaggcctctacggtttcataacccacagatccatttcttggtctacgcctgggactccacctacagaaagttttccaccaaagtcacgctgaatacagtggggcaccaccaccgccccccgccccatcaggcctccgtttctggaatccaagcagaattgctcacatttcccaactcctctcctggcctcagaagacagaagagagactgggttattcctcccatcagctgcccagaaaatgaaaaaggcccatttcctaaaaacctggttcagatcaaatccaacaaagacaaagaaggcaaggttttctacagcatcactggccaaggagctgacacaccccctgttggtgtctttattattgaaagagaaacaggatggctgaaggtgacagagcctctggatagagaacgcattgccacatacactctcttctctcacgctgtgtcatccaacgggaatgcagttgaggatccaatggagattttgatcacggtaaccgatcagaatgacaacaagcccgaattcacccaggaggtctttaaggggtctgtcatggaaggtgctcttccaggaacctctgtgatggaggtcacagccacagacgcggacgatgatgtgaacacctacaatgccgccatcgcttacaccatcctcagccaagatcctgagctccctgacaaaaatatgttcaccattaacaggaacacaggagtcatcagtgtggtcaccactgggctggaccgagagagtttccctacgtataccctggtggttcaagctgctgaccttcaaggtgaggggttaagcacaacagcaacagctgtgatcacagtcactgacaccaacgataatcctccgatcttcaatcccaccacgtacaagggtcaggtgcctgagaacgaggctaacgtcgtaatcaccacactgaaagtgactgatgctgatgcccccaataccccagcgtgggaggctgtatacaccatattgaatgatgatggtggacaatttgtcgtcaccacaaatccagtgaacaacgatggcattttgaaaacagcaaaggtatggtacctggcaagatgcagaaactggcatcctcacagctgttcatacccttgtcccctgggcttggattttgaggccaagcagcagtacattctacacgtagcagtgacgaatgtggtaccttttgaggtctctctcaccacctccacagccaccgtcaccgtggatgtgctggatgtgaatgaagcccccatctttgtgcctcctgaaaagagagtggaagtgtccgaggactttggcgtgggccaggaaatcacatcctacactgcccaggagccagacacatttatggaacagaaaataacatatcggatttggagagacactgccaactggctggagattaatccggacactggtgccatttccactcgggctgagctggacagggaggattttgagcacgtgaagaacagcacgtacacagccctaatcatagctacagacaatggttctccagttgctactggaacagggacacttctgctgatcctgtctgatgtgaatgacaacgcccccataccagaacctcgaactatattcttctgtgagaggaatccaaagcctcaggtcataaacatcattgatgcagaccttcctcccaatacatctcccttcacagcagaactaacacacggggcgagtgccaactggaccattcagtacaacgacccaacccaagaatctatcattttgaagccaaagatggccttagaggtgggtgactacaaaatcaatctcaagctcatggataaccagaataaagaccaagtgaccaccttagaggtcagcgtgtgtgactgtgaaggggccgctggcgtctgtaggaaggcacagcctgtcgaagcaggattgcaaattcctgccattctggggattcttggaggaattcttgctttgctaattctgattctgctgctcttgctgtttcttcggaggagagcggtggtcaaagagcccttactgcccccagaggatgacacccgggacaacgtttattactatgatgaagaaggaggcggagaagaggaccaggactttgacttgagccagctgcacaggggcctggacgctcggcctgaagtgactcgtaacgacgttgcaccaaccctcatgagtgtcccccggtatcttccccgccctgccaatcccgatgaaattggaaattttattgatgaaaatctgaaagcggctgatactgaccccacagccccgccttatgattctctgctcgtgtttgactatgaaggaagcggttccgaagctgctagtctgagctccctgaactcctcagagtcagacaaagaccaggactatgactacttgaacgaatggggcaatcgcttcaagaagctggctgacatgtacggaggcggcgaggacgactaggggactcgagagaggcgggccccagacccatgtgctgggaaatgcagaaatcacgttgctggtggtttttcagctcccttcccttgagatgagtttctggggaaaaaaaagagactggttagtgatgcagttagtatagctttatactctctccactttatagctctaataagtttgtgttagaaaagtttcgacttatttcttaaagcttttttttttttcccatcactctttacatggtggtgatgtccaaaagatacccaaattttaatattccagaagaacaactttagcatcagaaggttcacccagcaccttgcagattttcttaaggaattttgtctcacttttaaaaagaaggggagaagtcagctactctagttctgttgttttgtgtatataattttttaaaaaaaatttgtgtgcttctgctcattactacactggtgtgtccctctgccttttttttttttttaagacagggtctcattctatcggccaggctggagtgcagtggtgcaatcacagctcactgcagccttgtcctcccaggctcaagctatccttgcacctcagcctcccaagtagctgggaccacaggcatgcaccactacgcatgactaattttttaaatatttgagacggggtctccctgtgttacccaggctggtctcaaactcctgggctcaagtgatcctcccatcttggcctcccagagtattgggattacagacatgagccactgcacctgcccagctccccaactccctgccattttttaagagacagtttcgctccatcgcccaggcctgggatgcagtgatgtgatcatagctcactgtaacctcaaactctggggctcaagcagttctcccaccagcctcctttttatttttttgtacagatggggtcttgctatgttgcccaagctggtcttaaactcctggcctcaagcaatccttctgccttggccccccaaagtgctgggattgtgggcatgagctgctgtgcccagcctccatgttttaatatcaactctcactcctgaattcagttgctttgcccaagataggagttctctgatgcagaaattattgggctcttttagggtaagaagtttgtgtctttgtctggccacatcttgactaggtattgtctactctgaagacctttaatggcttccctctttcatctcctgagtatgtaacttgcaatgggcagctatccagtgacttgttctgagtaagtgtgttcattaatgtttatttagctctgaagcaagagtgatatactccaggacttagaatagtgcctaaagtgctgcagccaaagacagagcggaactatgaaaagtgggcttggagatggcaggagagcttgtcattgagcctggcaatttagcaaactgatgctgaggatgattgaggtgggtctacctcatctctgaaaattctggaaggaatggaggagtctcaacatgtgtttctgacacaagatccgtggtttgtactcaaagcccagaatccccaagtgcctgcttttgatgatgtctacagaaaatgctggctgagctgaacacatttgcccaattccaggtgtgcacagaaaaccgagaatattcaaaattccaaatttttttcttaggagcaagaagaaaatgtggccctaaagggggttagttgaggggtagggggtagtgaggatcttgatttggatctctttttatttaaatgtgaatttcaacttttgacaatcaaagaaaagacttttgttgaaatagctttactgtttctcaagtgttttggagaaaaaaatcaaccctgcaatcactttttggaattgtcttgatttttcggcagttcaagctatatcgaatatagttctgtgtagagaatgtcactgtagttttgagtgtatacatgtgtgggtgctgataattgtgtattttctttgggggtggaaaaggaaaacaattcaagctgagaaaagtattctcaaagatgcatttttataaattttattaaacaattttgttaaaccat

SEQ ID NO: 3578 - DNA, 3438 bp, Homo sapiens
  source 1..3438: mol_type = unassigned DNA; mol_type = unassigned DNA
acttgcaaatcgctgtgtgctcgcagaagccagcacttccacagtctctaaccttcccatggcgagtgctgcagctctatcagcagaacctttctctccgtgtgaggaagagcttttttcccccctttccttttttttttttttcctttccccttaatcagaagcactgaatgaaagccaatcagagagagctcgcccccgttttcttcggttccctgctgtccagagttaaaagtgatgctgagaaagagcttgagttagattgaagtagaatcagtgatagaaaataacagccgaaaacaaacaaaaaggggacatagtgacaatttctcctgggttattttggctggaaccaacttccattatccagaagctgataaaaaagctttgggaaacatgaacaaaacattgatgaaatgttggaaaccagttgaaacacagtaaaaccaactgggtaaaataggaccacttctcttcatctacactgggatttgtcaagaagtgaactatgacaatacatcaatttttgctactgtttctattctgggtatgcctgccacatttctgctctccagaaataatgttcagaaggacgcctgtgccacagcaaagaattttaagttcacgtgtaccaaggagtgatggcaaaattctccatcgtcaaaaacgtggttggatgtggaatcaatttttcttacttgaagaatatacaggatctgattatcagtacgtaggcaagctacattcagaccaagataaaggagatggatcactcaaatatatcttatctggagatggagctggtactctttttattattgatgaaaaaacaggtgatattcatgccacaaggcgaattgatagggaggaaaaggccttttatactctacgcgcacaagctattaacagaagaactctgaggccagtagagccagagtcagagtttgtgatcaaaattcatgatatcaatgacaatgagccaacgttcccagaagaaatctatacagctagtgttcccgaaatgtctgttgtaggtacttctgtggtgcaagtcacagctacagatgccgatgacccttcatatgggaacagcgccagagtcatttacagcatacttcaagggcagccctatttctctgtggagcctgaaacaggtatcatcaggactgctttaccgaacatgaacagagaaaacagagagcaataccaagtggtcatccaggccaaagacatgggcggccagatgggaggcttatcggggacaaccactgtgaacatcacgctgacagatgtcaatgacaacccaccacgtttcccccagaacactattcatcttcgagttcttgaatcctccccagttggcacagccattggaagtgtcaaagcaactgatgctgacactgggaaaaatgctgaagtagaataccgaattattgatggtgacggtactgatatgtttgacatcgtgactgagaaggacacacaggaaggcatcatcactgtgaaaaagccactcgactatgagagccgaagactttatactctgaaagtcgaagcagaaaacacccatgtagatccccgtttttattacctaggaccatttaaagatactaccatagtgaaaatctctatagaagatgtggatgaacctcctgtttttagtaggtcctcctatctgtttgaagttcatgaagatattgaagtgggcacaatcattggtactgtaatggcaagggacccagattctatttccagccccattagattttccttggatcgccatactgaccttgacagaatctttaacattcattcaggaaatggatctctttatacatcaaaacctcttgaccgtgaactatctcagtggcataatcttactgttattgctgctgaaatcaacaatcccaaagagacaacacgcgtggctgtttttgtgagaattttggatgttaatgacaatgccccacagtttgctgtgttctatgacacttttgtatgtgaaaatgccagaccagggcagctaatacagactataagtgcagtagacaaagatgaccctttaggtggacagaaattttttttcagtttagctgctgtcaatccaaacttcacagtacaggataatgaagataatactgccagaatcttaaccagaaaaaatggattcaatagacatgaaatcagtacctatctcttgcctgtggtgatatcagacaatgattacccaattcagagcagcacaggcacactgaccattcgagtgtgtgcttgtgacagccaaggcaacatgcaatcctgcagtgctgaagccctgctcctccctgccggcctcagcactggggccttgatcgccatcctcctctgcatcatcattctactggttatagtagtactgtttgcagctctgaaaagacagcgaaaaaaagagcctctgatcttgtcaaaagaagatatcagagacaacattgtgagctataacgatgagggtggtggagaggaggacacccaggcctttgatatcggcaccctgaggaatcctgcagccattgaggaaaaaaagctccggcgagatattattccagaaacgttatttattcctcggaggactcctacagctccagataacacggacgtccgggatttcattaatgaaaggctaaaagagcatgatcttgaccccaccgcacccccctacgactcacttgcaacctatgcctatgaaggaaatgattccattgctgaatctctgagttcattagaatcaggtactactgaaggagaccaaaactacgattacctccgagaatggggccctcggtttaataagctagcagaaatgtatggtggtggggaaagtgacaaagactcttaacgtaggatatatgttctgttcaaacaagagaaagtaactctacccatgctgtctccacttcacaatatttgatattcaggagcattttcctgccagtcagcacaattttttttctcatttacttcttaatttgttcattaattacattaattctttcctgtaggatgtctcatggaatatatatgacattttatttaatcacttccaagagccaaagctatggaaatacagtgttgtccatcttagtaaataaaagataatttcagaaacatgaacaggatagttctcccttaagcaacctcacaaacaagccgcttctgttaggtacatgtcctgcccttgcaaatgaagcttttaaaaaggtgaagaaaaattttacagtatatcctgttctgtacattaaattaaaaaaacaaaaatgtacatgtgatgttagtaggtgtgatatgcaacctggtatacagacatttgtgcaatttcatttcatcaaattctatctgctaatgttttatatttatatttttgtatttatttttaaaaaaataaaccagtttttacaacta

SEQ ID NO: 3579 - DNA, 1675 bp, Homo sapiens
  source 1..1675: mol_type = unassigned DNA; mol_type = unassigned DNA
tagagatagggtttcaccatgttggccaggctggtctcgaactcctgacctcaagtgatgcacctgccttagtctcccaaaatgctgggattacagccacgagccatcgtgcatgagccagccagaaatgcatctctttatgtgagaactttgatgctgttgatttcagcatttatagcaaaagacaatcccaaagagacaacacgcgtggctgtttttgtgagaattttggatgttaatgacaatgccccacagtttgctgtgttctatgacacttttgtatgtgaaaatgccagaccagggcagctaatacagactataagtgcagtagacaaagatgaccctttaggtggacagaaattttttttcagtttagctgctgtcaatccaaacttcacagtacaggataatgaagataatactgccagaatcttaaccagaaaaaatggattcaatagacatgaaatcagtacctatctcttgcctgtggtgatatcagacaatgattacccaattcagagcagcacaggcacactgaccattcgagtgtgtgcttgtgacagccaaggcaacatgcaatcctgcagtgctgaagccctgctcctccctgccggcctcagcactggggccttgatcgccatcctcctctgcatcatcattctactggttatagtagtactgtttgcagctctgaaaagacagcgaaaaaaagagcctctgatcttgtcaaaagaagatatcagagacaacattgtgagctataacgatgagggtggtggagaggaggacacccaggcctttgatatcggcaccctgaggaatcctgcagccattgaggaaaaaaagctccggcgagatattattccagaaacgttatttattcctcggaggactcctacagctccagataacacggacgtccgggatttcattaatgaaaggctaaaagagcatgatcttgaccccaccgcacccccctacgactcacttgcaacctatgcctatgaaggaaatgattccattgctgaatctctgagttcattagaatcaggtactactgaaggagaccaaaactacgattacctccgagaatggggccctcggtttaataagctagcagaaatgtatggtggtggggaaagtgacaaagactcttaacgtaggatatatgttctgttcaaacaagagaaagtaactctacccatgctgtctccacttcacaatatttgatattcaggagcattttcctgccagtcagcacaattttttttctcatttacttcttaatttgttcattaattacattaattctttcctgtaggatgtctcatggaatatatatgacattttatttaatcacttccaagagccaaagctatggaaatacagtgttgtccatcttagtaaataaaagataatttcagaaacatgaacaggatagttctcccttaagcaacctcacaaacaagccgcttctgttaggtacatgtcctgcccttgcaaatgaagcttttaaaaaggtgaagaaaaattttacagtatatcctgttctgtacattaaattaaaaaaacaaaaatgtacatgtgatgttagtaggtgtgatatgcaacctggtatacagacatttgtgcaatttcatttcatcaaattctatctgctaatgttttatattta

SEQ ID NO: 3580 - DNA, 2855 bp, Homo sapiens
  source 1..2855: mol_type = unassigned DNA; mol_type = unassigned DNA
ccgttttcttcggttccctgctgtccagagttaaaagtgatgctgagaaagagcttgagttagattgaagtagaatcagtgatagaaaataacagccgaaaacaaacaaaaaggggacatagtgacaatttctcctgggttattttggctggaaccaacttccattatccagaagctgataaaaaagctttgggaaacatgaacaaaacattgatgaaatgttggaaaccagttgaaacacagtaaaaccaactgggtaaaataggaccacttctcttcatctacactgggatttgtcaagaagtgaactatgacaatacatcaatttttgctactgtttctattctgggtatgcctgccacatttctgctctccagaaataatgttcagaaggacgcctgtgccacagcaaagaattttaagttcacgtgtaccaaggagtgatggcaaaattctccatcgtcaaaaacgtggttggatgtggaatcaatttttcttacttgaagaatatacaggatctgattatcagtacgtaggcaagctacattcagaccaagataaaggagatggatcactcaaatatatcttatctggagatggagctggtactctttttattattgatgaaaaaacaggtgatattcatgccacaaggcgaattgatagggaggaaaaggccttttatactctacgcgcacaagctattaacagaagaactctgaggccagtagagccagagtcagagtttgtgatcaaaattcatgatatcaatgacaatgagccaacgttcccagaagaaatctatacagctagtgttcccgaaatgtctgttgtaggtacttctgtggtgcaagtcacagctacagatgccgatgacccttcatatgggaacagcgccagagtcatttacagcatacttcaagggcagccctatttctctgtggagcctgaaacaggtatcatcaggactgctttaccgaacatgaacagagaaaacagagagcaataccaagtggtcatccaggccaaagacatgggcggccagatgggaggcttatcggggacaaccactgtgaacatcacgctgacagatgtcaatgacaacccaccacgtttcccccagaacactattcatcttcgagttcttgaatcctccccagttggcacagccattggaagtgtcaaagcaactgatgctgacactgggaaaaatgctgaagtagaataccgaattattgatggtgacggtactgatatgtttgacatcgtgactgagaaggacacacaggaaggcatcatcactgtgaaaaagccactcgactatgagagccgaagactttatactctgaaagtcgaagcagaaaacacccatgtagatccccgtttttattacctaggaccatttaaagatactaccatagtgaaaatctctatagaagatgtggatgaacctcctgtttttagtaggtcctcctatctgtttgaagttcatgaagatattgaagtgggcacaatcattggtactgtaatggcaagggacccagattctatttccagccccattagacaatcccaaagagacaacacgcgtggctgtttttgtgagaattttggatgttaatgacaatgccccacagtttgctgtgttctatgacacttttgtatgtgaaaatgccagaccagggcagctaatacagactataagtgcagtagacaaagatgaccctttaggtggacagaaattttttttcagtttagctgctgtcaatccaaacttcacagtacaggataatgaagataatactgccagaatcttaaccagaaaaaatggattcaatagacatgaaatcagtacctatctcttgcctgtggtgatatcagacaatgattacccaattcagagcagcacaggcacactgaccattcgagtgtgtgcttgtgacagccaaggcaacatgcaatcctgcagtgctgaagccctgctcctccctgccggcctcagcactggggccttgatcgccatcctcctctgcatcatcattctactggttatagtagtactgtttgcagctctgaaaagacagcgaaaaaaagagcctctgatcttgtcaaaagaagatatcagagacaacattgtgagctataacgatgagggtggtggagaggaggacacccaggcctttgatatcggcaccctgaggaatcctgcagccattgaggaaaaaaagctccggcgagatattattccagaaacgttatttattcctcggaggactcctacagctccagataacacggacgtccgggatttcattaatgaaaggctaaaagagcatgatcttgaccccaccgcacccccctacgactcacttgcaacctatgcctatgaaggaaatgattccattgctgaatctctgagttcattagaatcaggtactactgaaggagaccaaaactacgattacctccgagaatggggccctcggtttaataagctagcagaaatgtatggtggtggggaaagtgacaaagactcttaacgtaggatatatgttctgttcaaacaagagaaagtaactctacccatgctgtctccacttcacaatatttgatattcaggagcattttcctgccagtcagcacaattttttttctcatttacttcttaatttgttcattaattacattaattctttcctgtaggatgtctcatggaatatatatgacattttatttaatcacttccaagagccaaagctatggaaatacagtgttgtccatcttagtaaataaaagataatttcagaaacatgaacaggatagttctcccttaagcaacctcacaaacaagccgc

SEQ ID NO: 3581 - DNA, 1021 bp, Homo sapiens
  source 1..1021: mol_type = unassigned DNA; mol_type = unassigned DNA
gagatatattgatgagatatatttttctttttctgcagctaatacagactataagtgcagtagacaaagatgaccctttaggtggacagaaattttttttcagtttagctgctgtcaatccaaacttcacagtacaggataatgaagataatactgccagaatcttaaccagaaaaaatggattcaatagacatgaaatcagtacctatctcttgcctgtggtgatatcagacaatgattacccaattcagagcagcacaggcacactgaccattcgagtgtgtgcttgtgacagccaaggcaacatgcaatcctgcagtgctgaagccctgctcctccctgccggcctcagcactggggccttgatcgccatcctcctctgcatcatcattctactggttatagtagtactgtttgcagctctgaaaagacagcgaaaaaaagagcctctgatcttgtcaaaagaagatatcagagacaacattgtgagctataacgatgagggtggtggagaggaggacacccaggcctttgatatcggcaccctgaggaatcctgcagccattgaggaaaaaaagctccggcgagatattattccagaaacgttatttattcctcggaggactcctacagctccagataacacggacgtccgggatttcattaatgaaaggctaaaagagcatgatcttgaccccaccgcacccccctacgactcacttgcaacctatgcctatgaaggaaatgattccattgctgaatctctgagttcattagaatcaggtactactgaaggagaccaaaactacgattacctccgagaatggggccctcggtttaataagctagcagaaatgtatggtggtggggaaagtgacaaagactcttaacgtaggatatatgttctgttcaaacaagagaaagtaactctacccatgctgtctccacttcacaatatttgatattcaggagcattttcctgccagtcagcacaattttttttctcatttacttcttaatt

SEQ ID NO: 3582 - DNA, 6874 bp, Homo sapiens
  source 1..6874: mol_type = unassigned DNA; mol_type = unassigned DNA
agcgtcgcgggccgaggagcagatgccgcgggggccgctcgcagccgccgctgacttgtgaatgggaccgggactggggccgggactgacaccgcagcgcttgccctgcgccagggactggcggctcggaggttgcgtccaccctcaagggccccagaaatcactgtgttttcagctcagcggccctgtgacattccttcgtgttgtcatttgttgagtgaccaatcagatgggtggagtgtgttacagaaattggcagcaagtatccaatgggtgaagaagaagctaactggggacgtgggcagccctgacgtgatgagctcaaccagcagagacattccatcccaagagaggtctgcgtgacgcgtccgggaggccaccctcagcaagaccaccgtacagttggtggaaggggtgacagctgcattctcctgtgcctaccacgtaaccaaaaatgaaggagaactactgtttacaagccgccctggtgtgcctgggcatgctgtgccacagccatgcctttgccccagagcggcgggggcacctgcggccctccttccatgggcaccatgagaagggcaaggaggggcaggtgctacagcgctccaagcgtggctgggtctggaaccagttcttcgtgatagaggagtacaccgggcctgaccccgtgcttgtgggcaggcttcattcagatattgactctggtgatgggaacattaaatacattctctcaggggaaggagctggaaccatttttgtgattgatgacaaatcagggaacattcatgccaccaagacgttggatcgagaagagagagcccagtacacgttgatggctcaggcggtggacagggacaccaatcggccactggagccaccgtcggaattcattgtcaaggtccaggacattaatgacaaccctccggagttcctgcacgagacctatcatgccaacgtgcctgagaggtccaatgtgggaacgtcagtaatccaggtgacagcttcagatgcagatgaccccacttatggaaatagcgccaagttagtgtacagtatcctcgaaggacaaccctatttttcggtggaagcacagacaggtatcatcagaacagccctacccaacatggacagggaggccaaggaggagtaccacgtggtgatccaggccaaggacatgggtggacatatgggcggactctcagggacaaccaaagtgacgatcacactgaccgatgtcaatgacaacccaccaaagtttccgcagagcgtataccagatgtctgtgtcagaagcagccgtccctggggaggaagtaggaagagtgaaagctaaagatccagacattggagaaaatggcttagtcacatacaatattgttgatggagatggtatggaatcgtttgaaatcacaacggactatgaaacacaggagggggtgataaagctgaaaaagcctgtagattttgaaaccaaaagagcctatagcttgaaggtagaggcagccaacgtgcacatcgacccgaagtttatcagcaatggccctttcaaggacactgtgaccgtcaagatctcagtagaagatgctgatgagccccctatgttcttggccccaagttacatccacgaagtccaagaaaatgcagctgctggcaccgtggttgggagagtgcatgccaaagaccctgatgctgccaacagcccgataaggtattccatcgatcgtcacactgacctcgacagatttttcactattaatccagaggatggttttattaaaactacaaaacctctggatagagaggaaacagcctggctcaacatcactgtctttgcagcagaaatccacaatcggcatcaggaagccaaagtcccagtggccattagggtccttgatgtcaacgataatgctcccaagtttgctgccccttatgaaggtttcatctgtgagagtgatcagaccaagccactttccaaccagccaattgttacaattagtgcagatgacaaggatgacacggccaatggaccaagatttatcttcagcctaccccctgaaatcattcacaatccaaatttcacagtcagagacaaccgagataacacagcaggcgtgtacgcccggcgtggagggttcagtcggcagaagcaggacttgtaccttctgcccatagtgatcagcgatggcggcatcccgcccatgagtagcaccaacaccctcaccatcaaagtctgcgggtgcgacgtgaacggggcactgctctcctgcaacgcagaggcctacattctgaacgccggcctgagcacaggcgccctgatcgccatcctcgcctgcatcgtcattctcctgggttgcccaagcttaatggaacccccctctcccagggaagacatgagattgctttatctgggcttccagctgatgctattttcctatgttaaagtaaacagaagattttgtcttctgggggtctttataaaacttcctttcctctatgtggtggctacagagagtccaaccacacttacgtcattgtagtattgtttgtgaccctgagaaggcaaaagaaagaaccactcattgtctttgaggaagaagatgtccgtgagaacatcattacttatgatgatgaagggggtggggaagaagacacagaagcctttgatattgccaccctccagaatcctgatggtatcaatggatttatcccccgcaaagacatcaaacctgagtatcagtacatgcctagacctgggctccggccagcgcccaacagcgtggatgtcgatgacttcatcaacacgagaatacaggaggcagacaatgaccccacggctcctccttatgactccattcaaatctacggttatgaaggcaggggctcagtggccgggtccctgagctccctagagtcggccaccacagattcagacttggactatgattatctacagaactggggacctcgttttaagaaactagcagatttgtatggttccaaagacacttttgatgacgattcttaacaataacgatacaaatttggccttaagaactgtgtctggcgttctcaagaatctagaagatgtgtaaacaggtatttttttaaatcaaggaaaggctcatttaaaacaggcaaagttttacagagaggatacatttaataaaactgcgaggacatcaaagtggtaaatactgtgaaataccttttctcacaaaaaggcaaatattgaagttgtttatcaacttcgctagaaaaaaaaaacacttggcatacaaaatatttaagtgaaggagaagtctaacgctgaactgacaatgaagggaaattgtttatgtgttatgaacatccaagtctttcttcttttttaagttgtcaaagaagcttccacaaaattagaaaggacaacagttctgagctgtaatttcgccttaaactctggacactctatatgtagtgcatttttaaacttgaaatatataatattcagccagcttaaacccatacaatgtatgtacaatacaatgtacaattatgtctcttgagcatcaatcttgttactgctgattcttgtaaatctttttgcttctactttcatcttaaactaatacgtgccagatataactgtcttgtttcagtgagagacgccctatttctatgtcatttttaatgtatctatttgtacaattttaaagttcttattttagtatacgtataaatatcagtattctgacatgtaagaaaatgttacggcatcacacttatattttatgaacattgtactgttgctttaatatgagcttcaatataagaagcaatctttgaaataaaaaaagatttttttttaattctgggtttgattcttaacattgaaacaaacgttaagtatttctaatgatccatttatatttctaatttaattgtgatcttttaataaccctatttatgatctgttgttgtctgtctgctgcttttattgtttatttaaaatcaaatatgttttacaaatgttttttcagacaagattctgtaacatcatgtaaagcttttttgtacattcttggtgttaacctcctggcttctcttcacacacatcttctaaaaaagaaggatgtgaaagaactaggtcagtctatgactttgcaatatgtgttatatagtatgcatttatcttgtatatcagtaatttgatggttatgagagatgaatccatgagggaatggagctatcagaactctaatgttccaggtatacattctatgccccacactgagcactggggaactgggggactagagtcaaaaatataaatttgcccagactctaatgttattctattttttcttctgttgaacttaccaggctattgtaagactcttgatagttgaaactgcttatttttcctcctgtaattttaactaattgtaaaatgatgtggcattttatgttttaatgagaatgggcgattcatttaaaaaagctttgtttagaatatgcttggggccgtaagctcagaatgagggcagggaccattttggattctgagagtcgatgccatttggtccaggagtgtgtctacagtcccctgcattccagctagtttcttggggattgaaacttatgtgaagggcatttcacctgttcagttgggccaaaggtcaaaacgtagcaatacttggggaaagaccacataaagtcacactgcaagtgctttccctctttccccctacacacagggcacgtgctttttcttggattgcagacaatttttacagtttttttctgactttattgtgaaagtttgtttcaagcatttcttgatatcatgttatgtactatttttatgatttagtcaacatgcatacaaagaaatgttttttatgaagtgctcacttccattttactttgcattgaaatcaaattgggctgaacacttcaatggaatacattttgtggacaatgtcactttagaatctttcatctcagtgaaggattacacattctcaatacttccataattgcaggttgtgttcatttttttatatagtttttgtaatccaaagaatattttgctagatttgcacagatctccaattgaatttgcaatgaagaaataactcaaaaggaatatgaatagcatttaaataagtatacagctgtaagtaaccctgtcaccatggatgatccttttctctaggaatgtatttggattagagatgacaactacattttcgcatttttatgttgaagtcttttttaaaaaggctgtttacttttcagtagttaagaatacttgtttttctttttcttttttttttttttttttaccttttattttttcgttaagcctctattgtttgtagaacactcttagaaacttggaaataaaatgtctttcccaactagtggagtcctttttcatttggagcacattgccttaaaagaagtcttaatttaaacggtccttccttattctaaagtaatcactgttttataccatctatgcagctaaaagaaggaacatgcttctgttcttttcctcaagtaatggttattgtttctagtcatcattcattcattgattcattcattaattcatcaaaatcttattttataaaccctgttccacttactggaggattcagaatgaatcttactaccttttctgacatcttttgataattcagccctgtaccaaagtatccaccttgttgtcttataatcacctatttacctatttgccctcctagaaaatgcaagaagatattttctctccttccaaattgaaggaagaacataaaagatataacaggaaggagatggtgagatatagagtgtgagcggaaattaggccagctgtggcaattctggacagatcttgggtttagctaagttatttcttttaggcctgggtttctgggggtgacagggaagataaaagagtagtttatttgcacctcttggagaattgcttaaaaatatagagatcatggctctgtatgtcaggtggaaccaggtcaggagtatttgaaactgctcctgggtcattgtgacatatccttcacatctttttgagaaactttataagacaatgggggtgaatgggggctgggcagttggagtctctgagcagaagaggggcaaaatttatttggcaggcagtgtggaggacagattaggagcatataaacccagaggtgtgccccaggagggcttttgcaaaggtcaatatgagatagaatgagggcctgaaataattcagtaatttggagatggagaagaggaaagacttctctgctcttgcactgccatcagcctggtctgggccatggtcatctctgacccggaagactgaccccacctcttggctcaccctctgcctcccaacctcctcttcacaaagaagccagagggatacttttaacacacaacccagatcacatgacttcgtaacttaaacctcttcactggcttcccaaagacttaaaatgaattctgatgcctttattttattgctttacatgaacagggccctgcgaacctctccagtgtcattccactccatcctcctttcagtgcacgatgctccagccacactggccatctttcggttcctgatacaaaaaaaaacacgttccttttccatggaaagcaggtcacccttgttattttgtatcgatgacaactctttaaacttattttgctttttggctttatgtatgtgtgtgggtgggtgggactgactgccccactagaatgtaagctccatgagggcagggaatcttgctttcttgtttaccattgtatactcagttctttacacagtgcctgaaacataacaggtacacaataaatatctattgaatgaaagcaaa

SEQ ID NO: 3583 - DNA, 6857 bp, Homo sapiens
  source 1..6857: mol_type = unassigned DNA; mol_type = unassigned DNA
ttctctcagcccccgccctttccttccctcacagcggcagcctccctcctcccgccccccccgccccgcacccgcctgcccgcccgccacctccccccggtttctcattcctgccactagcgcgctcggcggctcattccgcggccgccgccagctgaggggagcgtcgcgggccgaggagcagatgccgcgggggccgctcgcagccgccgctgacttgtgaatgggaccgggactggggccgggactgacaccgcagcgcttgccctgcgccagggactggcggctcggaggttgcgtccaccctcaagggccccagaaatcactgtgttttcagctcagcggccctgtgacattccttcgtgttgtcatttgttgagtgaccaatcagatgggtggagtgtgttacagaaattggcagcaagtatccaatgggtgaagaagaagctaactggggacgtgggcagccctgacgtgatgagctcaaccagcagagacattccatcccaagagaggtctgcgtgacgcgtccgggaggccaccctcagcaagaccaccgtacagttggtggaaggggtgacagctgcattctcctgtgcctaccacgtaaccaaaaatgaaggagaactactgtttacaagccgccctggtgtgcctgggcatgctgtgccacagccatgcctttgccccagagcggcgggggcacctgcggccctccttccatgggcaccatgagaagggcaaggaggggcaggtgctacagcgctccaagcgtggctgggtctggaaccagttcttcgtgatagaggagtacaccgggcctgaccccgtgcttgtgggcaggcttcattcagatattgactctggtgatgggaacattaaatacattctctcaggggaaggagctggaaccatttttgtgattgatgacaaatcagggaacattcatgccaccaagacgttggatcgagaagagagagcccagtacacgttgatggctcaggcggtggacagggacaccaatcggccactggagccaccgtcggaattcattgtcaaggtccaggacattaatgacaaccctccggagttcctgcacgagacctatcatgccaacgtgcctgagaggtccaatgtgggaacgtcagtaatccaggtgacagcttcagatgcagatgaccccacttatggaaatagcgccaagttagtgtacagtatcctcgaaggacaaccctatttttcggtggaagcacagacaggtatcatcagaacagccctacccaacatggacagggaggccaaggaggagtaccacgtggtgatccaggccaaggacatgggtggacatatgggcggactctcagggacaaccaaagtgacgatcacactgaccgatgtcaatgacaacccaccaaagtttccgcagagcgtataccagatgtctgtgtcagaagcagccgtccctggggaggaagtaggaagagtgaaagctaaagatccagacattggagaaaatggcttagtcacatacaatattgttgatggagatggtatggaatcgtttgaaatcacaacggactatgaaacacaggagggggtgataaagctgaaaaagcctgtagattttgaaaccaaaagagcctatagcttgaaggtagaggcagccaacgtgcacatcgacccgaagtttatcagcaatggccctttcaaggacactgtgaccgtcaagatctcagtagaagatgctgatgagccccctatgttcttggccccaagttacatccacgaagtccaagaaaatgcagctgctggcaccgtggttgggagagtgcatgccaaagaccctgatgctgccaacagcccgataaggtattccatcgatcgtcacactgacctcgacagatttttcactattaatccagaggatggttttattaaaactacaaaacctctggatagagaggaaacagcctggctcaacatcactgtctttgcagcagaaatccacaatcggcatcaggaagccaaagtcccagtggccattagggtccttgatgtcaacgataatgctcccaagtttgctgccccttatgaaggtttcatctgtgagagtgatcagaccaagccactttccaaccagccaattgttacaattagtgcagatgacaaggatgacacggccaatggaccaagatttatcttcagcctaccccctgaaatcattcacaatccaaatttcacagtcagagacaaccgagataacacagcaggcgtgtacgcccggcgtggagggttcagtcggcagaagcaggacttgtaccttctgcccatagtgatcagcgatggcggcatcccgcccatgagtagcaccaacaccctcaccatcaaagtctgcgggtgcgacgtgaacggggcactgctctcctgcaacgcagaggcctacattctgaacgccggcctgagcacaggcgccctgatcgccatcctcgcctgcatcgtcattctcctggtcattgtagtattgtttgtgaccctgagaaggcaaaagaaagaaccactcattgtctttgaggaagaagatgtccgtgagaacatcattacttatgatgatgaagggggtggggaagaagacacagaagcctttgatattgccaccctccagaatcctgatggtatcaatggatttatcccccgcaaagacatcaaacctgagtatcagtacatgcctagacctgggctccggccagcgcccaacagcgtggatgtcgatgacttcatcaacacgagaatacaggaggcagacaatgaccccacggctcctccttatgactccattcaaatctacggttatgaaggcaggggctcagtggccgggtccctgagctccctagagtcggccaccacagattcagacttggactatgattatctacagaactggggacctcgttttaagaaactagcagatttgtatggttccaaagacacttttgatgacgattcttaacaataacgatacaaatttggccttaagaactgtgtctggcgttctcaagaatctagaagatgtgtaaacaggtatttttttaaatcaaggaaaggctcatttaaaacaggcaaagttttacagagaggatacatttaataaaactgcgaggacatcaaagtggtaaatactgtgaaataccttttctcacaaaaaggcaaatattgaagttgtttatcaacttcgctagaaaaaaaaaacacttggcatacaaaatatttaagtgaaggagaagtctaacgctgaactgacaatgaagggaaattgtttatgtgttatgaacatccaagtctttcttcttttttaagttgtcaaagaagcttccacaaaattagaaaggacaacagttctgagctgtaatttcgccttaaactctggacactctatatgtagtgcatttttaaacttgaaatatataatattcagccagcttaaacccatacaatgtatgtacaatacaatgtacaattatgtctcttgagcatcaatcttgttactgctgattcttgtaaatctttttgcttctactttcatcttaaactaatacgtgccagatataactgtcttgtttcagtgagagacgccctatttctatgtcatttttaatgtatctatttgtacaattttaaagttcttattttagtatacgtataaatatcagtattctgacatgtaagaaaatgttacggcatcacacttatattttatgaacattgtactgttgctttaatatgagcttcaatataagaagcaatctttgaaataaaaaaagatttttttttaattctgggtttgattcttaacattgaaacaaacgttaagtatttctaatgatccatttatatttctaatttaattgtgatcttttaataaccctatttatgatctgttgttgtctgtctgctgcttttattgtttatttaaaatcaaatatgttttacaaatgttttttcagacaagattctgtaacatcatgtaaagcttttttgtacattcttggtgttaacctcctggcttctcttcacacacatcttctaaaaaagaaggatgtgaaagaactaggtcagtctatgactttgcaatatgtgttatatagtatgcatttatcttgtatatcagtaatttgatggttatgagagatgaatccatgagggaatggagctatcagaactctaatgttccaggtatacattctatgccccacactgagcactggggaactgggggactagagtcaaaaatataaatttgcccagactctaatgttattctattttttcttctgttgaacttaccaggctattgtaagactcttgatagttgaaactgcttatttttcctcctgtaattttaactaattgtaaaatgatgtggcattttatgttttaatgagaatgggcgattcatttaaaaaagctttgtttagaatatgcttggggccgtaagctcagaatgagggcagggaccattttggattctgagagtcgatgccatttggtccaggagtgtgtctacagtcccctgcattccagctagtttcttggggattgaaacttatgtgaagggcatttcacctgttcagttgggccaaaggtcaaaacgtagcaatacttggggaaagaccacataaagtcacactgcaagtgctttccctctttccccctacacacagggcacgtgctttttcttggattgcagacaatttttacagtttttttctgactttattgtgaaagtttgtttcaagcatttcttgatatcatgttatgtactatttttatgatttagtcaacatgcatacaaagaaatgttttttatgaagtgctcacttccattttactttgcattgaaatcaaattgggctgaacacttcaatggaatacattttgtggacaatgtcactttagaatctttcatctcagtgaaggattacacattctcaatacttccataattgcaggttgtgttcatttttttatatagtttttgtaatccaaagaatattttgctagatttgcacagatctccaattgaatttgcaatgaagaaataactcaaaaggaatatgaatagcatttaaataagtatacagctgtaagtaaccctgtcaccatggatgatccttttctctaggaatgtatttggattagagatgacaactacattttcgcatttttatgttgaagtcttttttaaaaaggctgtttacttttcagtagttaagaatacttgtttttctttttcttttttttttttttttttaccttttattttttcgttaagcctctattgtttgtagaacactcttagaaacttggaaataaaatgtctttcccaactagtggagtcctttttcatttggagcacattgccttaaaagaagtcttaatttaaacggtccttccttattctaaagtaatcactgttttataccatctatgcagctaaaagaaggaacatgcttctgttcttttcctcaagtaatggttattgtttctagtcatcattcattcattgattcattcattaattcatcaaaatcttattttataaaccctgttccacttactggaggattcagaatgaatcttactaccttttctgacatcttttgataattcagccctgtaccaaagtatccaccttgttgtcttataatcacctatttacctatttgccctcctagaaaatgcaagaagatattttctctccttccaaattgaaggaagaacataaaagatataacaggaaggagatggtgagatatagagtgtgagcggaaattaggccagctgtggcaattctggacagatcttgggtttagctaagttatttcttttaggcctgggtttctgggggtgacagggaagataaaagagtagtttatttgcacctcttggagaattgcttaaaaatatagagatcatggctctgtatgtcaggtggaaccaggtcaggagtatttgaaactgctcctgggtcattgtgacatatccttcacatctttttgagaaactttataagacaatgggggtgaatgggggctgggcagttggagtctctgagcagaagaggggcaaaatttatttggcaggcagtgtggaggacagattaggagcatataaacccagaggtgtgccccaggagggcttttgcaaaggtcaatatgagatagaatgagggcctgaaataattcagtaatttggagatggagaagaggaaagacttctctgctcttgcactgccatcagcctggtctgggccatggtcatctctgacccggaagactgaccccacctcttggctcaccctctgcctcccaacctcctcttcacaaagaagccagagggatacttttaacacacaacccagatcacatgacttcgtaacttaaacctcttcactggcttcccaaagacttaaaatgaattctgatgcctttattttattgctttacatgaacagggccctgcgaacctctccagtgtcattccactccatcctcctttcagtgcacgatgctccagccacactggccatctttcggttcctgatacaaaaaaaaacacgttccttttccatggaaagcaggtcacccttgttattttgtatcgatgacaactctttaaacttattttgctttttggctttatgtatgtgtgtgggtgggtgggactgactgccccactagaatgtaagctccatgagggcagggaatcttgctttcttgtttaccattgtatactcagttctttacacagtgcctgaaacataacaggtacacaataaatatctattgaatgaaagcaaa

SEQ ID NO: 3584 - DNA, 2395 bp, Homo sapiens
  source 1..2395: mol_type = unassigned DNA; mol_type = unassigned DNA
tgcgccagggactggcggctcggaggttgcgtccaccctcaagggccccagaaatcactgtgttttcagctcagcggccctgtgacattccttcgtgttgtcatttgttgagtgaccaatcagatgggtggagtgtgttacagaaattggcagcaagtatccaatgggtgaagaagcttcattcagatattgactctggtgatgggaacattaaatacattctctcaggggaaggagctggaaccatttttgtgattgatgacaaatcagggaacattcatgccaccaagacgttggatcgagaagagagagcccagtacacgttgatggctcaggcggtggacagggacaccaatcggccactggagccaccgtcggaattcattgtcaaggtccaggacattaatgacaaccctccggagttcctgcacgagacctatcatgccaacgtgcctgagaggtccaatgtgggaacgtcagtaatccaggtgacagcttcagatgcagatgaccccacttatggaaatagcgccaagttagtgtacagtatcctcgaaggacaaccctatttttcggtggaagcacagacaggtatcatcagaacagccctacccaacatggacagggaggccaaggaggagtaccacgtggtgatccaggccaaggacatgggtggacatatgggcggactctcagggacaaccaaagtgacgatcacactgaccgatgtcaatgacaacccaccaaagtttccgcagagcgtataccagatgtctgtgtcagaagcagccgtccctggggaggaagtaggaagagtgaaagctaaagatccagacattggagaaaatggcttagtcacatacaatattgttgatggagatggtatggaatcgtttgaaatcacaacggactatgaaacacaggagggggtgataaagctgaaaaagcctgtagattttgaaaccaaaagagcctatagcttgaaggtagaggcagccaacgtgcacatcgacccgaagtttatcagcaatggccctttcaaggacactgtgaccgtcaagatctcagtagaagatgctgatgagccccctatgttcttggccccaagttacatccacgaagtccaagaaaatgcagctgctggcaccgtggttgggagagtgcatgccaaagaccctgatgctgccaacagcccgataaggtattccatcgatcgtcacactgacctcgacagatttttcactattaatccagaggatggttttattaaaactacaaaacctctggatagagaggaaacagcctggctcaacatcactgtctttgcagcagaaatccacaatcggcatcaggaagccaaagtcccagtggccattagggtccttgatgtcaacgataatgctcccaagtttgctgccccttatgaaggtttcatctgtgagagtgatcagaccaagccactttccaaccagccaattgttacaattagtgcagatgacaaggatgacacggccaatggaccaagatttatcttcagcctaccccctgaaatcattcacaatccaaatttcacagtcagagacaaccgagataacacagcaggcgtgtacgcccggcgtggagggttcagtcggcagaagcaggacttgtaccttctgcccatagtgatcagcgatggcggcatcccgcccatgagtagcaccaacaccctcaccatcaaagtctgcgggtgcgacgtgaacggggcactgctctcctgcaacgcagaggcctacattctgaacgccggcctgagcacaggcgccctgatcgccatcctcgcctgcatcgtcattctcctggtcattgtagtattgtttgtgaccctgagaaggcaaaagaaagaaccactcattgtctttgaggaagaagatgtccgtgagaacatcattacttatgatgatgaagggggtggggaagaagacacagaagcctttgatattgccaccctccagaatcctgatggtatcaatggatttatcccccgcaaagacatcaaacctgagtatcagtacatgcctagacctgggctccggccagcgcccaacagcgtggatgtcgatgacttcatcaacacgagaatacaggaggcagacaatgaccccacggctcctccttatgactccattcaaatctacggttatgaaggcaggggctcagtggccgggtccctgagctccctagagtcggccaccacagattcagacttggactatgattatctacagaactggggacctcgttttaagaaactagcagatttgtatggttccaaagacacttttgatgacgattcttaacaataacgatacaaatttggccttaagaactgtgtctggcgttctcaagaatctag

SEQ ID NO: 3585 - DNA, 436 bp, Homo sapiens
  source 1..436: mol_type = unassigned DNA; mol_type = unassigned DNA
gaggaaacagcctggctcaacatcactgtctttgcagcagaaatccacaatcggcatcaggaagccaaagtcccagtggccattagggtccttgatgtcaacgataatgctcccaagtttgctgccccttatgaaggtttcatctgtgagagtgatcagaccaagccactttccaaccagccaattgttacaattagtgcagatgacaaggatgacacggccaatggaccaagatttatcttcagcctaccccctgaaatcattcacaatccaaatttcacagtcagagacaaccgagcccgagcttcaaagccgactcagcaggcagcaggaaaatagaacactggatgattcttcaacatttaagtccatcttgggctgttaatatcaggaatggtgctatttgggcagatgaagagcatgtctgcccaggttt

SEQ ID NO: 3586 - DNA, 3639 bp, Homo sapiens
  source 1..3639: mol_type = unassigned DNA; mol_type = unassigned DNA
gatgtctgtgtcagaagcagccgtccctggggaggaagtaggaagagtgaaagctaaagatccagacattggagaaaatggcttagtcacatacaatattgttgatggagatggtatggaatcgtttgaaatcacaacggactatgaaacacaggagggggtgataaagctgaaaaaggtgagttagggtaaggaatcagacgtgtcagtggtatggcctgctctgccaaggcaacactgcaagaaacagggaggcgacggttaagaaatgagaatttgcgaaaccaggggctgacctgactttgtagttgagctctgagctctggaagatcacagaattgtattcctttctgttactgcagagaagctgacaaaggggctggtgatacctgcctgagattgctagttagttcttaaatgttttccgatggagggaagcacagttctcccatggagggaaggacaatgagataaatctagattttgaagaagcagccctgagcatgcatggaattccccccttagctctgccacactgaatctgttagataagctgttcagaactcttactgtttcaacattcaagattcactgcattgctggaccctctgtgaaactgaagccttctctacttgtttttatctcaagtgaacctggagaagcaacaataatggaccttctcccctagtcaaagagcctgtggacctcccctcatagtcagtctccaaaaacatgtatctggaattaatttattacaaagagaagtttagtgtttcttcttttttacatgcgctcaatactgactactggccagacacagcaccatcctcttacaaacatcatttcatttacttttcacaaaaacaaacaaaagtatgaagtaggtagtgttatcccaatgggcaaagagacctcaacttaattttgaggagattggggctcagacagatgaaatcatttgacccagtcactgtcatatagctcaggcatgccgacctggaattcacaccttagttattctagaacaacttccctctcaagacattttgaaaacagctggcctggaaagcgtttgtaaagaagagccagataagattcacttccaagtgaagaaataattcccgtacattctaaaaaggtttccccccgtgatttaccacttgagaaatcaacacctctccatcatgaaagtgtatggagcattaaatcggaattggaagatgggattaccttggttttaatcaagcgttcattttcaacttagttttatagcatgaatattaaactccttggtgcgatggaaaagactggactctaacactgatagaaaattaatttgaagcatcaataaagaggccagtagctaaagaggagggaaggaccagtgggggaagacaggtcctgaaaggaatctttcaggtgggggagcaaggagtgacctgtgctaagaaactgacctttcacagacttttaaagtatgttggggttggggaaaatattatagagcacaaaacaaagaaaaggtagggggtgattgttataaaaaaagaaagaaaatgaaggatatggaaattggggtgaaatttggatacttggaaaagtctacattaatggatgaatggtaggaccgaggaagcctaattatcaaccacagggagctagggcagtcactaattctggtttctcctctggaaaagtagctgtgtgaattgtgtgttgcctagagctgtcaacttacttcgttaattaatattactatctcttctgcttgacactgacatatgaacattgacatcagcaattcctgcctcccatcctttgctgttcatgtaattgggtagttggttatgctaaggttgtcacctgtttttagtgtattcagggcataaacacacactgtatctctgaaatcctgaaacatttaaatcacccccatggaactcacacgtcgcaaatgagctctctgcatatgattaatttgcacatttgcctccaattcagtgtgtttattctaggcaaaggaataatcttctataaagcactgatgcttaggttttaaatagtgtaagatgttattgcatttgtaaaagaacatttgctcaaacttctagcacaaagttccaaatgtccaccgggggaaaaaaaagaaaaattatagatgaatttaacagagtaaaaatatgactccttgtgaaagtcattccatgcaatttaatactgtaaaagtctatagagacattatggcaatatttctgcattttaaagtattttttaacttagtgtttttatttatttcctaatttattcacccatttttccaccaagagttattgagttcttactatttgtcaggcaggccctttgccagaggctggaaatctaaagttgaagaggcagagtcttgaccacagggagttcacaatttaacaggacagtgaagtgatacaataattaaaaccgagagggttttctcagccttagcagtgttgatgtctagggctggataattctttgttgtaggaggctgttctgcgcattgtaggatatttggtagtatctagtatcccaggcttcccctcactaaaggtcattaagcacgtgctctaccccacccaacagtcctgataataataataaaaataattactctagacattgcctaatagccctggagtaactgggagcaaaatcactccccagttgaaaattgactgcaatagtgtgataaggcctatgcacatgggacatgaatgacttcttgtgggggcagttctcaagctgagtcttgatagatgaggagaaatttgctggatagttaaggacagaaaaggcagaaaaaataactcatgatgggctagtatcaatggaaacaggacacatttaagaaactgcaataccttcaatcttgagaatcttaagatatatacggtaaaaccaacaaacaaacttgttaaaattcaagggagatgttacaaagaattgaagaaggtagaagaggtagtgagatagtagtgaaggagaagaattcaagaaataattactagatagaatcattcatttattgaatattttagaaaacaataaatacctcttgagttctgactgtgtcttagtttaatagtgcacaggaaagagagaaactacccttggggtatttggacaatctctgtgtggttagctgaggaagaaccagggtcaaataaagatgaggttttaggtggcttcgtggacttagaggggaaaatccaatctgttcacgcagcacctttgactaaatgggaatcccatctatctcagagaaatcaccgcacagtgtctgagctatttattttcaaccagataaactccttgaaaagcagtgtcagagcagaattataaggcatttttaatattccctgttttaataaaactctttttatgtttgatttttctttatattctttgtccgcacgtatatagatgtggatacataacatttaacacggttgcaatcagagggtgatctgatttgttaacttaatgtcacatcataaacattttacatgctgttatataatgtacataatcatttttaatgactacataacatcccatcctattgacgaatcattatgtccttaataaaatctcacagttgga

SEQ ID NO: 3587 - DNA, 781 bp, Homo sapiens
  source 1..781: mol_type = unassigned DNA; mol_type = unassigned DNA
taatgacaaccctccggagttcctgcacgagacctatcatgccaacgtgcctgagaggtccaatgtgggaacgtcagtaatccaggtgacagcttcagatgcagatgaccccacttatggaaatagcgccaagttagtgtacagtatcctcgaaggacaaccctatttttcggtggaagcacagacaggtatcatcagaacagccctacccaacatggacagggaggccaaggaggagtaccacgtggtgatccaggccaaggacatgggtggacatatgggcggactctcagggacaaccaaagtgacgatcacactgaccgatgtcaatgacaacccaccaaagtttccgcagagtaagtaggtggacttggctttcacttttccatggtgacacagccagctctctccctcctctaacctattcctgctttactgaggtatcaaaaagaaaatctagaaaactaagggcaattcatatcattcttacaaaaacaaaacacaaaaacaagacaacaacaacaacaacaatgtcggggagtagaggtagtaggagaatgaaaagatgtaaaaagttctacaaccctggaaacaaaatatcgtttttgctaagtattttgcttggtagtagtgatgcaatctagtaattaattaacccttttctgcctcagtgtcctcatttctaacctggatataacagtccctgaatcagttatcaattactgtgtaacaaattgctggaaaacttagtggtttaaaacaataaaaataataacaataa

SEQ ID NO: 3588 - DNA, 1235 bp, Homo sapiens
  source 1..1235: mol_type = unassigned DNA; mol_type = unassigned DNA
gctggcagtgccagggatcaggagccgcctctccgtctgtccagaacaaagctgggctgagccctctcacggtcctgtggcccttggtctccccacatgaggtgtcccgagattgaagagagaaggtgcctcctggcattgccaaggctggaatctgcctgtcaaggaagtccctcggcggctagctgctgcaccatgaccttcgtgatggtggagtgagtaggcactggaatcaataagcctggcctctccatctgccagcctgaatgcagaaatcactgtgttttcagctcagcggccctgtgacattccttcgtgttgtcatttgttgagtgaccaatcagatgggtggagtgtgttacagaaattggcagcaagtatccaatgggtgaagaagaagctaactggggacgtgggcagccctgacgtgatgagctcaaccagcagagacattccatcccaagagaggtctgcgtgacgcgtccgggaggccaccctcagcaagaccaccgtacagttggtggaaggggtgacagctgcattctcctgtgcctaccacgtaaccaaaaatgaaggagaactactgtttacaagccgccctggtgtgcctgggcatgctgtgccacagccatgcctttgccccagagcggcgggggcacctgcggccctccttccatgggcaccatgagaagggcaaggaggggcaggtgctacagcgctccaagcgtggctgggtctggaaccagttcttcgtgatagaggagtacaccgggcctgaccccgtgcttgtgggcaggcttcattcagatattgactctggtgatgggaacattaaatacattctctcaggggaaggagctggaaccatttttgtgattgatgacaaatcagggaacattcatgccaccaagacgttggatcgagaagagagagcccagtacacgttgatggctcaggcggtggacagggacaccaatcggccactggagccaccgtcggaattcattgtcaaggtccaggacattaatgacaaccctccggagttcctgcacgagacctatcatgccaacgtgcctgagaggtccaatgtgggaacgtcagtaatccaggtgacagcttcagatgcagatgaccccacttatggaaatagcgccaagttagtgtacagtatcctcgaaggacaaccctatttttcggtggaagcacagacaggtatcatcagaacagccctaccc

SEQ ID NO: 3589 - DNA, 584 bp, Homo sapiens
  source 1..584: mol_type = unassigned DNA; mol_type = unassigned DNA
aagagcaaaactcgagtacctctgagggaaagccggaccccttgtccatcctctcctgtaaatcactgtgttttcagctcagcggccctgtgacattccttcgtgttgtcatttgttgagtgaccaatcagatgggtggagtgtgttacagaaattggcagcaagtatccaatgggtgaagaagaagctaactggggacgtgggcagccctgacgtgatgagctcaaccagcagagacattccatcccaagagaggtctgcgtgacgcgtccgggaggccaccctcagcaagaccaccgtacagttggtggaaggggtgacagctgcattctcctgtgcctaccacgtaaccaaaaatgaaggagaactactgtttacaagccgccctggtgtgcctgggcatgctgtgccacagccatgcctttgccccagagcggcgggggcacctgcggccctccttccatgggcaccatgagaagggcaaggaggggcaggtgctacagcgctccaagcgtggctgggtctggaaccagttcttcgtgatagaggagtacaccgggcctgaccccgtgcttgtgggcagg

SEQ ID NO: 3590 - DNA, 568 bp, Homo sapiens
  source 1..568: mol_type = unassigned DNA; mol_type = unassigned DNA
tcattccgcggccgccgccagctgaggggagcgtcgcgggccgaggagcagatgccgcgggggccgctcgcagccgccgctgacttgtgaatgggaccgggactggggccgggactgacaccgcagcgcttgccctgcgccagggactggcggctcggaggttgcgtccaccctcaagggccccagaagctaactggggacgtgggcagccctgacgtgatgagctcaaccagcagagacattccatcccaagagaggtctgcgtgacgcgtccgggaggccaccctcagcaagaccaccgtacagttggtggaaggggtgacagctgcattctcctgtgcctaccacgtaaccaaaaatgaaggagaactactgtttacaagccgccctggtgtgcctgggcatgctgtgccacagccatgcctttgccccagagcggcgggggcacctgcggccctccttccatgggcaccatgagaagggcaaggaggggcaggtgctacagcgctccaagcgtggctgggtctggaaccagttcttcgtgatagaggagtacaccgggcctgac

SEQ ID NO: 3591 - DNA, 566 bp, Homo sapiens
  source 1..566: mol_type = unassigned DNA; mol_type = unassigned DNA
agactccatctgagccctgagggagtcggagcgccgcgccacggggcgggaggggcggccacgaatccagggaaatcactgtgttttcagctcagcggccctgtgacattccttcgtgttgtcatttgttgagtgaccaatcagatgggtggagtgtgttacagaaattggcagcaagtatccaatgggtgaagaagaagctaactggggacgtgggcagccctgacgtgatgagctcaaccagcagagacattccatcccaagagaggtctgcgtgacgcgtccgggaggccaccctcagcaagaccaccgtacagttggtggaaggggtgacagctgcattctcctgtgcctaccacgtaaccaaaaatgaaggagaactactgtttacaagccgccctggtgtgcctgggcatgctgtgccacagccatgcctttgccccagagcggcgggggcacctgcggccctccttccatgggcaccatgagaagggcaaggaggggcaggtgctacagcgctccaagcgtggctgggtctggaaccagttcttcgtgatagaggagta

SEQ ID NO: 3592 - DNA, 613 bp, Homo sapiens
  source 1..613: mol_type = unassigned DNA; mol_type = unassigned DNA
tttatggtggcagcacaatgggcctttcagggctcagggaaagagctgtgagatcctgctccccggcttttcaaggcctctagtctttttatcaggcctggacaatgccggattcagcggctgcctgagcctcctgaccgtccattggccgtcagaaatcactgtgttttcagctcagcggccctgtgacattccttcgtgttgtcatttgttgagtgaccaatcagatgggtggagtgtgttacagaaattggcagcaagtatccaatgggtgaagaagaagctaactggggacgtgggcagccctgacgtgatgagctcaaccagcagagacattccatcccaagagaggtctgcgtgacgcgtccgggaggccaccctcagcaagaccaccgtacagttggtggaaggggtgacagctgcattctcctgtgcctaccacgtaaccaaaaatgaaggagaactactgtttacaagccgccctggtgtgcctgggcatgctgtgccacagccatgcctttgccccagagcggcgggggcacctgcggccctccttccatgggcaccatgagaagggcaaggaggggcaggtgctacagcgctccaagcgtgg

SEQ ID NO: 3593 - DNA, 569 bp, Homo sapiens
  source 1..569: mol_type = unassigned DNA; mol_type = unassigned DNA
aaagctgggctgagccctctcacggtcctgtggcccttggtctccccacatgaggtgtcccgagattgaagagagaaggtgcctcctggcattgccaaggctggaatctgcctgtcaaggaagtccctcggcggctagctgctgcaccatgaccttcgtgatggtggaaaatcactgtgttttcagctcagcggccctgtgacattccttcgtgttgtcatttgttgagtgaccaatcagatgggtggagtgtgttacagaaattggcagcaagtatccaatgggtgaagaagaagctaactggggacgtgggcagccctgacgtgatgagctcaaccagcagagacattccatcccaagagaggtctgcgtgacgcgtccgggaggccaccctcagcaagaccaccgtacagttggtggaaggggtgacagctgcattctcctgtgcctaccacgtaaccaaaaatgaaggagaactactgtttacaagccgccctggtgtgcctgggcatgctgtgccacagccatgcctttgccccagagcggcgggggcacctgcggccctcctt

SEQ ID NO: 3594 - DNA, 582 bp, Homo sapiens
  source 1..582: mol_type = unassigned DNA; mol_type = unassigned DNA
attcctgccactagcgcgctcggcggctcattccgcggccgccgccagctgaggggagcgtcgcgggccgaggagcagatgccgcgggggccgctcgcagccgccgctgacttgtgaatgggaccgggactggggccgggactgacaccgcagcgcttgccctgcgccagggactggcggctcggaggttgcgtccaccctcaagggccccaggtgagaaatcactgtgttttcagctcagcggccctgtgacattccttcgtgttgtcatttgttgagtgaccaatcagatgggtggagtgtgttacagaaattggcagcaagtatccaatgggtgaagaagaagctaactggggacgtgggcagccctgacgtgatgagctcaaccagcagagacattccatcccaagagaggtctgcgtgacgcgtccgggaggccaccctcagcaagaccaccgtacagttggtggaaggggtgacagctgcattctcctgtgcctaccacgtaaccaaaaatgaaggagaactactgtttacaagccgccctggtgtgcctgggcatgctgtgccacagccatgcct

SEQ ID NO: 3595 - DNA, 514 bp, Homo sapiens
  source 1..514: mol_type = unassigned DNA; mol_type = unassigned DNA
aaaactcgagtacctctgagggaaagccggaccccttgtccatcctctcctgttggaggaatgaggagttcaaaggccacgtccacacagagggtgacagaggcatcctctccgcgcaggacgcggactgggggcaggcacgcagcgccacccggatcctggagtcgtcaagaaaaacgcgggcgcgcaggccgaagaggaaatcactgtgttttcagctcagcggccctgtgacattccttcgtgttgtcatttgttgagtgaccaatcagatgggtggagtgtgttacagaaattggcagcaagtatccaatgggtgaagaagaagctaactggggacgtgggcagccctgacgtgatgagctcaaccagcagagacattccatcccaagagaggtctgcgtgacgcgtccgggaggccaccctcagcaagaccaccgtacagttggtggaaggggtgacagctgcattctcctgtgcctaccacgtaaccaaaaatgaaggagaactactg

SEQ ID NO: 3596 - DNA, 542 bp, Homo sapiens
  source 1..542: mol_type = unassigned DNA; mol_type = unassigned DNA
agctgaggggagcgtcgcgggccgaggagcagatgccgcgggggccgctcgcagccgccgctgacttgtgaatgggaccgggactggggccgggactgacaccgcagcgcttgccctgcgccagggactggcggctcggaggttgcgtccaccctcaagggccccagaaatcactgtgttttcagctcagcggccctgtgacattccttcgtgttgtcatttgttgagtgaccaatcagatgggtggagtgtgttacagaaattggcagcaagtatccaatgggtgaagaaggttgctgaggtcagatggctatggtatcccaagtaacttatttgttctcaattcgcatcttggagaaagcacctcatcaccctcttgggggcatctccatgttcaaggcatgggtacccttagagttccacatggctggggaagcctcacaattatagttgaaggcgaggaggagcaagtcatatcttacgtggatggcagcaggaaaagagagagagcttgtgcagggaaactcccctttataaacctg

SEQ ID NO: 3597 - DNA, 468 bp, Homo sapiens
  source 1..468: mol_type = unassigned DNA; mol_type = unassigned DNA
accatttaccaaaggatgcctctagagcaggaagctttgagaagacctggggagcctggaacttctaagtctaaacaaggaactgactcagcagggtctggctatcttcagagtctgaggagaggcgcatcaaaggaatgacagcctggtacctttgatgaaggaactgacaggaaattaacagcctcgtgcaggcaaggacaaagacaagaaaaggcccatttgggcctcatatctctctggattggaacccgcaggaagcagaaggggctgtttaatcctggctccagagcaaccgtgaaggctggcttcctcccttgaagaagaacaaggtgaaggaaagaaatcactgtgttttcagctcagcggccctgtgacattccttcgtgttgtcatttgttgagtgaccaatcagatgggtggagtgtgttacagaaattggcagcaagtatccaatgggtgaagaag

SEQ ID NO: 3598 - DNA, 545 bp, Homo sapiens
  source 1..545: mol_type = unassigned DNA; mol_type = unassigned DNA
ctattaccatcaccatgcctcattagagtggggactttcggcggtggcttgggaagtacccaaagttttaggggttacagcagaggccaaaaaggcagacagaggaagcagggtagagctctgaaaaggttcagggccagggacccacagggggaggcaggagtggcaggcaccacgatctgctctctggcgctctacaggaaagcaccgggagtcaatgtcctcgcgcgtcccttgcgcagagtgtggtgcgaggttggggggttactggagacccagggggctatcaccttggacacctatggtggggggaaggctgaggagtaagataaccgggcagctggaaacttacagctcttcccccgcagtggaggaatgaggagttcaaaggccacgtccacacagagggtgacagaggcatcctctccgcgcaggacgcggactgggggcaggcacgcagcgccacccggatcctggagtcgtcaagaaaaacgcgggcgcgcaggccgaagaggaaatcactgtgttttcagctcagcggccct

SEQ ID NO: 3599 - DNA, 425 bp, Homo sapiens
  source 1..425: mol_type = unassigned DNA; mol_type = unassigned DNA
gatgccgcgggggccgctcgcagccgccgctgacttgtgaatgggaccgggactggggccgggactgacaccgcagcgcttgccctgcgccagggactggcggctcggaggttgcgtccaccctcaagggccccagttctgcaagctggaaagtctcgggatcaaggtgccacatgtctggtgtctagcaagggcctgttcctcatagatgatgccttctgagtgtcctcagttgacagaagagatggaaggggtgaaaacaggtgtatttcctcctttaagtcccttgataagggcattaatcctattcttttatagtcctctgtttgtagtcagtatcatcgtgtctccttctgggaggagatcatgaaaccatgttaaagaagcacagagaggggtacaaaggagaggctgagactaagaca

SEQ ID NO: 3600 - DNA, 539 bp, Homo sapiens
  source 1..539: mol_type = unassigned DNA; mol_type = unassigned DNA
cggccgccgccagctgaggggagcgtcgcgggccgaggagcagatgccgcgggggccgctcgcagccgccgctgacttgtgaatgggaccgggactggggccgggactgacaccgcagcgcttgccctgcgccagggactggcggctcggaggttgcgtccaccctcaagggccccagaattacatggctgctttgtaaagattctggtttggggaccctcatatgggaaacgccatgacattgacctcgtggtctgatttacaatgccagtactgcgctcccaggagcatagcatgtcctggaaccttgcctgtgaatgcctgtgacttatgaagtggtaacttatgaagttggtaaactttgatctcttatattcaaatctgttttcagaaccatctaaacaagatcttcaaatctgattttagtcttccttcattctcaatacatgtatgtaggtagatgttggagaaacataacaatttcattggaatttactttcaatattgatgttttcactttgatgacaggcatacttact

SEQ ID NO: 3601 - DNA, 2199 bp, Homo sapiens
  source 1..2199: mol_type = unassigned DNA; mol_type = unassigned DNA
tttgggaagttggctggctggcgaggcagagcctctcctcaaagcctggctcccacggaaaatatgctcagtgcagccgcgtgcatgaatgaaaacgccgccgggcgcttctagtcggacaaaatgcagccgagaactccgctcgttctgtgcgttctcctgtcccaggtgctgctgctaacatctgcagaagatttggactgcactcctggatttcagcagaaagtgttccatatcaatcagccagctgaattcattgaggaccagtcaattctaaactgatatatttaaatttgcaagaacttctcctgtcccaagacaaaagaggtccattgtggtatctcccattttaattccagagaatcagagacagcctttcccaagagatgttggcaaggtagtcgatagtgacaggccagaaaggtccaagttccggctcactggaaagggagtggatcaagagcctaaaggaattttcagaatcaatgagaacacagggagcgtctccgtgacacggaccttggacagagaagtaatcgctgtttatcaactatttgtggagaccactgatgtcaatggcaaaactctcgaggggccggtgcctctggaagtcattgtgattgatcagaatgacaaccgaccgatctttcgggaaggcccctacatcggccacgtcatggaagggtcacccacaggcaccacagtgatgcggatgacagcctttgatgcagatgacccagccaccgataatgccctcctgcggtataatatccgtcagcagacgcctgacaagccatctcccaacatgttctacatcgatcctgagaaaggagacattgtcactgttgtgtcacctgcgctgctggaccgagagactctggaaaatcccaagtatgaactgatcatcgaggctcaagatatggctggactggatgttggattaacaggcacggccacagccacgatcatgatcgatgacaaaaatgatcactcaccaaaattcaccaagaaagagtttcaagccacagtcgaggaaggagctgtgggagttattgtcaatttgacagttgaagataaggatgaccccaccacaggtgcatggagggctgcctacaccatcatcaacggaaaccccgggcagagctttgaaatccacaccaaccctcaaaccaacgaagggatgctttctgttgtcaaaccattggactatgaaatttctgccttccacaccctgctgatcaaagtggaaaatgaagacccactcgtacccgacgtctcctacggccccagctccacagccaccgtccacatcactgtcctggatgtcaacgagggcccagtcttctacccagaccccatgatggtgaccaggcaggaggacctctctgtgggcagcgtgctgctgacagtgaatgccacggaccccgactccctgcagcatcaaaccatcaggtattctgtttacaaggacccagcaggttggctgaatattaaccccatcaatgggactgttgacaccacagctgtgctggaccgtgagtccccatttgtcgacaacagcgtgtacactgctctcttcctggcaattgacagtggcaaccctcccgctacgggcactgggactttgctgataaccctggaggacgtgaatgacaatgccccgttcatttaccccacagtagctgaagtctgtgatgatgccaaaaacctcagtgtagtcattttgggagcatcagataaggatcttcacccgaatacagatcctttcaaatttgaaatccacaaacaagctgttcctgataaagtctggaagatctccaagatcaacaatacacacgccctggtaagccttcttcaaaatctgaacaaagcaaactacaacctgcccatcatggtgacagattcagggaaaccacccatgacgaatatcacagatctcagggtacaagtgtgctcctgcaggaattccaaagtggactgcaacgcggcaggggccctgcgcttcagcctgccctcagtcctgctcctcagcctcttcagcttagcttgtctgtgagaactcctgacgtctgaagcttgactcccaagtttccatagcaacaggaaaaaaaaaaatctatccaaatctgaagattgcggtttacagctatcgaacttcacaactaggcctcaattgttccggttttttattttctttac

SEQ ID NO: 3602 - DNA, 583 bp, Homo sapiens
  source 1..583: mol_type = unassigned DNA; mol_type = unassigned DNA
ttgggaagttggctggctggcgaggcagagcctctcctcaaagcctggctcccacggaaaatatgctcagtgcagccgcgtgcatgaatgaaaacgccgccgggcgcttctagtcggacaaaatgcagccgagaactccgctcgttctgtgcgttctcctgtcccaggtgctgctgctaacatctgcagaagatttggactgcactcctggatttcagcagaaagtgttccatatcaatcagccagctgaattcattgaggaccagtcaattctaaacttgaccttcagtgactgtaagggaaacgacaagctacgctatgaggtctcgagcccatacttcaaggtgaacagcgatggcggcttagttgctctgagaaacataactgcagtgggcaaaactctgttcgtccatgcacggaccccccatgcggaagatatggcagaactcgtgattgtcggggggaaagacatccagggctccttgcaggtaacacatctgtttgagataacttgggttcaaggaggacattaggttctgtctgtcttatgtggaaaatgggtctttaatttattatgttggct

SEQ ID NO: 3603 - DNA, 535 bp, Homo sapiens
  source 1..535: mol_type = unassigned DNA; mol_type = unassigned DNA
agtgcagccgcgtgcatgaatgaaaacgccgccgggcgcttctagtcggacaaaatgcagccgagaactccgctcgttctgtgcgttctcctgtcccagtagagacgggttttcaccgtgttagccaggatggtctcgatctcctgacctcgtgatccgccagcctcagcctcccaaagtgctgggattataggcgtgagccacagcgcccggcctatcgtgccctttcaacagatgaagaaactgggccaaacaacccacctgcactgcatggttcccccagcaagaacatcccagtgagaatggcccacagatgcctgggcgtgacccacctgcagcttcaaccatgcaggctgaagtgcagtggcgtgatctcggctcactgcaacctccatctccagagttcaagcgattctcgtgcctcagcctcccaagtagccaggattgcagggccaagatgtctaaagttgaccttcagtctagtccaacatctggaaatgagtactaaagccaccagcacagacaaaaatggaga

SEQ ID NO: 3604 - DNA, 1456 bp, Homo sapiens
  source 1..1456: mol_type = unassigned DNA; mol_type = unassigned DNA
agtgcagccgcgtgcatgaatgaaaacgccgccgggcgcttctagtcggacaaaatgcagccgagaactccgctcgttctgtgcgttctcctgtcccaggtgctgctgctaacatctgcagaagatttggactgcactcctggatttcagcagaaagtgttccatatcaatcagccagctgaattcattgaggaccagtcaattctaaactgtaagcaatgtcactcaaagatgcttttagactcttctcatatttgaatttactaatgtttatgactgtgtctcaggatgtggtatttcctaaactaagtgttttctgattatttttcttatgtcactgcttgacccaaagtggaaattcttgaatgagggcctggccaacttagaggttaatagagtgatatgcatctctttttagtattttatcatcagtgggtatctccatactgctgtcagaaaagggggctgtcagcctccaatgagagttgtacactgtgcaaaggaaatgaaattcatttcccctgggcagatccccaaaatcaaaatcattgccttctcgcagattgctgttctacctgtagtttctcatacatagcattagatcaaaataatggtgagagtatgacattggcttctgggaatttttagacacagacatcaaaaactcttattcttaaggctaataagatgggttttagaaagattcaaaacctctactgattattctatggattaagctcaactcatcctgaattccaattgatttatttaaaatatgcatctttcatatctgtggtgatgatctctttttgtttttaatgtcaatattatattgctttatctttaagaagtgttagggtacattgctaaatgcataacaagtacagttttagtgcaatagaatttaaaattggtggtagacaaatagctatttcattgtaggctcttgagtaccttgcttaacaactggaaatgaagaatatggaaacaactgatctaaactgatcagatgcagtcgggtgtgatggctcatgcctgtaatctcaccactttgggaggccgaggaggatggatggcttgaggccagaagttcaagaccagtctgggcaacctggtgaaaccccatctctactaaagttacaaaacttagctgggcatggtggcatatgcctatagtcccagctacgcgggaggctgcggcagaagaatcgctttaacccaggaggtggaggctgcagtgagccgagatcataccattgcactccaacctgggtgacagagcgagactgtgtctcaaaaaagaaaaaaaaaaaagaagaagaagaaaattaaaataagctgatcatacgctccaaggtcttttcaaggaaggtgattccacattggctcttatggtctcaggtttacgttccacgctagctaagttcctttagtcctatgctatgtggctgacaag

SEQ ID NO: 3605 - DNA, 877 bp, Homo sapiens
  source 1..877: mol_type = unassigned DNA; mol_type = unassigned DNA
agcagagctgccaaccagagcctctgatcaacacaggataaccagcaggagagttggtggaattccagacagtgtgaccttcagtgactgtaagggaaacgacaagctacgctatgaggtctcgagcccatacttcaaggtgaacagcgatggcggcttagttgctctgagaaacataactgcagtgggcaaaactctgttcgtccatgcacggaccccccatgcggaagatatggcagaactcgtgattgtcggggggaaagacatccagggctccttgcaggatatatttaaatttgcaagaacttctcctgtcccaagacaaaagaggtccattgtggtatctcccattttaattccagagaatcagagacagcctttcccaagagatgttggcaaggtagtcgatagtgacaggccagaaaggtccaagttccggctcactggaaagggagtggatcaagagcctaaaggaattttcagaatcaatgagaacacagggagcgtctccgtgacacggaccttggacagagaagtaatcgctgtttatcaactatttgtggagaccactgatgtcaatggcaaaactctcgaggggccggtgcctctggaagtcattgtgattgatcagaatgacaaccgaccgatctttcgggaaggcccctacatcggccacgtcatggaagggtcacccacaggcaccacagtgatgcggatgacagcctttgatgcagatgacccagccaccgataatgccctcctgcggtataatatccgtcagcagacgcctgacaagccatctcccaacatgttctacatcgatcctgagaaaggagacattgtcactgttgtgtcacctgcgctgctggaccgagag

SEQ ID NO: 3606 - DNA, 539 bp, Homo sapiens
  source 1..539: mol_type = unassigned DNA; mol_type = unassigned DNA
ccaaccctatgactctgggttctggagaggtgaaagagcatctccaggtggctcaaaactgtggctccaggtactactcctccaggcgggctgctccctggggcacgtgttctcagtccaccagtgggccatgccgcatcagcccacctgcttcctggcacatgggatgcacagcccatgaccttggacccagcagtaggcagcatgctttccagttttgaaggcaaggacggaggcatacaaggcactacttgagatcctgtctgatttagaattttgtaggacggattcctgttgttgaacacactgagtgatgagaaacttggcaaatcttgttggcaaatctctcaccttgattccctttggcatcctttgtgtctgtctgatccttccagcctggcctttggatagcaggtacccacttcttaggatgtgccagacaccacgtttcaagccacagtcgaggaaggagctgtgggagttattgtcaatttgacagttgaagataaggatgaccccaccacaggtgcatggagggc

SEQ ID NO: 3607 - DNA, 8042 bp, Homo sapiens
  source 1..8042: mol_type = unassigned DNA; mol_type = unassigned DNA
aagaagcaaatgggatgccacctccgcggggctcgctcctcgcgaggtgctcaccccgtatctgccatgcaaaacgagggagcgttaggaaggaatccgtcttgtaaagccattggtcctggtcatcagcctctacccaatgctttcgtgatgctgctgctgatctatttgggaagttggctggctggcgaggcagagcctctcctcaaagcctggctcccacggaaaatatgctcagtgcagccgcgtgcatgaatgaaaacgccgccgggcgcttctagtcggacaaaatgcagccgagaactccgctcgttctgtgcgttctcctgtcccaggtgctgctgctaacatctgcagaagatttggactgcactcctggatttcagcagaaagtgttccatatcaatcagccagctgaattcattgaggaccagtcaattctaaacttgaccttcagtgactgtaagggaaacgacaagctacgctatgaggtctcgagcccatacttcaaggtgaacagcgatggcggcttagttgctctgagaaacataactgcagtgggcaaaactctgttcgtccatgcacggaccccccatgcggaagatatggcagaactcgtgattgtcggggggaaagacatccagggctccttgcaggatatatttaaatttgcaagaacttctcctgtcccaagacaaaagaggtccattgtggtatctcccattttaattccagagaatcagagacagcctttcccaagagatgttggcaaggtagtcgatagtgacaggccagaaaggtccaagttccggctcactggaaagggagtggatcaagagcctaaaggaattttcagaatcaatgagaacacagggagcgtctccgtgacacggaccttggacagagaagtaatcgctgtttatcaactatttgtggagaccactgatgtcaatggcaaaactctcgaggggccggtgcctctggaagtcattgtgattgatcagaatgacaaccgaccgatctttcgggaaggcccctacatcggccacgtcatggaagggtcacccacaggcaccacagtgatgcggatgacagcctttgatgcagatgacccagccaccgataatgccctcctgcggtataatatccgtcagcagacgcctgacaagccatctcccaacatgttctacatcgatcctgagaaaggagacattgtcactgttgtgtcacctgcgctgctggaccgagagactctggaaaatcccaagtatgaactgatcatcgaggctcaagatatggctggactggatgttggattaacaggcacggccacagccacgatcatgatcgatgacaaaaatgatcactcaccaaaattcaccaagaaagagtttcaagccacagtcgaggaaggagctgtgggagttattgtcaatttgacagttgaagataaggatgaccccaccacaggtgcatggagggctgcctacaccatcatcaacggaaaccccgggcagagctttgaaatccacaccaaccctcaaaccaacgaagggatgctttctgttgtcaaaccattggactatgaaatttctgccttccacaccctgctgatcaaagtggaaaatgaagacccactcgtacccgacgtctcctacggccccagctccacagccaccgtccacatcactgtcctggatgtcaacgagggcccagtcttctacccagaccccatgatggtgaccaggcaggaggacctctctgtgggcagcgtgctgctgacagtgaatgccacggaccccgactccctgcagcatcaaaccatcaggtattctgtttacaaggacccagcaggttggctgaatattaaccccatcaatgggactgttgacaccacagctgtgctggaccgtgagtccccatttgtcgacaacagcgtgtacactgctctcttcctggcaattgacagtggcaaccctcccgctacgggcactgggactttgctgataaccctggaggacgtgaatgacaatgccccgttcatttaccccacagtagctgaagtctgtgatgatgccaaaaacctcagtgtagtcattttgggagcatcagataaggatcttcacccgaatacagatcctttcaaatttgaaatccacaaacaagctgttcctgataaagtctggaagatctccaagatcaacaatacacacgccctggtaagccttcttcaaaatctgaacaaagcaaactacaacctgcccatcatggtgacagattcagggaaaccacccatgacgaatatcacagatctcagggtacaagtgtgctcctgcaggaattccaaagtggactgcaacgcggcaggggccctgcgcttcagcctgccctcagtcctgctcctcagcctcttcagcttagcttgtctgtgagaactcctgacgtctgaagcttgactcccaagtttccatagcaacaggaaaaaaaaaaatctatccaaatctgaagattgcggtttacagctatcgaacttcacaactaggcctcaattgttccggttttttattttctttacaatttcacttagtctgtacttcatcattttgacagcatcttcctccctcctttaattaatggaatcttctgaattttccctgaatgtttaaagatcatgacatatgacttgatcttctgggagcaggaacaatgactactttttctggtgtgttaacatgtcgctagccagtgctccaggcacccagctttgtctgtgggttagtattggtgtatgtatgagtatctgtatgtatatatacacggtatttatagagagagactatcctggagaagcctcgttttgatgccattcttccttgcaaggttaagcaaggtgggtggaaactaagacacctgaaccctccagggcctcccgcatcaaggtcagcatgaggacagaccacagagctgtcacttttgctccgaagctacttctccactgtcccgttcagtctgaatgctgccacaaccagccaggcaggtccacagagagggagagcagagaaagaagtcctttctctttattgagttcgaggactacaaccaatttacactgccatctgatgccgtgatcctgagccaaggaggtgaggagcagagcaggcaatttcaccaccaaatgccaagaaaagggctgacattttctttcatgggcaccaacctgcatttgtatgtgtcccgaatccacagtcgtactgattctaatggggacacagatcatggtagagaatctctccctcctcagtaaatgtacaactgcacctgtcatcatggaggtcatacatgcatacaaagaggtgtacaggtaccatcttgtatacacatatatacccacatgtacagacatacatttatgcacattcacgctgtttgtttcatatatacaggcataaaatagagtaaatacaggtagttttaaaagtacccttttgtgtgaattgactaccgttgtttgcaaacccgaaaataaaagacgttcattatgtatgaaaagtaactgatttgtattctgtgagcatgtaaaagcggaaagttagtgcttgttctaagattaccttcttgttgataaaccataaatgaatcatcaaagctcacaccaaatttttctatcaaataaaactagtgacagcttgtggctttttattagagctcgccacgaactagggtaaggtgagtgtcttagcatattttaatgcagttgcttactaaaggttttaaccgcacatgcacacacacacgctttcttatgcaatctatgtttgcacttgtgctttcagttagccttctgtaggaagtagaagtcatatgttgtctttgttgtagtgaaattatacagatagagttccatatattgtatttgtttcaatggtaaatccttttggaacatatagaatgcagagatttttttttccattaaaataaatgggtattggtggttaaaactgctggacagtaactgttctctgatttctatcttgtgtccaatgtcactgatgttgggtcttgtcttagtgcaagttcacatttttgacagaccatttggggtccgtcgtacatctctggttggtgagtgagtctatgaagacagaagtaccagttctcagcatgggccatggactcatcttgtccacctcatgatatgatctgagggtgtcataatcagctataaaggtaattgcatactcaaagatgagacggaccattctcagttgatgaccacattaagcatagtcatggccatctgtcaacagtcccaagacctggggatttttctctggaacaaatcctgttgctggatcaggagatgccacaccttgaacttgatagggtcattctccacgagcacatgcccccgactcagggacaggggaatctaagcctgtgcattcacactccacaagatttcctctactggctttacagggcactgtcacgcgtctcccgggcgcaccttgctcccctcttcctgcaaggcagggggagaacgttcatccttgaacaaacaaagagcatcctcagccagtcaggcggctggtagccggacacatatgctaactggcaatcaggaagtcaccctccaatgtaaacttcagccacatgcagggagaaacacagcagctgagtggccattcactcaaggaaacaaatacagcatgactccttttctctcaagctggtaggctctcctgcactttgtgaaccgaaccagaagattaacttcgctgaaaattcagaaaaataggagtaaagtgcacacttcattaataaatagaatatgcctcaactttcccttatttaaacatattctctgtccccacagttctaatcaggacagagatacttctgtcatgttgttcctcctaatagtttccagaaaaaaaggaaaataaaccaattcttataggccaaagtggtagcatttcctgaatcataagatgttttgttcatttgctggaatatattacattgtttactgaaaaccatagtagaatcaaaatgttatttcattattacctatgcattttatctgagtccaacttattaaaaaacgaagtcaagtaaggaccagaaattgcttttcccaattactgagcacaggtctgagggttttatttccactgagcaaatagtcacaccttcacttctttttattaatactcaaccaacttagttgattaaaaatcacattttctccctcattttacatacgataaattaattattttggataatttgttttaataagaatatgcacacattttctaatttcaataaaagtcaccttcaataccgccagttctctccaaatgagcatcattccaggcagatatacctgctgtgcctcttggccgacaccagcaaatctaagcattataacgaaataaatccagccagatttcatggtaggtatcaaataagactttggctcttaaagaacatcgttagaaattttgatagctcattccagagtttcagaatgtcatttaaaacagtctgataaatggaacaaccatctaccatcacactcatagagtagctcaaattgcattttacccaaataaatacactgggtcttaatcttaagatgtgacaactaaaaaatttttaacaagtctgtgtttgatcctggatttagtgcagttgcacccaggcacgagctctccagatgattctgaggaaaggagtctacaattttcctagggggtgtatgaacatggtaccaaaaaggtgattaataattataataatggtttatatttatcaactgcttattatgtgcccacactgtacaaaatccttacagatagtaactcattaatccctccagtaacatatgagacaagcactactatcttctccaactcacagataaagaaggctgaggctcagaaaaattgaatggcttgcccaaggtaagtggcctccagaaccaaacctcaggctatctggctccagggttcatgttcttccgacaacatcacaatgccactctcaacccaggagcaaaaccagacaaagtgcctactgcagaccggaagaccctcgtttgaagcctccattagcgtgactatgcagctagaccaacttactgttaagcaacagtaccttttactatgaggtaccctttactattaagtaccttttactaacagtatcttctgttacctattattaagttcatgctatacttcttcaatctgaaagctttctgttaaaaaaaaaaatgttaacatcgttctaaattaatattgagaccttagaaatttttcctgtgcaagataacgtaattatttgccccttcccttccatggcttgttagcaggtagatgaggggcttctcctagattaatttaacatctcagttaatcaaaagtagccgggcatggtgactcatgcctgtaatcccagccctttgggaggcagaggcgggtggatcacttaaggtcaggagttcaagaccagcctggccagcatggtgaaaccctatctctactaaaaaatacaaaaattagctgggtgtggtggtgcacacctgaaaccccagctactcaggaggctgaggcaggagaatcgcttgaacccaggaggcagagtttgcagtgagccattgcactccagcctgggcaacagagcaagactccgtcaaaaaaaaaaaaaaaaaaaaagaaagaaaaggaaatttatgaactccagagtacccattcactaccaaaccaactgaggggagagaaaactgagggagaaagtggggtggggtctcaaagggtttgcactgtgctttgctataaatcattcaaaggggcaaattctaaaggatctctaagtagttgctgattttgtaaaggtagcccataaatctgtttacgtgtagctgccttaaacatgagtcaacagggtaagtcacaccaacaggaaacccaagcactaaaaaagccacctaccttttctgtttaccaaatactaagaataataatctaataatctggctacatctttcataaagacctccatcttctctccttaactgactgttgagatttgataattttcacagtctaatgataaaatgctttcaaaatggttcatctaacacaattaacaattcttttactatatgcaatgtgttacccttactatatttcctattgctaatagattagcccactattgaaaaaattctgcagttgtgaccgtgttcacatgaaagcatatacaagacatggagagacagcaaaaaatggtgggaatgggtgtgtgtatgagggtttcagataagaacttcaattatataatttaagaagagtcagtctataatttaagcagaaataattgagatactcatcaaattaagtaagcggaaaaatttcctctctctcatactatgttgctatcatcacatctatcgttggagggttgctgagcttgatacgcctttgaaccattttatttgactttccacgtgccgtctcattggtagggagatggtgaaaagcgttgggtggtgtaggacgagggaggttttcactctgaagctatgaagatttggagaaaggggcttatagaagcactatgaaaataaactggagactatttttttgctactttttaaaaagctttttctttagagagtactaaagccattctatatctgtcgtacacatgaattcagactattattagagagttatatctgtgttgtcatgcacatgtcaacactgtcctgatgacaaaattttatgtatccccccagataaaaattttaagaaattttaaatgctttttattcacacacacttttcaaaagggataaaagttaatcatgttaaaatattcagtctatggcagatgtcgctcctttgggccctcactgctgaattgcttacagtttctgagctgtaaactaacatttgctttactatgtagttacagagaaatgtgcaacttgtttgtgaaacattcaaataaagcttatctgggatttttaa

SEQ ID NO: 3608 - DNA, 2722 bp, Homo sapiens
  source 1..2722: mol_type = unassigned DNA; mol_type = unassigned DNA
atctatttgggaagttggctggctggcgaggcagagcctctcctcaaagcctggctcccacggaaaatatgctcagtgcagccgcgtgcatgaatgaaaacgccgccgggcgcttctagtcggacaaaatgcagccgagaactccgctcgttctgtgcgttctcctgtcccagggccaaacaacccacctgcactgcatggttcccccagcaagaacatcccagtgagaatggcccacagatgcctgggcgtgacccacctgcagcttcaaccatgcaggtgctgctgctaacatctgcagaagatttggactgcactcctggatttcagcagaaagtgttccatatcaatcagccagctgaattcattgaggaccagtcaattctaaacttgaccttcagtgactgtaagggaaacgacaagctacgctatgaggtctcgagcccatacttcaaggtgaacagcgatggcggcttagttgctctgagaaacataactgcagtgggcaaaactctgttcgtccatgcacggaccccccatgcggaagatatggcagaactcgtgattgtcggggggaaagacatccagggctccttgcaggatatatttaaatttgcaagaacttctcctgtcccaagacaaaagaggtccattgtggtatctcccattttaattccagagaatcagagacagcctttcccaagagatgttggcaaggtagtcgatagtgacaggccagaaaggtccaagttccggctcactggaaagggagtggatcaagagcctaaaggaattttcagaatcaatgagaacacagggagcgtctccgtgacacggaccttggacagagaagtaatcgctgtttatcaactatttgtggagaccactgatgtcaatggcaaaactctcgaggggccggtgcctctggaagtcattgtgattgatcagaatgacaaccgaccgatctttcgggaaggcccctacatcggccacgtcatggaagggtcacccacaggcaccacagtgatgcggatgacagcctttgatgcagatgacccagccaccgataatgccctcctgcggtataatatccgtcagcagacgcctgacaagccatctcccaacatgttctacatcgatcctgagaaaggagacattgtcactgttgtgtcacctgcgctgctggaccgagagactctggaaaatcccaagtatgaactgatcatcgaggctcaagatatggctggactggatgttggattaacaggcacggccacagccacgatcatgatcgatgacaaaaatgatcactcaccaaaattcaccaagaaagagtttcaagccacagtcgaggaaggagctgtgggagttattgtcaatttgacagttgaagataaggatgaccccaccacaggtgcatggagggctgcctacaccatcatcaacggaaaccccgggcagagctttgaaatccacaccaaccctcaaaccaacgaagggatgctttctgttgtcaaaccattggactatgaaatttctgccttccacaccctgctgatcaaagtggaaaatgaagacccactcgtacccgacgtctcctacggccccagctccacagccaccgtccacatcactgtcctggatgtcaacgagggcccagtcttctacccagaccccatgatggtgaccaggcaggaggacctctctgtgggcagcgtgctgctgacagtgaatgccacggaccccgactccctgcagcatcaaaccatcaggtattctgtttacaaggacccagcaggttggctgaatattaaccccatcaatgggactgttgacaccacagctgtgctggaccgtgagtccccatttgtcgacaacagcgtgtacactgctctcttcctggcaattgacagtggcaaccctcccgctacgggcactgggactttgctgataaccctggaggacgtgaatgacaatgccccgttcatttaccccacagtagctgaagtctgtgatgatgccaaaaacctcagtgtagtcattttgggagcatcagataaggatcttcacccgaatacagatcctttcaaatttgaaatccacaaacaagctgttcctgataaagtctggaagatctccaagatcaacaatacacacgccctggtaagccttcttcaaaatctgaacaaagcaaactacaacctgcccatcatggtgacagattcagggaaaccacccatgacgaatatcacagatctcagggtacaagtgtgctcctgcaggaattccaaagtggactgcaacgcggcaggggccctgcgcttcagcctgccctcagtcctgctcctcagcctcttcagcttagcttgtctgtgagaactcctgacgtctgaagcttgactcccaagtttccatagcaacaggaaaaaaaaaaatctatccaaatctgaagattgcggtttacagctatcgaacttcacaactaggcctcaattgttccggttttttattttctttacaatttcacttagtctgtacttcatcattttgacagcatcttcctccctcctttaattaatggaatcttctgaattttccctgaatgtttaaagatcatgacatatgacttgatcttctgggagcaggaacaatgactactttttctggtgtgttaacatgtcgctagccagtgctccaggcacccagctttgtctgtgggtta

SEQ ID NO: 3609 - DNA, 583 bp, Homo sapiens
  source 1..583: mol_type = unassigned DNA; mol_type = unassigned DNA
tctatttgggaagttggctggctggcgaggcagagcctctcctcaaagcctggctcccacggaaaatatgctcagtgcagccgcgtgcatgaatgaaaacgccgccgggcgcttctagtcggacaaaatgcagccgagaactccgctcgttctgtgcgttctcctgtcccaggtgctgctgctaacatctgcagaagatttggactgcactcctggatttcagcagaaagtgttccatatcaatcagccagctgaattcattgaggaccagtcaattctaaactatgtattctactagctgacagacttttaaagtagaggccacttttaaaagcctgggctcccatgagaaggaaatctgcagtagacaaagcaagatgcttagttaacagcagcaacccagtgcctgtaattttcaagtccttggaggcacaccatgtcacccaagtgaccttcagtgactgtaagggaaacgacaagctacgctatgaggtctcgagcccatacttcaaggtgaacagcgatggcggcttagttgctctgagaaacataactgcagtgggcaaaactctgttcgtccatg

SEQ ID NO: 3610 - DNA, 545 bp, Homo sapiens
  source 1..545: mol_type = unassigned DNA; mol_type = unassigned DNA
tatttgggaagttggctggctggcgaggcagagcctctcctcaaagcctggctcccacggaaaatatgctcagtgcagccgcgtgcatgaatgaaaacgccgccgggcgcttctagtcggacaaaatgcagccgagaactccgctcgttctgtgcgttctcctgtcccagacaccagtgaggcctaccatatacctatgtcaaaacctgcaatttatcaaaaataaagcccgagatagtaacagtcttgctgaccacaaaggcaaaaggatccaggtaaacagattgcttccaggactattatttcatgatgagctttcaggtatatagcacatgagagggaggacaaggtgcggctgcacttcaagagaccacgttggacaggtgctgctgctaacatctgcagaagatttggactgcactcctggatttcagcagaaagtgttccatatcaatcagccagctgaattcattgaggaccagtcaattctaaacttgaccttcagtgactgtaagggaaacgacaagctacgctatgaggtctcg

SEQ ID NO: 3611 - DNA, 589 bp, Homo sapiens
  source 1..589: mol_type = unassigned DNA; mol_type = unassigned DNA
atttgggaagttggctggctggcgaggcagagcctctcctcaaagcctggctcccacggaaaatatgctcagtgcagccgcgtgcatgaatgaaaacgccgccgggcgcttctagtcggacaaaatgcagccgagaactccgctcgttctgtgcgttctcctgtcccagtcaggtggtcctgtgtgcaagtcccagttccaggcccttccactggctgtccaatggcttggagtctgaggctcagttttcccacttgcagaaggaaggaatgatgccaacttcgtgctgctgctaacatctgcagaagatttggactgcactcctggatttcagcagaaagtgttccatatcaatcagccagctgaattcattgaggaccagtcaattctaaactatggtaggaaatctatgccttttggattttcatccccaagaaccaccttcaaaagaaagaaatggaaaagcataaaatcaagtgaccttcagtgactgtaagggaaacgacaagctacgctatgaggtctcgagcccatacttcaaggtgaacagcgatggcggcttagttgctctgagaaacataactgcagt

SEQ ID NO: 3612 - DNA, 810 bp, Homo sapiens
  source 1..810: mol_type = unassigned DNA; mol_type = unassigned DNA
tttgggaagttggctggctggcgaggcagagcctctcctcaaagcctggctcccacggaaaatatgctcagtgcagccgcgtgcatgaatgaaaacgccgccgggcgcttctagtcggacaaaatgcagccgagaactccgctcgttctgtgcgttctcctgtcccaggtgctgctgctaacatctgcagaagatttggactgcactcctggatttcagcagaaagtgttccatatcaatcagccagctgaattcattgaggaccagtcaattctaaacttgaccttcagtgactgtaagggaaacgacaagctacgctatgaggtctcgagcccatacttcaaggtgaacagcgatggcggcttagttgctctgagaaacataactgcagtgggcaaaactctgttcgtccatgcacggaccccccatgcggaagatatggcagaactcgtgattgtcggggggaaagacatccagggctccttgcaggatatatttaaatttgcaagaacttctcctgtcccaagacaaaagaggtccattgtggtatctcccattttaattccagagaatcagagacagcctttcccaagagatgttggcaagatgaagatttggcaagttctgtgcctagcacgatggctgacatgagataaaacccacaatcctattaacagcgaacttctcttgaatgaaggcattacagcagatttaaatccatgcattacaattttagcaatttaatgaacatcctatttggcgacattattgctttaaaggaataaatcacaaacattttacttcccacta

SEQ ID NO: 3613 - DNA, 831 bp, Homo sapiens
  source 1..831: mol_type = unassigned DNA; mol_type = unassigned DNA
tttgggaagttggctggctggcgaggcagagcctctcctcaaagcctggctcccacggaaaatatgctcagtgcagccgcgtgcatgaatgaaaacgccgccgggcgcttctagtcggacaaaatgcagccgagaactccgctcgttctgtgcgttctcctgtcccaggtgctgctgctaacatctgcagaagatttggactgcactcctggatttcagcagaaagtgttccatatcaatcagccagctgaattcattgaggaccagtcaattctaaacttgaccttcagtgactgtaagggaaacgacaagctacgctatgaggtctcgagcccatacttcaaggtgaacagcgatggcggcttagttgctctgagaaacataactgcagtgggcaaaactctgttcgtccatgcacggaccccccatgcggaagatatggcagaactcgtgattgtcggggggaaagacatccagggctccttgcaggatatatttaaatttgcaagaacttctcctgtcccaagacaaaagaggtccattgtggtatctcccattttaattccagagaatcagagacagcctttcccaagagatgttggcaagagaacccacaatcctattaacagcgaacttctcttgaatgaaggcattacagcagatttaaatccatgcattacaattttagcaatttaatgaacatcctatttggcgacattattgctttaaaggaataaatcacaaacattttacttcccactagcactcggtatttcaaatccattttctctacagaatgatgtgtttaaataaattgtcctgttgactgaa

SEQ ID NO: 3614 - DNA, 2195 bp, Homo sapiens
  source 1..2195: mol_type = unassigned DNA; mol_type = unassigned DNA
tttgggaagttggctggctggcgaggcagagcctctcctcaaagcctggctcccacggaaaatatgctcagtgcagccgcgtgcatgaatgaaaacgccgccgggcgcttctagtcggacaaaatgcagccgagaactccgctcgttctgtgcgttctcctgtcccaggtgctgctgctaacatctgcagaagatttggactgcactcctggatttcagcagaaagtgttccatatcaatcagccagctgaattcattgaggaccagtcaattctaaacttgaccttcagtgactgtaagggaaacgacaagctacgctatgaggtctcgagcccatacttcaaggtgaacagcgatggcggcttagttgctctgagaaacataactgcagtgggcaaaactctgttcgtccatgcacggaccccccatgcggaagatatggcagaactcgtgattgtcggggggaaagacatccagggctccttgcaggtagtcgatagtgacaggccagaaaggtccaagttccggctcactggaaagggagtggatcaagagcctaaaggaattttcagaatcaatgagaacacagggagcgtctccgtgacacggaccttggacagagaagtaatcgctgtttatcaactatttgtggagaccactgatgtcaatggcaaaactctcgaggggccggtgcctctggaagtcattgtgattgatcagaatgacaaccgaccgatctttcgggaaggcccctacatcggccacgtcatggaagggtcacccacaggcaccacagtgatgcggatgacagcctttgatgcagatgacccagccaccgataatgccctcctgcggtataatatccgtcagcagacgcctgacaagccatctcccaacatgttctacatcgatcctgagaaaggagacattgtcactgttgtgtcacctgcgctgctggaccgagagactctggaaaatcccaagtatgaactgatcatcgaggctcaagatatggctggactggatgttggattaacaggcacggccacagccacgatcatgatcgatgacaaaaatgatcactcaccaaaattcaccaagaaagagtttcaagccacagtcgaggaaggagctgtgggagttattgtcaatttgacagttgaagataaggatgaccccaccacaggtgcatggagggctgcctacaccatcatcaacggaaaccccgggcagagctttgaaatccacaccaaccctcaaaccaacgaagggatgctttctgttgtcaaaccattggactatgaaatttctgccttccacaccctgctgatcaaagtggaaaatgaagacccactcgtacccgacgtctcctacggccccagctccacagccaccgtccacatcactgtcctggatgtcaacgagggcccagtcttctacccagaccccatgatggtgaccaggcaggaggacctctctgtgggcagcgtgctgctgacagtgaatgccacggaccccgactccctgcagcatcaaaccatcaggtattctgtttacaaggacccagcaggttggctgaatattaaccccatcaatgggactgttgacaccacagctgtgctggaccgtgagtccccatttgtcgacaacagcgtgtacactgctctcttcctggcaattgacagtggcaaccctcccgctacgggcactgggactttgctgataaccctggaggacgtgaatgacaatgccccgttcatttaccccacagtagctgaagtctgtgatgatgccaaaaacctcagtgtagtcattttgggagcatcagataaggatcttcacccgaatacagatcctttcaaatttgaaatccacaaacaagctgttcctgataaagtctggaagatctccaagatcaacaatacacacgccctggtaagccttcttcaaaatctgaacaaagcaaactacaacctgcccatcatggtgacagattcagggaaaccacccatgacgaatatcacagatctcagggtacaagtgtgctcctgcaggaattccaaagtggactgcaacgcggcaggggccctgcgcttcagcctgccctcagtcctgctcctcagcctcttcagcttagcttgtctgtgagaactcctgacgtctgaagcttgactcccaagtttccatagcaacag

SEQ ID NO: 3615 - DNA, 1246 bp, Homo sapiens
  source 1..1246: mol_type = unassigned DNA; mol_type = unassigned DNA
actcagcctggacgcgcttcttcgggtcgcgggtgcactccggcccggctcccgcctcggccccgatggacgccgcgttcctcctcgtcctcgggctgttggcccagagcctctgcctgtctttgggggttcctggatggaggaggcccaccaccctgtacccctggcgccgggcgcctgccctgagccgcgtgcggagggcctgggtcatccccccgatcagcgtatccgagaaccacaagcgtctcccctaccccctggttcagagcgagatgccatctcaaaaggtaaaaaaaaagaaaagtaactttgtacttgatgtggggaaaggacgcttcctgcctttgcctctgcaggaagcaaaatttccttttatttgccccaaatcctcctttagactttgagaaccagtccttgtatcccttacatcaaaagttattagagagtatttctcacttggaaactgtaattgtgcccattctccgaaaggatgggaggcagtttaaaatgtcatgtgcacaggggaattaaacttcaggaggaggccaggcgcagtggctcacccctgtaatcccagcactttgggaggccgaggcgtatcacctgaggtcaggagtttgagaccagcctggctaacatgatgaaacctcatttctactaaaaatacaaaaaattcgctgggcgtggtgacgtgcacctgtaatcccagctacttgggaggctgaggcaggagaatcgcttgaacccaggaggcagaggttgcagtgagctgagatgtcgccattggactccagcctgggcaacaagagtgaaactctatctcaaaaaaaaaaacaaaaaacaaaaacataacttcaggaggaacaaagaccacagagagacagggagagagattaggaaccctctgagagccttactttagtcacacgtgaagctgtgagcttcctggctgccaaggcaagcagggaaagtggcacctgccctgtctgctaagggaaggtggctcccgttcagggacgtcctcagtcactgtgacagatgccccaccctgtgctgtttctcgcctgtttaagctggtgtttccagctggagacaaagtctgaacgtgctgtctctttcgcatggccctaacgggagccacagaaatttgggggccacagagccagcccttgctctatgtttgaacagctaagagcgtttgccctggacctgggaggatccaccctggaggaccccacggacctgg

SEQ ID NO: 3616 - DNA, 1587 bp, Homo sapiens
  source 1..1587: mol_type = unassigned DNA; mol_type = unassigned DNA
actcagcctggacgcgcttcttcgggtcgcgggtgcactccggcccggctcccgcctcggccccgatggacgccgcgttcctcctcgtcctcgggctgttggcccagagcctctgcctgtctttgggggttcctggatggaggaggcccaccaccctgtacccctggcgccgggcgcctgccctgagccgcgtgcggagggcctgggtcatccccccgatcagcgtatccgagaaccacaagcgtctcccctaccccctggttcagatcaagtcggacaagcagcagctgggcagcgtcatctacagcatccagggacccggcgtggatgaggagccccggggcgtcttctctatcgacaagttcacagggaaggtcttcctcaatgccatgctggaccgcgagaagactgatcgcttcaggctaagagcgtttgccctggacctgggaggatccaccctggaggaccccacggacctggagattgtagttgtggatcagaatgacaaccggccagccttcctgcaggaggcgttcactggccgcgtgctggagggtgcagtcccaggcacctatgtgaccagggcagaggccacagatgccgacgaccccgagacggacaacgcagcgctgcggttctccatcctgcagcagggcagccccgagctcttcagcatcgacgagctcacaggagagatccgcacagtgcaagtggggctggaccgcgaggtgaggtggcgccccggcagctccacacccgcacggccagggcagcccatctcctgcgggtccctctgcccccagcctgcccaccccagacgctcctgtccctgccgtcactgcagagcttgcagtggccctggctcctgaggagatggcatggggtgaacccactgatgcgcagacaggagccgcgctggcccgggtgggaggggtctggtgcaagtagggcgtgaggggcccggcacagggcagggctccccaagcagccccgcccctctcagcctcatggcaacggctccccgctggtaagtaactaactccttctgtcagggcccctgttgccccttgctgtcggacttcggtgctcccggaagaccccccttgagtcagctcctctaggaagccctcctggttacactgttacgtggtctttgtccatttctgttcctgccactaaccacggttccccagggcagggacccaagctcactggtgtgctaggtgcccagcacagagtaggtgctctgtaaatgcttacccagcgcacagtaggtgctctgtaaacacccagcgcacagtggtgctctgtaaacgcttatccagcacacagtaggtgctctgtaaacgcttacccagcgcagagtaggtgctctgtaaaggcttacccagcgcagagtaggtgctctgtaaatgcttacccagcgcacagtaggtgctctgtaaacacccagcgcacagtggtgctctgtaaacgcttacccagcgcacagtaggtgctctgtaaaggcttacccagcgcacagtaggtgctctgtaaacgcttacccagcacacagtaggtgctctgtaaacgcttacccagcgc

SEQ ID NO: 3617 - DNA, 2847 bp, Homo sapiens
  source 1..2847: mol_type = unassigned DNA; mol_type = unassigned DNA
actcagcctggacgcgcttcttcgggtcgcgggtgcactccggcccggctcccgcctcggccccgatggacgccgcgttcctcctcgtcctcgggctgttggcccagagcctctgcctgtctttgggggttcctggatggaggaggcccaccaccctgtacccctggcgccgggcgcctgccctgagccgcgtgcggagggcctgggtcatccccccgatcagcgtatccgagaaccacaagcgtctcccctaccccctggttcagatcaagtcggacaagcagcagctgggcagcgtcatctacagcatccagggacccggcgtggatgaggagccccggggcgtcttctctatcgacaagttcacagggaaggtcttcctcaatgccatgctggaccgcgagaagactgatcgcttcaggctaagagcgtttgccctggacctgggaggatccaccctggaggaccccacggacctggagattgtagttgtggatcagaatgacaaccggccagccttcctgcaggaggcgttcactggccgcgtgctggagggtgcagtcccaggcacctatgtgaccagggcagaggccacagatgccgacgaccccgagacggacaacgcagcgctgcggttctccatcctgcagcagggcagccccgagctcttcagcatcgacgagctcacaggagagatccgcacagtgcaagtggggctggaccgcgaggtggtcgcggtgtacaatctgaccctgcaggtggcggacatgtctggagacggcctcacagccactgcctcagccatcatcacccttgatgacatcaatgacaatgcccccgagttcaccagggatgagttcttcatggaggccatagaggccgtcagcggagtggatgtgggacgcctggaagtggaggacagggacctgccaggctccccaaactgggtggccaggttcaccatcctggaaggcgaccccgatgggcagttcaccatccgcacggaccccaagaccaacgagggtgttctgtccattgtgaaggccctggactatgagagctgtgaacactacgaactcaaagtgtcggtgcagaatgaggccccgctgcaggcggctgcccttagggctgagcggggccaggccaaggtccgcgtgcatgtgcaggacaccaacgagccccccgtgttccaggagaacccacttcggaccagcctagcagagggggcacccccaggcactctggtggccaccttctctgcccgggaccctgacacagagcagctgcagaggctcagctactccaaggactacgacccggaagactggctgcaagtggacgcagccactggccggatccagacccagcacgtgctcagcccggcgtcccccttcctcaagggcggctggtacagagccatcgtcctggcccaggatgacgcctcccagccccgcaccgccaccggcaccctgtccatcgagatcctggaggtgaacgaccatgcacctgtgctggccccgccgccgccgggcagcctgtgcagcgagccacaccaaggcccaggcctcctcctgggcgccacggatgaggacctgcccccccacggggcccccttccacttccagctgagccccaggctcccagagctcggccggaactggagcctcagccaggtcaacgtgagccacgcgcgcctgcggccgcgacaccaggtccccgaaggcctgcaccgcctcagcctgctgctccgggactcggggcagccgccccagcagcgcgagcagcctctgaacgtgaccgtgtgccgctgcggcaaggacggcgtctgcctgccgggggccgcagcgctgctggcggggggcacaggcctcagcctgggcgcactggtcatcgtgctggccagcgccctcctgctgctggtgctggtcctgctcgtggcactccgggcgcggttctggaagcagtctcggggcaaggggctgctgcacggcccccaggacgaccttcgagacaatgtcctcaactacgatgagcaaggaggcggggaggaggaccaggacgcctacgacatcagccagctgcgtcacccgacagcgctgagcctgcctctgggaccgccgccacttcgcagagatgccccgcagggccgcctgcacccccagccaccccgagtgctgcccaccagccccctggacatcgccgacttcatcaatgatggcttggaggctgcagatagtgaccccagtgtgccgccttacgacacagccctcatctatgactacgagggtgacggctcggtggcggggacgctgagctccatcctgtccagccagggcgatgaggaccaggactacgactacctcagagactgggggccccgcttcgcccggctggcagacatgtatgggcacccgtgcgggttggagtacggggccagatgggaccaccaggccagggagggtctttctcctggggcactgctacccagacacagaggccggacagcctgaccctggggcgcaactggacatgccactccccggcctcgtggcagtgatggcccctgcagaggcagcctgaggtcaccgggcccgacccccctgggcctggggcagcctccttcctgtaggcgagggcccaagtctgggggcagaacctgagtgtggatggggcggccaggaagaggccccttcctgccggggtgggaagagtttctctccatcggccccatgcgggtcacctccctagtcccacctttgcctcctaccagtgaacctcatctttgtatgaaagacagcaacctcctgggtaaatctgaatgaaaaacgtgctagtctctttcatgca

SEQ ID NO: 3618 - DNA, 6341 bp, Homo sapiens
  source 1..6341: mol_type = unassigned DNA; mol_type = unassigned DNA
tgacagtgttgtggtactaaaagcacaagcgtctgtaactctgggcaatggggcacatcgagagtttgctgagaagactgtgaagcaaaaagaagaaagtttttcctactcttccttatgtgtccaacacgaagtttgctgttcagttttcacagaacttctagaagttgaagttacaaaggtatatagaaggtacacagaatcagaaaagattataaaagaaagcaagatttttgttagtgacgtcctgtttcctctgaagagtaatagttggaatcaaaagagtcaacgcaatgaactgttatttactgctgcgttttatgttgggaattcctctcctatggccttgtcttggagcaacagaaaactctcaaacaaagaaagtcaagcagccagtgcgatctcatttgagagtgaagcgtggctgggtgtggaaccaattttttgtaccagaggaaatgaatacgactagtcatcacatcggccagctaagatctgatttagacaatggaaacaattctttccagtacaagcttttgggagctggagctggaagtacttttatcattgatgaaagaacaggtgacatatatgccatacagaagcttgatagagaggagcgatccctctacatcttaagagcccaggtaatagacatcgctactggaagggctgtggaacctgagtctgagtttgtcatcaaagtttcggatatcaatgacaatgaaccaaaattcctagatgaaccttatgaggccattgtaccagagatgtctccagaaggaacattagttatccaggtgacagcaagtgatgctgacgatccctcaagtggtaataatgctcgtctcctctacagcttacttcaaggccagccatatttttctgttgaaccaacaacaggagtcataagaatatcttctaaaatggatagagaactgcaagatgagtattgggtaatcattcaagccaaggacatgattggtcagccaggagcgttgtctggaacaacaagtgtattaattaaactttcagatgttaatgacaataagcctatatttaaagaaagtttataccgcttgactgtctctgaatctgcacccactgggacttctataggaacaatcatggcatatgataatgacataggagagaatgcagaaatggattacagcattgaagaggatgattcgcaaacatttgacattattactaatcatgaaactcaagaaggaatagttatattaaaaaagaaagtggattttgagcaccagaaccactacggtattagagcaaaagttaaaaaccatcatgttcctgagcagctcatgaagtaccacactgaggcttccaccactttcattaagatccaggtggaagatgttgatgagcctcctcttttcctccttccatattatgtatttgaagtttttgaagaaaccccacagggatcatttgtaggcgtggtgtctgccacagacccagacaataggaaatctcctatcaggtattctattactaggagcaaagtgttcaatatcaatgataatggtacaatcactacaagtaactcactggatcgtgaaatcagtgcttggtacaacctaagtattacagccacagaaaaatacaatatagaacagatctcttcgatcccactgtatgtgcaagttcttaacatcaatgatcatgctcctgagttctctcaatactatgagacttatgtttgtgaaaatgcaggctctggtcaggtaattcagactatcagtgcagtggatagagatgaatccatagaagagcaccatttttactttaatctatctgtagaagacactaacaattcaagttttacaatcatagataatcaagataacacagctgtcattttgactaatagaactggttttaaccttcaagaagaacctgtcttctacatctccatcttaattgccgacaatggaatcccgtcacttacaagtacaaacacccttaccatccatgtctgtgactgtggtgacagtgggagcacacagacctgccagtaccaggagcttgtgctttccatgggattcaagacagaagtcatcattgctattctcatttgcattatgatcatatttgggtttatttttttgactttgggtttaaaacaacggagaaaacagattctatttcctgagaaaagtgaagatttcagagagaatatattccaatatgatgatgaagggggtggagaagaagatacagaggcctttgatatagcagagctgaggagtagtaccataatgcgggaacgcaagactcggaaaaccacaagcgctgagatcaggagcctatacaggcagtctttgcaagttggccccgacagtgccatattcaggaaattcattctggaaaagctcgaagaagctaatactgatccgtgtgcccctccttttgattccctccagacctacgcttttgagggaacagggtcattagctggatccctgagctccttagaatcagcagtctctgatcaggatgaaagctatgattaccttaatgagttgggacctcgctttaaaagattagcatgcatgtttggttctgcagtgcagtcaaataattagggctttttaccatcaaaatttttaaaagtgctaatgtgtattcgaacccaatggtagtcttaaagagttttgtgccctggctctatggcggggaaagccctagtctatggagttttctgatttccctggagtaaatactccatggttattttaagctacctacatgctgtcattgaacagagatgtggggagaaatgtaaacaatcagctcacaggcatcaatacaaccagatttgaagtaaaataatttaggaagatattaaaagtagatgagaggacacaagatgtagtcgatccttatgcgattatatcattatttacttaggaaagagtaaaaataccaaacgagaaaatttaaaggagcaaaaatttgcaagtcaaatagaaatgtacaaatcgagataacatttacatttctatcatattgacatgaaaattgaaaatgtatagtcagagaaattttcatgaattattccatgaagtattgtttcctttatttaaaaaaaaaaaaaaaaaaaaagaatgctaggtaatcttcgtagaaaactagaaagtatgataaacaacagttggaggaatccatggaaaatagacgagaaaatgtaaataaggctttctggggatcacagaacttttgtatgaataaaagccttataaaaccagctctggcatatgactaaaatattcctctactatttttcaatgtcatctaatgcaaacgctcaacctttttaaatggttaatgtgagaaaggcactgaattaagatatcttagtgttattttatttactcaattttcatctttcacactgtaagaataaaatgtttttgtggttaagttcctgatactatatagagataaactttaaaactttaacacctaggataatgtgggtgattacataaatgtttaaaaacatttaccttatatggaaagcagatttctgactaagatgccatgattcattctagtttgatattttaaaactttgccaagagcactctttaaaactgatttcaaatttgaacagatacttggtgtatacaaattaatcagagttatatagtataaatttgtattatttttgatattacaactttgtattaaaaaggaaaatatatttaggtgtttgtcatagattttttttcatatgcaactcaaaacacattcttatgtcaaaatacaatagcaaaatacaagtcaatatttactcataattaaatgcaaactttatgaaactggtggaaagtgtggaaaaatttaagtaaatttttacctctactaaaaattatttagacaacttaaaggaatactggattcaaacttcagttactattcactgtaaatattatgatcaactgaactgacttaccattcatgggataaaacatgatacaattctcagtatttgcttttctgttaagagcttggaatatgactgatgcttcagtgtcatttttttattattgaatataaaattaggtgcaatagatacatttattgtagccttaagaaggaaatcaatgctaagctgttgggcataaaactttacagtaacattagataacaagataataaaacactttaattttaatcgaccttttaagaatgatctttattattctatccaaatcaaggtagacttcaaaatttatggtttgaacaggaagaaagtagtgaatacaaaattcttaaaattggttcatatgatcatttttttattaatagcatgtgagactaagctgaaccaaactggccatatatgttaaatcaaataatttgagtaattttgaaatattgatgaagtagttaaatggttataatatattttattggtactttgaaatttaaacatctatatcacataataaagaaagtttttcatcaatctgaaacaggcaccattaaattggtgacacaaatattatcatttcacaaaagcttgagaaaaccagatttgaagtgaaataatttaggaagatattaaaagtggatgagaggacataagatgtagtcaatccttaacgcaatgataccattattaggaaagaggaaaaataccaaacaagagaaaatttaaaggagcaaaaatttgcaagtcaaatagaaatgcacaaatcgagagaacatttacatttctatcacattgacatgaaaattgaaaatgtatagtcagagaaattttcatgaattattccatgaagtgttgtttcctttatttaaaaagaatgctaggtaatcttagtagaaaactaaaaagtatgataaacaacagatggaagaattcatggaaaatagacgagaaaaagtaaataaggctttctggagatgacggaaattttgtatgaataaaagccttataaacaatgaatacatttggataaacaactcattaaaatgcacattaatggaatacctgtacaaatagttttaatacttgtgtccagtggcactaaagagatatattaaaatagattctggttgagttgattataagattgtcaatcataggatacacagggaaagcacagacacgattgctcatctctttggtagtctaaaatatgttccttttaaccacatcaaaagatactatctgattctaatacagaaggtgcaacttcctaggaattatactttgtattatattcaataattattttatgttttgcatcacatgggtgttgcaagaacacagctcttaaactaaaaaggcattacattaagaatttatttttgtaaattttaataaactctaaattaatgcaaaatatttatgaaaatagcacagcttcacattaatacccacagtacttaaatatctcccttagttgactcacagctttgtatgtaagcttcaaatttttaatggtaaaaataagaaaattaggactagcgaactgctagttgttccctcagtgcatgtgcttgagcctaacagatctttgtttgaattagttactttcaattaagcgaacatataatatttgttaaactgcttaatctttccagatctcactttgtaaaatgacgtccaatcaacctatttcacatggttgttatgaagaattaataataagatatgtaaaaccagcagcaccaatagtgcctgacaaaatataactgctcaataaataacagtgaattattataacaacagctaatggtattctattggaacacatggtctgtttcttttccaattctgagtgatctcaacagcctcacggcacattgaaaataaaagtcaacttcctcaccttccccataggccatggactttcccatctctacccacttgtgcagtttctcctctttcctctctcctcctcagttactaaagcaatcttccttcaaacacttctattttccattacatcacttcattcaggttggtgatcagctgcaacttcctcagaaagaccactgctgcttccagtgaccctggctttgtcttgctttgtattagattactcagctccctggtattattgttgtctttatcgcttattagaatgtaacccttaatgggcaagaaattgtcagtcttgttcatttatcatcgtataaaaaatgtttctagcacacagaaagtgaccaataaatatttctggaattaatgtagtaatgaatccaatctattttacttagtgacttgtagaaattcttttggtttccattgactatttttatagaatattaatatggaattaaagtatttttcaaaa

SEQ ID NO: 3619 - DNA, 2588 bp, Homo sapiens
  source 1..2588: mol_type = unassigned DNA; mol_type = unassigned DNA
atactgacagtgttgtggtactaaaagcacaagcgtctgtaactctgggcaatggggcacatcgagagtttgctgagaagactgtgaagcaaaaagaagaaagtttttcctactcttccttatgtgtccaacacgaagtttgctgttcagttttcacagaacttctagaagttgaagttacaaaggtatatagaaggtacacagaatcagaaaagattataaaagaaagcaagatttttgttagtgacgtcctgtttcctctgaagagtaatagttggaatcaaaagagtcaacgcaatgaactgttatttactgctgcgttttatgttgggaattcctctcctatggccttgtcttggagcaacagaaaactctcaaacaaagaaagtcaagcagccagtgcgatctcatttgagagtgaagcgtggctgggtgtggaaccaattttttgtaccagaggaaatgaatacgactagtcatcacatcggccagctaagatctgatttagacaatggaaacaattctttccagtacaagcttttgggagctggagctggaagtacttttatcattgatgaaagaacaggtgacatatatgccatacagaagcttgatagagaggagcgatccctctacatcttaagagcccaggtaatagacatcgctactggaagggctgtggaacctgagtctgagtttgtcatcaaagtttcggatatcaatgacaatgaaccaaaattcctagatgaaccttatgaggccattgtaccagagatgtctccagaaggaacattagttatccaggtgacagcaagtgatgctgacgatccctcaagtggtaataatgctcgtctcctctacagcttacttcaaggccagccatatttttctgttgaaccaacaacaggagtcataagaatatcttctaaaatggatagagaactgcaagatgagtattgggtaatcattcaagccaaggacatgattggtcagccaggagcgttgtctggaacaacaagtgtattaattaaactttcagatgttaatgacaataagcctatatttaaagaaagtttataccgcttgactgtctctgaatctgcacccactgggacttctataggaacaatcatggcatatgataatgacataggagagaatgcagaaatggattacagcattgaagaggatgattcgcaaacatttgacattattactaatcatgaaactcaagaaggaatagttatattaaaaaagaaagtggattttgagcaccagaaccactacggtattagagcaaaagttaaaaaccatcatgttcctgagcagctcatgaagtaccacactgaggcttccaccactttcattaagatccaggtggaagatgttgatgagcctcctcttttcctccttccatattatgtatttgaagtttttgaagaaaccccacagggatcatttgtaggcgtggtgtctgccacagacccagacaataggaaatctcctatcaggtattctattactaggagcaaagtgttcaatatcaatgataatggtacaatcactacaagtaactcactggatcgtgaaatcagtgcttggtacaacctaagtattacagccacagaaaaatacaatatagaacagatctcttcgatcccactgtatgtgcaagttcttaacatcaatgatcatgctcctgagttctctcaatactatgagacttatgtttgtgaaaatgcaggctctggtcaggtaattcagactatcagtgcagtggatagagatgaatccatagaagagcaccatttttactttaatctatctgtagaagacactaacaattcaagttttacaatcatagataatcaagaactggttttaaccttcaagaagaacctgtcttctacatctccatcttaattgccgacaatggaatcccgtcacttacaagtacaaacacccttaccatccatgtctgtgactgtggtgacagtgggagcacacagacctgccagtaccaggagcttgtgctttccatgggattcaagacagaagtcatcattgctattctcatttgcattatgatcatatttgggtttatttttttgactttgggtttaaaacaacggagaaaacagattctatttcctgagaaaagtgaagatttcagagagaatatattccaatatgatgatgaagggggtggagaagaagatacagaggcctttgatatagcagagctgaggagtagtaccataatgcgggaacgcaagactcggaaaaccacaagcgctgagatcaggagcctatacaggcagtctttgcaagttggccccgacagtgccatattcaggaaattcattctggaaaagctcgaagaagctaatactgatccgtgtgcccctccttttgattccctccagacctacgcttttgagggaacagggtcattagctggatccctgagctccttagaatcagcagtctctgatcaggatgaaagctatgattaccttaatgagttgggacctcgctttaaaagattagcatgcatgtttggttctgcagtgcagtcaaataattag

SEQ ID NO: 3620 - DNA, 1963 bp, Homo sapiens
  source 1..1963: mol_type = unassigned DNA; mol_type = unassigned DNA
aatggggcacatcgagagtttgctgagaagactgtgaagcaaaaagaagaaagtttttcctactcttccttatgtgtccaacacgaagtttgctgttcagttttcacagaacttctagaagttgaagttacaaaggtatatagaaggtacacagaatcagaaaagattataaaagaaagcaagatttttgttagtgacgtcctgtttcctctgaagagtaatagttggaatcaaaagagtcaacgcaatgaactgttatttactgctgcgttttatgttgggaattcctctcctatggccttgtcttggagcaacagaaaactctcaaacaaagaaagtcaagcagccagtgcgatctcatttgagagtgaagcgtggctgggtgtggaaccaattttttgtaccagaggaaatgaatacgactagtcatcacatcggccagctaagatctgatttagacaatggaaacaattctttccagtacaagcttttgggagctggagctggaagtacttttatcattgatgaaagaacaggtgacatatatgccatacagaagcttgatagagaggagcgatccctctacatcttaagagcccaggtaatagacatcgctactggaagggctgtggaacctgagtctgagtttgtcatcaaagtttcggatatcaatgacaatgaaccaaaattcctagatgaaccttatgaggccattgtaccagagatgtctccagaaggaacattagttatccaggtgacagcaagtgatgctgacgatccctcaagtggtaataatgctcgtctcctctacagcttacttcaaggccagccatatttttctgttgaaccaacaacaggagtcataagaatatcttctaaaatggatagagaactgcaagatgagtattgggtaatcattcaagccaaggacatgattggtcagccaggagcgttgtctggaacaacaagtgtattaattaaactttcagatgttaatgacaataagcctatatttaaagaaagtttataccgcttgactgtctctgaatctgcacccactgggacttctataggaacaatcatggcatatgataatgacataggagagaatgcagaaatggattacagcattgaagaggatgattcgcaaacatttgacattattactaatcatgaaactcaagaaggaatagttatattaaaaaagaaagtggattttgagcaccagaaccactacggtattagagcaaaagttaaaaaccatcatgttcctgagcagctcatgaagtaccacactgaggcttccaccactttcattaagatccaggtggaagatgttgatgagcctcctcttttcctccttccatattatgtatttgaagtttttgaagaaaccccacagggatcatttgtaggcgtggtgtctgccacagacccagacaataggaaatctcctatcaggtattctattactaggagcaaagtgttcaatatcaatgataatggtacaatcactacaagtaactcactggatcgtgaaatcagtgcttggtacaacctaagtattacagccacagaaaaatacaatatagaacagatctcttcgatcccactgtatgtgcaagttcttaacatcaatgatcatgctcctgagttctctcaatactatgagacttatgtttgtgaaaatgcaggctctggtcagggtttatttttttgactttgggtttaaaacaacggagaaaacagattctatttcctgagaaaagtgaagatttcagagagaatatattccaatatgatgatgaagggggtggagaagaagatacagaggcctttgatatagcagagctgaggagtagtaccataatgcgggaacgcaagactcggaaaaccacaagcgctgagatcaggagcctatacaggcagtctttgcaagttggccccgacagtgccatattca

SEQ ID NO: 3621 - DNA, 1677 bp, Homo sapiens
  source 1..1677: mol_type = unassigned DNA; mol_type = unassigned DNA
ggaattcctctcctatggccttgtcttggagcaacagaaaactctcaaacaaagaaagtcaagcagccagtgcgatctcatttgagagtgaagcgtggctgggtgtggaaccaattttttgtaccagaggaaatgaatacgactagtcatcacatcggccagctaagatctgatttagacaatggaaacaattctttccagtacaagcttttgggagctggagctggaagtacttttatcattgatgaaagaacaggtgacatatatgccatacagaagcttgatagagaggagcgatccctctacatcttaagagcccaggtaatagacatcgctactggaagggctgtggaacctgagtctgagtttgtcatcaaagtttcggatatcaatgacaatgaaccaaaattcctagatgaaccttatgaggccattgtaccagagatgtctccagaaggaacattagttatccaggtgacagcaagtgatgctgacgatccctcaagtggtaataatgctcgtctcctctacagcttacttcaaggccagccatatttttctgttgaaccaacaacaggagtcataagaatatcttctaaaatggatagagaactgcaagatgagtattgggtaatcattcaagccaaggacatgattggtcagccaggagcgttgtctggaacaacaagtgtattaattaaactttcagatgttaatgacaataagcctatatttaaagaaagtttataccgcttgactgtctctgaatctgcacccactgggacttctataggaacaatcatggcatatgataatgacataggagagaatgcagaaatggattacagcattgaagaggatgattcgcaaacatttgacattattactaatcatgaaactcaagaaggaatagttatattaaaaaagaaagtggattttgagcaccagaaccactacggtattagagcaaaagttaaaaaccatcatgttcctgagcagctcatgaagtaccacactgaggcttccaccactttcattaagatccaggtggaagatgttgatgagcctcctcttttcctccttccatattatgtatttgaagtttttgaagaaaccccacagggatcatttgtaggcgtggtgtctgccacagacccagacaataggaaatctcctatcaggtattctattactaggagcaaagtgttcaatatcaatgataatggtacaatcactacaagtaactcactggatcgtgaaatcagtgcttggtacaacctaagtattacagccacagaaaaatgatatagggatgctgtattccttgaagattacatttcaaagagatggtcaccattacttgataaatacaatcctggatcctaaagcttccaagaaacttgttgaacttttgaaagatttccatacgcttcaaagggacaaagaaaaaacttacatacaaagctttttttttccctctctctctctctttctctgtgtgtgtgtgtgtgtgtgtgtgtgtgtgtatgaatgctctgagaaaaggaaggaaagaaaaaatattttcccttgctttcaacaagtacaaggcctctaatttttaatttgttttgttctttcaaattatcattgcaaatagtacatatattttaaataaaaacactaaaacaaactaaa

SEQ ID NO: 3622 - DNA, 587 bp, Homo sapiens
  source 1..587: mol_type = unassigned DNA; mol_type = unassigned DNA
aatggggcacatcgagagtttgctgagaagactgtgaagcaaaaagaagaaagtttttcctactcttccttatgtgtccaacacgaagtttgctgttcagttttcacagaacttctagaagttgaagttacaaaggacttccacagctatattaaataggagtggtgagagtcagcatccttgtcttgttccagttctcaagggaaatgtttccagcgcttgcccattcagtatcatgtttgctgtgaatttgtcatagatggctcttattatatttcaggtatatagaaggtacacagaatcagaaaagattataaaagaaagcaagatttttgttagtgacgtcctgtttcctctgaagagtaatagttggaatcaaaagagtcaacgcaatgaactgttatttactgctgcgttttatgttgggaattcctctcctatggccttgtcttggagcaacagaaaactctcaaacaaagaaagtcaagcagccagtgcgatctcatttgagagtgaagcgtggctgggtgtggaaccaattttttgtaccagaggaaatgaatacgactagtcatcacatcggccag

SEQ ID NO: 3623 - DNA, 4332 bp, Homo sapiens
  source 1..4332: mol_type = unassigned DNA; mol_type = unassigned DNA
cctccaccggccaaggtccccgccgctgcatccctcgcggcttccgctgcgctccgggccggagccgagccgcctgcgctgccacagcagccgcctccacacactcgcagacgctcacacgctctccctccctgttcccccgccccctccccagctccttgatctctgggtctgttttattactcctggtgcgagtcccgcggactccgcggcccgctatttgtcatcagctcgctctccattggcggggagcggagagcagcgaagaagggggtggggaggggaggggaagggaagggggtggaaactgcctggagccgtttctccgcgccgctgttggtgctgccgctgcctcctcctcctccgccgccgccgccgccgccgccgcctcctccggctcttcgctcggcccctctccgcctccatgtgccggatagcgggagcgctgcggaccctgctgccgctgctggcggccctgcttcaggcgtctgtagaggcttctggtgaaatcgcattatgcaagactggatttcctgaagatgtttacagtgcagtcttatcgaaggatgtgcatgaaggacagcctcttctcaatgtgaagtttagcaactgcaatggaaaaagaaaagtacaatatgagagcagtgagcctgcagattttaaggtggatgaagatggcatggtgtatgccgtgagaagctttccactctcttctgagcatgccaagttcctgatatatgcccaagacaaagagacccaggaaaagtggcaagtggcagtaaaattgagcctgaagccaaccttaactgaggagtcagtgaaggagtcagcagaagttgaagaaatagtgttcccaagacaattcagtaagcacagtggccacctacaaaggcagaagagagactgggtcatccctccaatcaacttgccagaaaactccaggggaccttttcctcaagagcttgtcaggatcaggtctgatagagataaaaacctttcactgcggtacagtgtaactgggccaggagctgaccagcctccaactggtatcttcattatcaaccccatctcgggtcagctgtcggtgacaaagcccctggatcgcgagcagatagcccggtttcatttgagggcacatgcagtagatattaatggaaatcaagtggagaaccccattgacattgtcatcaatgttattgacatgaatgacaacagacctgagttcttacaccaggtttggaatgggacagttcctgagggatcaaagcctggaacatatgtgatgaccgtaacagcaattgatgctgacgatcccaatgccctcaatgggatgttgaggtacagaatcgtgtctcaggctccaagcaccccttcacccaacatgtttacaatcaacaatgagactggtgacatcatcacagtggcagctggacttgatcgagaaaaagtgcaacagtatacgttaataattcaagctacagacatggaaggcaatcccacatatggcctttcaaacacagccacggccgtcatcacagtgacagatgtcaatgacaatcctccagagtttactgccatgacgttttatggtgaagttcctgagaacagggtagacatcatagtagctaatctaactgtgaccgataaggatcaaccccatacaccagcctggaacgcagtgtacagaatcagtggcggagatcctactggacggttcgccatccagaccgacccaaacagcaacgacgggttagtcaccgtggtcaaaccaatcgactttgaaacaaataggatgtttgtccttactgttgctgcagaaaatcaagtgccattagccaagggaattcagcacccccctcagtcaactgcaaccgtgtctgttacagttattgacgtaaatgaaaacccttattttgcccccaatcctaagatcattcgccaagaagaagggcttcatgccggtaccatgttgacaacattcactgctcaggacccagatcgatatatgcagcaaaatattagatacactaaattatctgatcctgccaattggctaaaaatagatcctgtgaatggacaaataactacaattgctgttttggaccgagaatcaccaaatgtgaaaaacaatatatataatgctactttccttgcttctgacaatggaattcctcctatgagtggaacaggaacgctgcagatctatttacttgatattaatgacaatgcccctcaagtgttacctcaagaggcagagacttgcgaaactccagaccccaattcaattaatattacagcacttgattatgacattgatccaaatgctggaccatttgcttttgatcttcctttatctccagtgactattaagagaaattggaccatcactcggcttaatggtgattttgctcagcttaatttaaagataaaatttcttgaagctggtatctatgaagttcccatcataatcacagattcgggtaatcctcccaaatcaaatatttccatcctgcgtgtgaaggtttgccagtgtgactccaacggggactgcacagatgtggacaggattgtgggtgcggggcttggcaccggtgccatcattgccatcctgctctgcatcatcatcctgcttatccttgtgctgatgtttgtggtatggatgaaacgccgggataaagaacgccaggccaaacaacttttaattgatccagaagatgatgtaagagataatattttaaaatatgatgaagaaggtggaggagaagaagaccaggactatgacttgagccagctgcagcagcctgacactgtggagcctgatgccatcaagcctgtgggaatccgacgaatggatgaaagacccatccacgccgagccccagtatccggtccgatctgcagccccacaccctggagacattggggacttcattaatgagggccttaaagcggctgacaatgaccccacagctccaccatatgactccctgttagtgtttgactatgaaggcagtggctccactgctgggtccttgagctcccttaattcctcaagtagtggtggtgagcaggactatgattacctgaacgactgggggccacggttcaagaaacttgctgacatgtatggtggaggtgatgactgaacttcagggtgaacttggtttttggacaagtacaaacaatttcaactgatattcccaaaaagcattcagaagctaggctttaactttgtagtctactagcacagtgcttgctggaggctttggcataggctgcaaaccaatttgggctcagagggaatatcagtgatccatactgtttggaaaaacactgagctcagttacacttgaattttacagtacagaagcactgggattttatgtgcctttttgtacctttttcagattggaattagttttctgtttaaggctttaatggtactgatttctgaaacgataagtaaaagacaaaatattttgtggtgggagcagtaagttaaaccatgatatgcttcaacacgcttttgttacattgcatttgcttttattaaaatacaaaattaaacaaacaaaaaaactcatggagcgattttattatcttgggggatgagaccatgagattggaaaatgtacattacttctagttttagactttagtttgtttttttttttttcactaaaatcttaaaacttactcagctggttgcaaataaagggagttttcatatcaccaatttgtagcaaaattgaattttttcataaactagaatgttagacacattttggtcttaatccatgtacacttttttatttctgtatttttccacttcactgtaaaaatagtatgtgtacataatgttttattggcatagtctatggagaagtgcagaaacttcagaacatgtgtatgtattatttggactatggattcaggttttttgcatgtttatatctttcgttatggataaagtatttacaaaacagtgacatttgattcaattgttgagctgtagttagaatactcaatttttaatttttttaatttttttattttttattttctttttggtttggggagggagaaaagttcttagcacaaatgttttacataatttgtaccaaaaaaaaaaaaaaaggaaaggaaagaaaggggtggcctgacactggtggcactactaagtgtgtgtttttttaaaaaaaaaatggaaaaaaaaaagcttttaaactggagagacttctgacaacagctttgcctctgtattgtgtaccagaatataaatgatacacctctgaccccagcgttctgaataaaatgctaattttggatctgg

SEQ ID NO: 3624 - DNA, 3737 bp, Homo sapiens
  source 1..3737: mol_type = unassigned DNA; mol_type = unassigned DNA
aagcagaaggaattatgggaaatggaaacttgatggcatgtttttattaaggcgttatgtgtgtatcttcactgagaaattaaagaaccaagcagaattgtatgttttcctttcagtgaagtttagcaactgcaatggaaaaagaaaagtacaatatgagagcagtgagcctgcagattttaaggtggatgaagatggcatggtgtatgccgtgagaagctttccactctcttctgagcatgccaagttcctgatatatgcccaagacaaagagacccaggaaaagtggcaagtggcagtaaaattgagcctgaagccaaccttaactgaggagtcagtgaaggagtcagcagaagttgaagaaatagtgttcccaagacaattcagtaagcacagtggccacctacaaaggcagaagagagactgggtcatccctccaatcaacttgccagaaaactccaggggaccttttcctcaagagcttgtcaggatcaggtctgatagagataaaaacctttcactgcggtacagtgtaactgggccaggagctgaccagcctccaactggtatcttcattatcaaccccatctcgggtcagctgtcggtgacaaagcccctggatcgcgagcagatagcccggtttcatttgagggcacatgcagtagatattaatggaaatcaagtggagaaccccattgacattgtcatcaatgttattgacatgaatgacaacagacctgagttcttacaccaggtttggaatgggacagttcctgagggatcaaagcctggaacatatgtgatgaccgtaacagcaattgatgctgacgatcccaatgccctcaatgggatgttgaggtacagaatcgtgtctcaggctccaagcaccccttcacccaacatgtttacaatcaacaatgagactggtgacatcatcacagtggcagctggacttgatcgagaaaaagtgcaacagtatacgttaataattcaagctacagacatggaaggcaatcccacatatggcctttcaaacacagccacggccgtcatcacagtgacagatgtcaatgacaatcctccagagtttactgccatgacgttttatggtgaagttcctgagaacagggtagacatcatagtagctaatctaactgtgaccgataaggatcaaccccatacaccagcctggaacgcagtgtacagaatcagtggcggagatcctactggacggttcgccatccagaccgacccaaacagcaacgacgggttagtcaccgtggtcaaaccaatcgactttgaaacaaataggatgtttgtccttactgttgctgcagaaaatcaagtgccattagccaagggaattcagcacccccctcagtcaactgcaaccgtgtctgttacagttattgacgtaaatgaaaacccttattttgcccccaatcctaagatcattcgccaagaagaagggcttcatgccggtaccatgttgacaacattcactgctcaggacccagatcgatatatgcagcaaaatattagatacactaaattatctgatcctgccaattggctaaaaatagatcctgtgaatggacaaataactacaattgctgttttggaccgagaatcaccaaatgtgaaaaacaatatatataatgctactttccttgcttctgacaatggaattcctcctatgagtggaacaggaacgctgcagatctatttacttgatattaatgacaatgcccctcaagtgttacctcaagaggcagagacttgcgaaactccagaccccaattcaattaatattacagcacttgattatgacattgatccaaatgctggaccatttgcttttgatcttcctttatctccagtgactattaagagaaattggaccatcactcggcttaatggtgattttgctcagcttaatttaaagataaaatttcttgaagctggtatctatgaagttcccatcataatcacagattcgggtaatcctcccaaatcaaatatttccatcctgcgtgtgaaggtttgccagtgtgactccaacggggactgcacagatgtggacaggattgtgggtgcggggcttggcaccggtgccatcattgccatcctgctctgcatcatcatcctgcttatccttgtgctgatgtttgtggtatggatgaaacgccgggataaagaacgccaggccaaacaacttttaattgatccagaagatgatgtaagagataatattttaaaatatgatgaagaaggtggaggagaagaagaccaggactatgacttgagccagctgcagcagcctgacactgtggagcctgatgccatcaagcctgtgggaatccgacgaatggatgaaagacccatccacgccgagccccagtatccggtccgatctgcagccccacaccctggagacattggggacttcattaatgagggccttaaagcggctgacaatgaccccacagctccaccatatgactccctgttagtgtttgactatgaaggcagtggctccactgctgggtccttgagctcccttaattcctcaagtagtggtggtgagcaggactatgattacctgaacgactgggggccacggttcaagaaacttgctgacatgtatggtggaggtgatgactgaacttcagggtgaacttggtttttggacaagtacaaacaatttcaactgatattcccaaaaagcattcagaagctaggctttaactttgtagtctactagcacagtgcttgctggaggctttggcataggctgcaaaccaatttgggctcagagggaatatcagtgatccatactgtttggaaaaacactgagctcagttacacttgaattttacagtacagaagcactgggattttatgtgcctttttgtacctttttcagattggaattagttttctgtttaaggctttaatggtactgatttctgaaacgataagtaaaagacaaaatattttgtggtgggagcagtaagttaaaccatgatatgcttcaacacgcttttgttacattgcatttgcttttattaaaatacaaaattaaacaaacaaaaaaactcatggagcgattttattatcttgggggatgagaccatgagattggaaaatgtacattacttctagttttagactttagtttgtttttttttttttcactaaaatcttaaaacttactcagctggttgcaaataaagggagttttcatatcaccaatttgtagcaaaattgaattttttcataaactagaatgttagacacattttggtcttaatccatgtacacttttttatttctgtatttttccacttcactgtaaaaatagtatgtgtacataatgttttattggcatagtctatggagaagtgcagaaacttcagaacatgtgtatgtattatttggactatggattcaggttttttgcatgtttatatctttcgttatggataaagtatttacaaaacagtgacatttgattcaattgttgagctgtagttagaatactcaatttttaatttttttaatttttttattttttattttctttttggtttggggagggagaaaagttcttagcacaaatgttttacataatttgtaccaaaaaaaaaaaaaaaggaaaggaaagaaaggggtggcctgacactggtggcactactaagtgtgtgtttttttaaaaaaaaaatggaaaaaaaaaa

SEQ ID NO: 3625 - DNA, 740 bp, Homo sapiens
  source 1..740: mol_type = unassigned DNA; mol_type = unassigned DNA
agtaagagtgttccactcagataggctagcatgagcaaggcagaagcctgaaacagttggatgtgttccagaaactgtaagcaattgaatacaatggaaatgaagttcatttacaagaccatgatgagagaattgacttttaggctgtggccacattgttgaaggacatgtgtaacactcaaaggatgaagtttagcaactgcaatggaaaaagaaaagtacaatatgagagcagtgagcctgcagattttaaggtggatgaagatggcatggtgtatgccgtgagaagctttccactctcttctgagcatgccaagttcctgatatatgcccaagacaaagagacccaggaaaagtggcaagtggcagtaaaattgagcctgaagccaaccttaactgaggagtcagtgaaggagtcagcagaagttgaagaaatagtgttcccaagacaattcagtaagcacagtggccacctacaaaggcagaagagagactgggtcatccctccaatcaacttgccagaaaactccaggggaccttttcctcaagagcttgtcaggatcaggtctgatagagataaaaacctttcactgcggtacagtgtaactgggccaggagctgaccagcctccaactggtatcttcattatcaaccccatctcgggtcagctgtcggtgacaaagcccctggatcgcgagcagatagcccggtttcatttgagggcacatgcagtagatatt

SEQ ID NO: 3626 - DNA, 610 bp, Homo sapiens
  source 1..610: mol_type = unassigned DNA; mol_type = unassigned DNA
aagaaacacaaatacacattgattccttgtagacacagatgcagaagtgaagaaaggatactactttcttttatcctgcacatcagagcgggtacaccgtcagctacaagggagaccctgataatgcctcagggggactctaagcagagtgtactggaaatacagagtgaagtttagcaactgcaatggaaaaagaaaagtacaatatgagagcagtgagcctgcagattttaaggtggatgaagatggcatggtgtatgccgtgagaagctttccactctcttctgagcatgccaagttcctgatatatgcccaagacaaagagacccaggaaaagtggcaagtggcagtaaaattgagcctgaagccaaccttaactgaggagtcagtgaaggagtcagcagaagttgaagaaatagtgttcccaagacaattcagtaagcacagtggccacctacaaaggcagaagagagactgggtcatccctccaatcaacttgccagaaaactccaggggaccttttcctcaagagcttgtcaggatcaggtctgatagagataaaaacctttcactgcggtacagtgtaactgggccaggagctgaccagcct

SEQ ID NO: 3627 - DNA, 563 bp, Homo sapiens
  source 1..563: mol_type = unassigned DNA; mol_type = unassigned DNA
agattgctgcagggaatctgtgagctcccagcatggaaaatgagatcaccaagcttcttttctgtggacctgtgactcccagatgggcggagtaggggacagggttgggcaccagctgctcagattattctttcaaatgcaggcttcaggcgtctgtagaggcttctggtgaaatcgcattatgcaagactggatttcctgaagatgtttacagtgcagtcttatcgaaggatgtgcatgaaggacagcctcttctcaatgtgaagtttagcaactgcaatggaaaaagaaaagtacaatatgagagcagtgagcctgcagattttaaggtggatgaagatggcatggtgtatgccgtgagaagctttccactctcttctgagcatgccaagttcctgatatatgcccaagacaaagagacccaggaaaagtggcaagtggcagtaaaattgagcctgaagccaaccttaactgaggagtcagtgaaggagtcagcagaagttgaagaaatagtgttcccaagacaattcagtaagcacagtggccacctacaaaggcagaag

SEQ ID NO: 3628 - DNA, 11139 bp, Homo sapiens
  source 1..11139: mol_type = unassigned DNA; mol_type = unassigned DNA
gcggcggcggcggctcgggagagagggacgcgggctgcaggcgcgatgcttggctagaggacgcgtccgacggcggccggacgctgaggtggtcggggctagtcagcccggcctgggcatggagcgcggggtggcagagcctctggacgtttggggcgcgcccagtccgagcccccggcgcgcctgaagttgcgagcggcgagcggcgagcggcgagcggcccgcggagacccaggagctgccggcacgccgcggatgagccttcgcgccggcgggaagacgcggcggtggccagggccagagcaggcggcccgcgggggccgatccggcggagagcagagcccgaggcgaggcgaggcgcggcgccgctgcacacacgcacacggagccatggggcgccatgttgccaccagctgccacgtggcctggcttttggtgctgatctctggatgctggggccaggtgaaccggctgcccttcttcaccaaccacttctttgatacatacctgctgatcagcgaggacacgcctgtgggttcttctgtgacccagttgctggcccaagacatggacaatgaccccctggtgtttggcgtgtctggggaggaggcctctcgcttctttgcagtggagcctgacactggcgtggtgtggctccggcagccactggacagagagaccaagtcagagttcaccgtggagttctctgtcagcgaccaccagggggtgatcacacggaaggtgaacatccaggttggggatgtgaatgacaacgcgcccacatttcacaatcagccctacagcgtccgcatccctgaggtaggagccactgggaatacaccagtggggacgcccatcttcatcgtgaatgccacagaccccgacttgggggcagggggcagcgtcctctactccttccagcccccctcccaattcttcgccattgacagcgcccgcggtatcgtcacagtgatccgggagctggactacgagaccacacaggcctaccagctcacggtcaacgccacagatcaagacaagaccaggcctctgtccaccctggccaacttggccatcatcatcacagatgtccaggacatggaccccatcttcatcaacctgccttacagcaccaacatctacgagcattctcctccgggcacgacggtgcgcatcatcaccgccatagaccaggataaaggacgtccccggggcattggctacaccatcgtttcagggaataccaacagcatctttgccctggactacatcagcggagtgctgaccttgaatggcctgctggaccgggagaaccccctgtacagccatggcttcatcctgactgtgaagggcacggagctgaacgatgaccgcaccccatctgacgctacagtcaccacgaccttcaatatcctggttattgacatcaatgacaatgccccggagttcaacagctccgagtacagcgtggccatcactgagctggcacaggtcggctttgcccttccactcttcatccaggtggtggacaaggatgagaatttgggcctgaacagcatgtttgaggtgtacttggtggggaacaactcccaccacttcatcatctccccgacctccgtccaggggaaggcggacattcgtattcgggtggccatcccactggactacgagaccgtggaccgctacgactttgatctctttgccaatgagagtgtgcctgaccatgtgggctatgccaaggtgaagatcactctcatcaatgaaaatgacaaccggcccatcttcagccagccactgtacaacatcagcctgtacgagaacgtcaccgtggggacctctgtgctgacagtcctggcaactgacaatgatgcaggcacctttggggaagtcagctacttcttcagtgatgaccctgacaggttctcgctggacaaggacacgggactcatcatgctgattgccaggctggactatgagctcatccagcgcttcaccctgacgatcattgcccgggacgggggcggcgaggagaccacaggccgggtcaggatcaatgtgttggatgtcaacgacaacgtgcccaccttccagaaggatgcctacgtgggtgctctgcgggagaacgagccttctgtcacacagctggtgcggctccgggcaacagatgaagactcccctcccaacaaccagatcacctacagcattgtcagtgcatctgcctttggcagctacttcgacatcagcctgtacgagggctatggagtgatcagcgtcagtcgccccctggattatgaacagatatccaatgggctgatttatctgacggtcatggccatggatgctggcaacccccctctcaacagcaccgtccctgtcaccatcgaggtgtttgatgagaatgacaaccctcccaccttcagcaagcccgcctacttcgtctccgtggtggagaacatcatggcaggagccacggtgctgttcctgaatgccacagacctggaccgctcccgggagtacggccaggagtccatcatctactccttggaaggctccacccagtttcggatcaatgcccgctcaggggaaatcaccaccacgtctctgcttgaccgagagaccaagtctgaatacatcctcatcgttcgcgcagtggacgggggtgtgggccacaaccagaaaactggcatcgccaccgtaaacatcaccctcctggacatcaatgacaaccaccccacgtggaaggacgcaccctactacatcaacctggtggagatgacccctccagactctgatgtgaccacggtggtggctgttgacccagacctgggggagaatggcaccctggtgtacagcatccagccacccaacaagttctacagcctcaacagcaccacgggcaagatccgcaccacccacgccatgctggaccgggagaaccccgacccccatgaggccgagctgatgcgcaaaatcgtcgtctctgttactgactgtggcaggccccctctgaaagccaccagcagtgccacagtgtttgtgaacctcttggatctcaatgacaatgaccccacctttcagaacctgccttttgtggccgaggtgcttgaaggcatcccggcgggggtctccatctaccaagtggtggccatcgacctcgatgagggcctgaacggcctggtgtcctaccgcatgccggtgggcatgccccgcatggacttcctcatcaacagcagcagcggcgtggtggtcaccaccaccgagctggaccgcgagcgcatcgcggagtaccagctgcgggtggtggccagtgatgcaggcacgcccaccaagagctccaccagcacgctcaccatccatgtgctggatgtgaacgacgagacgcccaccttcttcccggccgtgtacaatgtgtctgtgtccgaggacgtgccacgcgagttccgggtggtctggctgaactgcacggacaacgacgtgggcctcaatgcagagctcagctacttcatcacaggtggcaacgtggatgggaagttcagcgtgggttaccgcgatgccgttgtgagaaccgtggtgggcctggaccgggagaccacagccgcctacatgctcatcctggaggccatcgacaacggccctgtagggaagcgacacacgggcacagccaccgtgttcgtcactgtcctggatgtgaatgacaaccggcccatctttctgcagagcagctatgaggccagcgtccctgaggacatccctgaaggccacagcatcttgcagctgaaagccacggacgcagatgagggcgagtttgggcgtgtgtggtaccgcatcctccatggtaaccatggcaacaacttccggatccatgtcagcaatgggctcctgatgcgagggccccggcccctggaccgggagcggaactcatcccacgtgctgatagtggaggcctacaaccacgacctgggccccatgcggagctccgtcagggtgattgtgtacgtggaggacatcaacgatgaggcccccgtgttcacacagcagcagtacagccgtctggggcttcgagagaccgcaggcattggaacgtcagtcatcgtggtccaagccacagaccgagactctggggatggtggcctggtgaactaccgcatcctgtcgggcgcagaggggaagtttgagattgacgagagcacagggcttatcatcaccgtgaattacctggactacgagaccaagaccagctacatgatgaatgtgtcggccactgaccaggccccgcccttcaaccagggcttctgcagcgtctacatcactctgctcaacgagctggacgaggccgtgcagttctccaatgcctcatacgaggctgccatcctggagaatctggcactgggtactgagattgtgcgggtccaggcctactccatcgacaacctcaaccaaatcacgtaccgcttcaacgcctacaccagcacccaggccaaagccctcttcaagatagacgccatcacgggtgtgatcacagtccagggcctggtggaccgtgagaagggcgacttctataccttgacagtggtggcagatgacggcggccccaaggtggactccaccgtgaaggtctacatcactgtgctggacgagaatgacaacagcccccggtttgacttcacctccgactcggcggtcagcatacccgaggactgccctgtgggccagcgagtggctactgtcaaggcctgggaccctgatgctggcagcaatgggcaggtggtcttctccctggcctctggcaacatcgcgggggcctttgagatcgtcaccaccaatgactccattggcgaagtgtttgtggccaggcccctggacagagaagagctggatcactacatcctccaggttgtggcttctgaccgaggcacccctccacggaagaaggaccacatcctgcaggtgaccatcctggacatcaatgacaaccctccagtcatcgagagcccctttggatacaatgtcagtgtgaatgagaacgtgggtggaggtactgctgtggtccaggtgagagccactgaccgtgacatcgggatcaacagtgttctgtcctactacatcaccgagggcaacaaggacatggccttccgcatggaccgcatcagcggtgagatcgccacacggcctgccccgcctgaccgcgagcgccagagcttctaccacctggtggccactgtggaggacgagggcaccccaaccctgtcggccaccacgcacgtgtacgtgaccattgtggatgagaatgataacgcgcccatgttccagcagccccactatgaggtgctgctggatgagggcccagacacgctcaacaccagcctcatcaccatccaggcactggacctggatgagggtcccaacggcacagtcacctatgccatcgtcgcaggcaacatcgtcaacaccttccgcatcgacagacacatgggtgtcatcactgctgccaaagagctggactacgagatcagccacggccgctacaccctgatcgtcactgccacagaccagtgccccatcttatcccaccgcctcacctctaccaccacggtgcttgtgaatgtgaatgacatcaacgacaatgtgcctaccttcccccgggactatgagggaccatttgaagtcactgagggccagccggggcccagagtgtggaccttcctggcccatgaccgagactcaggacccaacgggcaggtggagtacagcatcatggatggagaccctctgggggagtttgtgatctctcctgtggagggggtgctaagggtccggaaggacgtggagctggaccgggagaccatcgccttctacaacctgaccatctgtgcccgtgaccgggggatgcccccactcagctccacaatgctggtggggatccgggtgctggacatcaacgacaacgaccctgtgctgctgaacctgcccatgaacatcaccatcagcgagaacagccctgtctccagctttgtcgcccatgtcctggccagtgacgctgacagtggctgcaatgcacgcctcaccttcaacatcactgcgggcaaccgcgagcgggccttcttcatcaatgccacgacagggatcgtcactgtgaaccggcccctggaccgcgagcggatcccagagtacaagctgaccatttctgtgaaggacaacccggagaatccacgcatagccaggagggattatgacttgcttctgatcttcctttctgatgagaatgacaaccaccccctcttcactaaaagcacctaccaggcagaggtgatggaaaactctcccgctggcacccctctcacggtgctcaatgggcccatcctggccctggatgcagaccaagacatctacgccgtggtgacctaccagctgctgggtgcccagagtggcctctttgacatcaacagcagcaccggtgtggtgaccgtgaggtcaggtgtcatcattgaccgggaggcattctcgccacccatcctggagctgctgctgctggctgaggacatcgggctgctcaacagcacggcccacctgctcatcaccatcctggatgacaatgacaaccggcccacctttagccctgccaccctcactgtccatctgctagagaactgcccgcctggattctcagtccttcaagtcacagccacagatgaggacagtggcctcaatggggagctggtctaccgaatagaagctggggctcaggaccgcttcctcattcatctggtcaccggggtcatccgtgttggtaatgccaccatcgacagagaggagcaggagtcctacaggctaacggtggtggccaccgaccggggcaccgttcctctctcgggcacagccattgtcaccattctgatcgatgacatcaatgactcccgccccgagttcctcaaccccatccagacagtgagcgtgctggagtcggctgagccaggcactgtcattgccaatatcacggccattgaccacgacctcaacccaaagctagagtaccacattgtcggcattgtggccaaggacgacactgatcgcctggtgcccaaccaggaggacgcctttgctgtgaatatcaacacaggatctgtaatggtgaagtcccccatgaatcgggagctggttgccacctatgaggtcactctctcagtgattgacaatgccagcgacctaccagagcgctctgtcagtgtgccaaatgccaagctgactgtcaacgtcctggacgtcaatgacaatacgccccagttcaagccctttgggatcacctactacatggagcggatcctggagggggccacccctgggaccacactcattgctgtggcagccgtggaccctgacaagggccttaatgggctggtcacctacaccctgctggacctggtgcccccagggtatgtccagctggaggactcctcggcagggaaggtcattgccaaccggacagtggactacgaggaggtgcactggctcaactttaccgtgagggcctcagacaacgggtccccgccccgggcagctgagatccctgtctacctggaaatcgtggacatcaatgacaacaaccccatctttgaccagccctcctaccaggaggctgtctttgaggatgtgcctgtgggcacaatcatcctgacagtcactgccactgatgctgactcaggcaactttgcactcattgagtacagccttggagatggagagagcaagtttgccatcaaccccaccacgggtgacatctatgtgctgtcttctctggaccgggagaagaaggaccactatatcctgactgccttggccaaagacaaccctggggatgtagccagcaaccgtcgcgaaaattcagtgcaggtggtgatccaagtgctggatgtcaatgactgccggccacagttctccaagccccagttcagcacaagcgtgtatgagaatgagccggcgggcacctcggtcatcaccatgatggccactgaccaggatgaaggtcccaatggagagttgacctactcacttgagggccctggcgtggaggccttccatgtggacatggactcgggcttggtgaccacacagcggccactgcagtcctacgagaagttcagtctgaccgtggtggccacagatggtggagagcccccactctggggcaccaccatgctcctggtggaggtcatcgacgtcaatgacaaccgccctgtctttgtgcgcccacccaacggcaccatcctccacatcagagaggagatcccgctgcgctccaacgtgtacgaggtctacgccacggacaaggatgagggcctcaacggggcggtgcgctacagcttcctgaagactgcgggcaaccgggactgggagttcttcatcatcgacccaatcagcggcctcatccagactgctcagcgcctggaccgcgagtcgcaggcggtgtacagcctcatcttggtggccagcgacctgggccagccagtgccatacgagactatgcagccgctgcaggtggccctggaggacatcgatgacaacgaaccccttttcgtgaggcctccaaaaggcagcccccagtaccagctgctgacagtgcctgagcactcaccacgcggcaccctcgtgggcaacgtgacaggcgcagtggatgcagatgagggccccaacgcgatcgtgtactacttcatcgcagccggcaacgaagagaagaacttccatctgcagcccgatgggtgtctgctggtgctgcgggacctggaccgggagcgagaagccatcttctccttcatcgtcaaggcctccagcaatcgcagctggacacctccccgtggaccctccccaaccctcgacctggttgctgacctcacactgcaggaggtgcgcgttgtgctagaggacatcaacgaccagccaccacgcttcaccaaggctgagtacactgcaggggtggccaccgacgccaaggtgggctcagagttgatccaggtgctggccctggatgcagacattggcaacaacagccttgtcttctacagcattctggccatccactacttccgggcccttgccaacgactctgaagatgtgggccaggtcttcaccatggggagcatggacggcattctgcgcaccttcgacctcttcatggcctacagccccggctacttcgtggtggacattgtggcccgagacctggcaggccacaacgacacggccatcatcggcatctacatcctgagggacgaccagcgcgtcaagatcgtcattaacgagatccccgaccgtgtgcgcggcttcgaggaggagttcatccacctgctctccaacatcactggggccattgtcaatactgacaatgtgcagttccatgtggacaagaagggccgggtgaactttgcgcagacagaactgcttatccacgtggtgaaccgcgataccaaccgcatcctggacgtggaccgggtgatccagatgatcgatgagaacaaggagcagctacggaatcttttccggaactacaacgtcctggacgtgcagcctgccatctctgtccggctgccggatgacatgtctgccctgcagatggcgatcatcgtcctggctatcctcctgttcctggccgccatgctctttgtcctcatgaactggtactacaggactgtacacaagaggaagctcaaggccattgtggctggctcagctgggaatcgtggcttcatcgacatcatggacatgcctaacaccaacaagtactcctttgatggagccaaccctgtgtggctggatcccttctgtcggaacctggagctggccgcccaggcggagcatgaggatgacctaccggagaacctgagtgagatcgccgacctgtggaacagccccacgcgcacccatggaacttttgggcgtgagccagcagctgtcaagcctgatgatgaccgatacctgcgggctgccatccaggagtatgacaacattgccaagctgggccagatcattcgtgaggggccaatcaagggctcgctgctgaaggtggtcctggaggattacctgcggctcaaaaagctctttgcacagcggatggtgcaaaaagcctcctcctgccactcctccatctctgagctgatacagactgagctggacgaggagccaggagaccacagcccagggcagggtagcctgcgcttccgccacaagccaccagtggagctcaaggggcccgatgggatccatgtggtgcacggcagcacgggcacgctgctggccaccgacctcaacagcctgcccgaggaagaccagaagggcctgggccgctcgctggagacgctgaccgctgccgaggccactgccttcgagcgcaacgcccgcacagaatccgccaaatccacacccctgcacaaacttcgcgacgtgatcatggagacccccctggagatcacagagctgtgactagacagggaagccttgtgggtgtgagcagcacccatccaccgtcccctcccagggagcaagggcagggacagggccggtcgggggggaccctccaaggccaggccttggggacaaccttggcttggccctggcagcccgcatcagctgctcagatcccacttttgccagacgctcattcagcatctgacctctaccttcataagatctgttatttttataagaaaaccaaacaaaaatgttaagcatctaaggacaaggtaaggagggtcactggggcccaagagtctggggaccagcttggctcaggctgagctgaaagaggccaaacaggccctcctccctcccagctccaccccgcaagcaccatcccctccggctaagcaggcgcaagggaggcccagcgcggacatcccctgctggccggacacccgactccagtccaagtctcgctacatttccgccacatccctctctgctggacgtccaggtggaggtggcatccccacgtggacaagaaagtcaatgtcaatgaacaagcattctctccatttcactggcttcccaaatgtgtgcccagcttataaacagaagtgactgatgttccctccggttttgaatgtggagtgtttgtgtgtgttccttttttaaattaagttattccctcaa

SEQ ID NO: 3629 - DNA, 2000 bp, Homo sapiens
  source 1..2000: mol_type = unassigned DNA; mol_type = unassigned DNA
ggcggcggcggctcgggagagagggacgcgggctgcaggcgcgatgcttggctagaggacgcgtccgacggcggccggacgctgaggtggtcggggctagtcagcccggcctgggcatggagcgcggggtggcagagcctctggacgtttggggcgcgcccagtccgagcccccggcgcgcctgaagttgcgagcggcgagcggcgagcggcgagcggcccgcggagacccaggagctgccggcacgccgcggatgagccttcgcgccggcgggaagacgcggcggtggccagggccagagcaggcggcccgcgggggccgatccggcggagagcagagcccgaggcgaggcgaggcgcggcgccgctgcacacacgcacacggagccatggggcgccatgttgccaccagctgccacgtggcctggcttttggtgctgatctctggatgctggggccaggtgaaccggctgcccttcttcaccaaccacttctttgatacatacctgctgatcagcgaggacacgcctgtgggttcttctgtgacccagttgctggcccaagacatggacaatgaccccctggtgtttggcgtgtctggggaggaggcctctcgcttctttgcagtggagcctgacactggcgtggtgtggctccggcagccactggacagagagaccaagtcagagttcaccgtggagttctctgtcagcgaccaccagggggtgatcacacggaaggtgaacatccaggttggggatgtgaatgacaacgcgcccacatttcacaatcagccctacagcgtccgcatccctgagaatacaccagtggggacgcccatcttcatcgtgaatgccacagaccccgacttgggggcagggggcagcgtcctctactccttccagcccccctcccaattcttcgccattgacagcgcccgcggtatcgtcacagtgatccgggagctggactacgagaccacacaggcctaccagctcacggtcaacgccacagatcaagacaagaccaggcctctgtccaccctggccaacttggccatcatcatcacagatgtccaggacatggaccccatcttcatcaacctgccttacagcaccaacatctacgagcattctcctccgggcacgacggtgcgcatcatcaccgccatagaccaggataaaggacgtccccggggcattggctacaccatcgtttcagggaataccaacagcatctttgccctggactacatcagcggagtgctgaccttgaatggcctgctggaccgggagaaccccctgtacagccatggcttcatcctgactgtgaagggcacggagctgaacgatgaccgcaccccatctgacgctacagtcaccacgaccttcaatatcctggttattgacatcaatgacaatgccccggagttcaacagctccgagtacagcgtggccatcactgagctggcacaggtcggctttgcccttccactcttcatccaggtggtggacaaggatgagaatttgggcctgaacagcatgtttgaggtgtacttggtggggaacaactcccaccacttcatcatctccccgacctccgtccaggggaaggcggacattcgtattcgggtggccatcccactggactacgagaccgtggaccgctacgactttgatctctttgccaatgagagtgtgcctgaccatgtgggctatgccaaggtgaagatcactctcatcaatgaaaatgacaaccggcccatcttcagccagccactgtacaacatcagcctgtacgagaacgtcaccgtggggacctctgtgctgacagtcctggtgagtccccgcttcactgcagggccactgagctctccagggccgactgtggtgaggcacccagagggattttgtccaagggacctcagcaatcagggaaggaggcacccccaaatccctgagctgtgtttgttggtgtattaaataaagtttttggactctt

SEQ ID NO: 3630 - DNA, 3954 bp, Homo sapiens
  source 1..3954: mol_type = unassigned DNA; mol_type = unassigned DNA
gcggcggcggctcgggagagagggacgcgggctgcaggcgcgatgcttggctagaggacgcgtccgacggcggccggacgctgaggtggtcggggctagtcagcccggcctgggcatggagcgcggggtggcagagcctctggacgtttggggcgcgcccagtccgagcccccggcgcgcctgaagttgcgagcggcgagcggcgagcggcgagcggcccgcggagacccaggagctgccggcacgccgcggatgagccttcgcgccggcgggaagacgcggcggtggccagggccagagcaggcggcccgcgggggccgatccggcggagagcagagcccgaggcgaggcgaggcgcggcgccgctgcacacacgcacacggagccatggggcgccatgttgccaccagctgccacgtggcctggcttttggtgctgatctctggatgctggggccaggtgaaccggctgcccttcttcaccaaccacttctttgatacatacctgctgatcagcgaggacacgcctgtgggttcttctgtgacccagttgctggcccaagacatggacaatgaccccctggtgtttggcgtgtctggggaggaggcctctcgcttctttgcagtggagcctgacactggcgtggtgtggctccggcagccactggacagagagaccaagtcagagttcaccgtggagttctctgtcagcgaccaccagggggtgatcacacggaaggtgaacatccaggttggggatgtgaatgacaacgcgcccacatttcacaatcagccctacagcgtccgcatccctgagaatacaccagtggggacgcccatcttcatcgtgaatgccacagaccccgacttgggggcagggggcagcgtcctctactccttccagcccccctcccaattcttcgccattgacagcgcccgcggtatcgtcacagtgatccgggagctggactacgagaccacacaggcctaccagctcacggtcaacgccacagatcaagacaagaccaggcctctgtccaccctggccaacttggccatcatcatcacagatgtccaggacatggaccccatcttcatcaacctgccttacagcaccaacatctacgagcattctcctccgggcacgacggtgcgcatcatcaccgccatagaccaggataaaggacgtccccggggcattggctacaccatcgtttcagggaataccaacagcatctttgccctggactacatcagcggagtgctgaccttgaatggcctgctggaccgggagaaccccctgtacagccatggcttcatcctgactgtgaagggcacggagctgaacgatgaccgcaccccatctgacgctacagtcaccacgaccttcaatatcctggttattgacatcaatgacaatgccccggagttcaacagctccgagtacagcgtggccatcactgagctggcacaggtcggctttgcccttccactcttcatccaggtggtggacaaggatgagaatttgggcctgaacagcatgtttgaggtgtacttggtggggaacaactcccaccacttcatcatctccccgacctccgtccaggggaaggcggacattcgtattcgggtggccatcccactggactacgagaccgtggaccgctacgactttgatctctttgccaatgagagtgtgcctgaccatgtgggctatgccaaggtgaagatcactctcatcaatgaaaatgacaaccggcccatcttcagccagccactgtacaacatcagcctgtacgagaacgtcaccgtggggacctctgtgctgacagtcctggcaactgacaatgatgcaggcacctttggggaagtcagctacttcttcagtgatgaccctgacaggttctcgctggacaaggacacgggactcatcatgctgattgccaggctggactatgagctcatccagcgcttcaccctgacgatcattgcccgggacgggggcggcgaggagaccacaggccgggtcaggatcaatgtgttggatgtcaacgacaacgtgcccaccttccagaaggatgcctacgtgggtgctctgcgggagaacgagccttctgtcacacagctggtgcggctccgggcaacagatgaagactcccctcccaacaaccagatcacctacagcattgtcagtgcatctgcctttggcagctacttcgacatcagcctgtacgagggctatggagtgatcagcgtcagtcgccccctggattatgaacagatatccaatgggctgatttatctgacggtcatggccatggatgctggcaacccccctctcaacagcaccgtccctgtcaccatcgaggtgtttgatgagaatgacaaccctcccaccttcagcaagcccgcctacttcgtctccgtggtggagaacatcatggcaggagccacggtgctgttcctgaatgccacagacctggaccgctcccgggagtacggccaggagtccatcatctactccttggaaggctccacccagtttcggatcaatgcccgctcaggggaaatcaccaccacgtctctgcttgaccgagagaccaagtctgaatacatcctcatcgttcgcgcagtggacgggggtgtgggccacaaccagaaaactggcatcgccaccgtaaacatcaccctcctggacatcaatgacaaccaccccacgtggaaggacgcaccctactacatcaacctggtggagatgacccctccagactctgatgtgaccacggtggtggctgttgacccagacctgggggagaatggcaccctggtgtacagcatccagccacccaacaagttctacagcctcaacagcaccacgggcaagatccgcaccacccacgccatgctggaccgggagaaccccgacccccatgaggccgagctgatgcgcaaaatcgtcgtctctgttactgactgtggcaggccccctctgaaagccaccagcagtgccacagtgtttgtgaacctcttggatctcaatgacaatgaccccacctttcagaacctgccttttgtggccgaggtgcttgaaggcatcccggcgggggtctccatctaccaagtggtggccatcgacctcgatgagggcctgaacggcctggtgtcctaccgcatgccggtgggcatgccccgcatggacttcctcatcaacagcagcagcggcgtggtggtcaccaccaccgagctggaccgcgagcgcatcgcggagtaccagctgcgggtggtggccagtgatgcaggcacgcccaccaagagctccaccagcacgctcaccatccatgtgctggatgtgaacgacgagacgcccaccttcttcccggccgtgtacaatgtgtctgtgtccgaggacgtgccacgcgagttccgggtggtctggctgaactgcacggacaacgacgtgggcctcaatgcagagctcagctacttcatcacaggtgctgccccggcctccgcccacctgtgcaggcctcctggggccctgcctccacccctcccagatggacagccagactaggtgggggcaggtgagggtggaaaagaggtcagggctctactgttgggctttagcctctggtggtgcctcccgaggatttgctcctggctcttcccaagggctttgcagctggatcactctggactggctccctggggacctcctgaacctgttggttgcagggacggggagcatctaccaaggttcattctagagggaggtaaggccccatgattcctagggaggagccctgagccccactccccgccccaagtctgggtgacagagcagtgacttggaggaatgtggcctcatccttccttggggacctgttgagaattcccacctgtttagaggcagatggttttgatctccctaaatgaaatggttttagctcaaaaa

SEQ ID NO: 3631 - DNA, 4814 bp, Homo sapiens
  source 1..4814: mol_type = unassigned DNA; mol_type = unassigned DNA
cgcgggctgcaggcgcgatgcttggctagaggacgcgtccgacggcggccggacgctgaggtggtcggggctagtcagcccggcctgggcatggagcgcggggtggcagagcctctggacgtttggggcgcgcccagtccgagcccccggcgcgcctgaagttgcgagcggcgagcggcgagcggcgagcggcccgcggagacccaggagctgccggcacgccgcggatgagccttcgcgccggcgggaagacgcggcggtggccagggccagagcaggcggcccgcgggggccgatccggcggagagcagagcccgaggcgaggcgaggcgcggcgccgctgcacacacgcacacggagccatggggcgccatgttgccaccagctgccacgtggcctggcttttggtgctgatctctggatgctggggccaggtgaaccggctgcccttcttcaccaaccacttctttgatacatacctgctgatcagcgaggacacgcctgtgggttcttctgtgacccagttgctggcccaagacatggacaatgaccccctggtgtttggcgtgtctggggaggaggcctctcgcttctttgcagtggagcctgacactggcgtggtgtggctccggcagccactggacagagagaccaagtcagagttcaccgtggagttctctgtcagcgaccaccagggggtgatcacacggaaggtgaacatccaggttggggatgtgaatgacaacgcgcccacatttcacaatcagccctacagcgtccgcatccctgagaatacaccagtggggacgcccatcttcatcgtgaatgccacagaccccgacttgggggcagggggcagcgtcctctactccttccagcccccctcccaattcttcgccattgacagcgcccgcggtatcgtcacagtgatccgggagctggactacgagaccacacaggcctaccagctcacggtcaacgccacagatcaagacaagaccaggcctctgtccaccctggccaacttggccatcatcatcacagatgtccaggacatggaccccatcttcatcaacctgccttacagcaccaacatctacgagcattctcctccgggcacgacggtgcgcatcatcaccgccatagaccaggataaaggacgtccccggggcattggctacaccatcgtttcagggaataccaacagcatctttgccctggactacatcagcggagtgctgaccttgaatggcctgctggaccgggagaaccccctgtacagccatggcttcatcctgactgtgaagggcacggagctgaacgatgaccgcaccccatctgacgctacagtcaccacgaccttcaatatcctggttattgacatcaatgacaatgccccggagttcaacagctccgagtacagcgtggccatcactgagctggcacaggtcggctttgcccttccactcttcatccaggtggtggacaaggatgagaatttgggcctgaacagcatgtttgaggtgtacttggtggggaacaactcccaccacttcatcatctccccgacctccgtccaggggaaggcggacattcgtattcgggtggccatcccactggactacgagaccgtggaccgctacgactttgatctctttgccaatgagagtgtgcctgaccatgtgggctatgccaaggtgaagatcactctcatcaatgaaaatgacaaccggcccatcttcagccagccactgtacaacatcagcctgtacgagaacgtcaccgtggggacctctgtgctgacagtcctggcaactgacaatgatgcaggcacctttggggaagtcagctacttcttcagtgatgaccctgacaggttctcgctggacaaggacacgggactcatcatgctgattgccaggctggactatgagctcatccagcgcttcaccctgacgatcattgcccgggacgggggcggcgaggagaccacaggccgggtcaggatcaatgtgttggatgtcaacgacaacgtgcccaccttccagaaggatgcctacgtgggtgctctgcgggagaacgagccttctgtcacacagctggtgcggctccgggcaacagatgaagactcccctcccaacaaccagatcacctacagcattgtcagtgcatctgcctttggcagctacttcgacatcagcctgtacgagggctatggagtgatcagcgtcagtcgccccctggattatgaacagatatccaatgggctgatttatctgacggtcatggccatggatgctggcaacccccctctcaacagcaccgtccctgtcaccatcgaggtgtttgatgagaatgacaaccctcccaccttcagcaagcccgcctacttcgtctccgtggtggagaacatcatggcaggagccacggtgctgttcctgaatgccacagacctggaccgctcccgggagtacggccaggagtccatcatctactccttggaaggctccacccagtttcggatcaatgcccgctcaggggaaatcaccaccacgtctctgcttgaccgagagaccaagtctgaatacatcctcatcgttcgcgcagtggacgggggtgtgggccacaaccagaaaactggcatcgccaccgtaaacatcaccctcctggacatcaatgacaaccaccccacgtggaaggacgcaccctactacatcaacctggtggagatgacccctccagactctgatgtgaccacggtggtggctgttgacccagacctgggggagaatggcaccctggtgtacagcatccagccacccaacaagttctacagcctcaacagcaccacgggcaagatccgcaccacccacgccatgctggaccgggagaaccccgacccccatgaggccgagctgatgcgcaaaatcgtcgtctctgttactgactgtggcaggccccctctgaaagccaccagcagtgccacagtgtttgtgaacctcttggatctcaatgacaatgaccccacctttcagaacctgccttttgtggccgaggtgcttgaaggcatcccggcgggggtctccatctaccaagtggtggccatcgacctcgatgagggcctgaacggcctggtgtcctaccgcatgccggtgggcatgccccgcatggacttcctcatcaacagcagcagcggcgtggtggtcaccaccaccgagctggaccgcgagcgcatcgcggagtaccagctgcgggtggtggccagtgatgcaggcacgcccaccaagagctccaccagcacgctcaccatccatgtgctggatgtgaacgacgagacgcccaccttcttcccggccgtgtacaatgtgtctgtgtccgaggacgtgccacgcgagttccgggtggtctggctgaactgcacggacaacgacgtgggcctcaatgcagagctcagctacttcatcacaggtggcaacgtggatgggaagttcagcgtgggttaccgcgatgccgttgtgagaaccgtggtgggcctggaccgggagaccacagccgcctacatgctcatcctggaggccatcgacaacggccctgtagggaagcgacacacgggcacagccaccgtgttcgtcactgtcctggatgtgaatgacaaccggcccatctttctgcagagcagctatgaggccagcgtccctgaggacatccctgaaggccacagcatcttgcagctgaaagccacggacgcagatgagggcgagtttgggcgtgtgtggtaccgcatcctccatggtaaccatggcaacaacttccggatccatgtcagcaatgggctcctgatgcgagggccccggcccctggaccgggagcggaactcatcccacgtgctgatagtggaggcctacaaccacgacctgggccccatgcggagctccgtcagggtgattgtgtacgtggaggacatcaacgatgaggcccccgtgttcacacagcagcagtacagccgtctggggcttcgagagaccgcaggcattggaacgtcagtcatcgtggtccaagccacagaccgagactctggggatggtggcctggtgaactaccgcatcctgtcgggcgcagaggggaagtttgagattgacgagagcacagggcttatcatcaccgtgaattacctggactacgagaccaagaccagctacatgatgaatgtgtcggccactgaccaggccccgcccttcaaccagggcttctgcagcgtctacatcactctgctcaacgagctggacgaggccgtgcagttctccaatgcctcatacgaggctgccatcctggagaatctggcactgggtactgagattgtgcgggtccaggcctactccatcgacaacctcaaccaaatcacgtaccgcttcaacgcctacaccagcacccaggccaaagccctcttcaagatagacgccatcacggtgaggggctgggggcagggagcaccatttcttccaatctaaccaacattggttgagctccttctgtgtgcacagcactctcctctttgtcataaaatgtccttgagatggccaagtgtggtgttaggtacctgtagtcccagctgcttgagaggctggggcaggaagattgcttcagctcaggagtttggaggctgcagtgagctgcgtttgcaccactgcactccagcccgggcaacagagtgagaccttgtctcttacaaagaaacaaaaaaaagtccccgagatcaatatccctgtaacacatccattttcatatgtaggagtaagataaagtttatacctatg

SEQ ID NO: 3632 - DNA, 4475 bp, Homo sapiens
  source 1..4475: mol_type = unassigned DNA; mol_type = unassigned DNA
agacaagaccaggcctctgtccaccctggccaacttggccatcatcatcacagatgtccaggacatggaccccatcttcatcaacctgccttacagcaccaacatctacgagcattctcctccgggcacgacggtgcgcatcatcaccgccatagaccaggataaaggacgtccccggggcattggctacaccatcgtttcagggaataccaacagcatctttgccctggactacatcagcggagtgctgaccttgaatggcctgctggaccgggagaaccccctgtacagccatggcttcatcctgactgtgaagggcacggagctgaacgatgaccgcaccccatctgacgctacagtcaccacgaccttcaatatcctggttattgacatcaatgacaatgccccggagttcaacagctccgagtacagcgtggccatcactgagctggcacaggtcggctttgcccttccactcttcatccaggtggtggacaaggatgaggagaacggaggctggcttcagggccgaccggagggagtgggggaaggtctgcacgtgcagaatttgggcctgaacagcatgtttgaggtgtacttggtggggaacaactcccaccacttcatcatctccccgacctccgtccaggggaaggcggacattcgtattcgggtggccatcccactggactacgagaccgtggaccgctacgactttgatctctttgccaatgagagtgtgcctgaccatgtgggctatgccaaggtgaagatcactctcatcaatgaaaatgacaaccggcccatcttcagccagccactgtacaacatcagcctgtacgagaacgtcaccgtggggacctctgtgctgacagtcctggcaactgacaatgatgcaggcacctttggggaagtcagctacttcttcagtgatgaccctgacaggttctcgctggacaaggacacgggactcatcatgctgattgccaggctggactatgagctcatccagcgcttcaccctgacgatcattgcccgggacgggggcggcgaggagaccacaggccgggtcaggatcaatgtgttggatgtcaacgacaacgtgcccaccttccagaaggatgcctacgtgggtgctctgcgggagaacgagccttctgtcacacagctggtgcggctccgggcaacagatgaagactcccctcccaacaaccagatcacctacagcattgtcagtgcatctgcctttggcagctacttcgacatcagcctgtacgagggctatggagtgatcagcgtcagtcgccccctggattatgaacagatatccaatgggctgatttatctgacggtcatggccatggatgctggcaacccccctctcaacagcaccgtccctgtcaccatcgaggtgtttgatgagaatgacaaccctcccaccttcagcaagcccgcctacttcgtctccgtggtggagaacatcatggcaggagccacggtgctgttcctgaatgccacagacctggaccgctcccgggagtacggccaggagtccatcatctactccttggaaggctccacccagtttcggatcaatgcccgctcaggggaaatcaccaccacgtctctgcttgaccgagagaccaagtctgaatacatcctcatcgttcgcgcagtggacgggggtgtgggccacaaccagaaaactggcatcgccaccgtaaacatcaccctcctggacatcaatgacaaccaccccacgtggaaggacgcaccctactacatcaacctggtggagatgacccctccagactctgatgtgaccacggtggtggctgttgacccagacctgggggagaatggcaccctggtgtacagcatccagccacccaacaagttctacagcctcaacagcaccacgggcaagatccgcaccacccacgccatgctggaccgggagaaccccgacccccatgaggccgagctgatgcgcaaaatcgtcgtctctgttactgactgtggcaggccccctctgaaagccaccagcagtgccacagtgtttgtgaacctcttggatctcaatgacaatgaccccacctttcagaacctgccttttgtggccgaggtgcttgaaggcatcccggcgggggtctccatctaccaagtggtggccatcgacctcgatgagggcctgaacggcctggtgtcctaccgcatgccggtgggcatgccccgcatggacttcctcatcaacagcagcagcggcgtggtggtcaccaccaccgagctggaccgcgagcgcatcgcggagtaccagctgcgggtggtggccagtgatgcaggcacgcccaccaagagctccaccagcacgctcaccatccatgtgctggatgtgaacgacgagacgcccaccttcttcccggccgtgtacaatgtgtctgtgtccgaggacgtgccacgcgagttccgggtggtctggctgaactgcacggacaacgacgtgggcctcaatgcagagctcagctacttcatcacaggtggcaacgtggatgggaagttcagcgtgggttaccgcgatgccgttgtgagaaccgtggtgggcctggaccgggagaccacagccgcctacatgctcatcctggaggccatcgacaacggccctgtagggaagcgacacacgggcacagccaccgtgttcgtcactgtcctggatgtgaatgacaaccggcccatctttctgcagagcagctatgaggccagcgtccctgaggacatccctgaaggccacagcatcttgcaggcagcacccgccctggcctctgaagggagcctcctcgatcatcttcaatcccttcctgattgatcccaacgtgggtgccctgaagaggggccaccaagacggctgccaagaccatgcttggagagccctgtttgctcctcctcccagctggcacccaggcatctgttccaccaggagggaggcagctgctcccacagggcaccaggcagatgctggcagcacccgggaaacccaaggaagagagccccgaggttttgccccagcactgggccagcacagatgccaggacagtgtcttggccccggtgtaggctgagcatttcacttgactaaagggaacctttgccatttggcaacttctccatgctgggctttggcacctggagggcaaggcttctgtggcgagcgagggtgctgcttctaggaggtggttacgagccccaggttgtaccctgtggagcctcaggccaaaggcccagatgaccacgagtgcacatctcttgaccagaagtctttcatcaagcagcagcgagggggtctgcagagaggaaggtgctcttctgaggatcatctttgggaaagggcgctggcctgggcatgcaaggagcttcggggggtgagtgtgtgtcccagactgcttgggccactgtcttcctgcagcctgcagcaccggtctctgaagcaggaggatctacaggtagacctagggggatgtgggggcatgtttgtggacaccccattacatcttggtagattccatgtagtcacagtggctgcggttgtcctcggggcccggcaggggctgtcgagggacggtgggccggccatggcggaagctgtgcagggagaggcgcaaggagcccaggcgcttccagagccggagctggggctcactggggctcccagggtggtggggcatgcactcgtgagccctgcggcggctcgggtccagcgcggccggcttgcagagcgtcatgaacagcagacaggtggccagcaggaggaagatgcaggccagggcgatgagcatggggagggggtcagttgcctctgcaagggtcccgggagtgacgggagctgagagaaaggcgagggggctgatggctggggagctggcgaggctggggccctctgtgctcatggctcctgcaacagcaacaagacagaagctcaaaggcagatcagctggacccagggcagcgggtatagggaagacttacctagggaatgtggatgggggcaaggcactgttaaactggacagcatcatggccacatcacaggttaagacagcaaggtccagagacatcacaagtctaagtgtacacacagctgagcagtgatggagctgggcccaagctcaggccctcttcctgttccaccctgtgcccatctgccatgcagacaagagggcggtggcctgtccgcattttcaaatcaatcctcatgaatcatcacagggtcttaggcctggaaacttaagaccaactctgtcaataacttgctctgtggccaggaacgagttatggatggtaagaggccgcagctgccagggtccctagcagtaatctaataccaaagctgcaaactgggggcccacgggtgtgtttagttgggtccttgccatgtttttatcaatgtaattatgaatattttcaaaataataacagatttcac

SEQ ID NO: 3633 - DNA, 704 bp, Homo sapiens
  source 1..704: mol_type = unassigned DNA; mol_type = unassigned DNA
tgacaatgccccggagttcaacagctccgagtacagcgtggccatcactgagctggcacaggtcggctttgcccttccactcttcatccaggtggtggacaaggatgagggcctgaacagcatgtttgaggtgtacttggtggggaacaactcccaccacttcatcatctccccgacctccgtccaggggaaggcggacattcgtattcgggtggccatcccactggactacgagaccgtggaccgctacgactttgatctctttgccaatgagagtgtgcctgaccatgtgggctatgccaaggtgaagatcactctcatcaatgaaaatgacaaccggcccatcttcagccagccactgtacaacatcagcctgtacgagaacgtcaccgtggggacctctgtgctgacagtcctgtgggaaaagttcttttgcagtaattccagcagattctcatcggcccagttggttgtgtcatcctggaaccaattgtgattctggtatgccggggagggatcacactccccctagtggacccaggggttggggtcagccccgcctgaattacaccgtctgagaatggggaaggggcttctattctaagacaagggattgaatgctaagcagatccaagtggtagatgtgtgctacacaagctcagagtcttgcccagtcggtgctcaataaatgtcacggagtttaa

SEQ ID NO: 3634 - DNA, 7000 bp, Homo sapiens
  source 1..7000: mol_type = unassigned DNA; mol_type = unassigned DNA
cggacattcgtattcgggtggccatcccactggactacgagaccgtggaccgctacgactttgatctctttgccaatgagagtgtgcctgaccatgtgggctatgccaaggtgaagatcactctcatcaatgaaaatgacaaccggcccatcttcagccagccactgtacaacatcagcctgtacgagaacgtcaccgtggggacctctgtgctgacagtcctggcaactgacaatgatgcaggcacctttggggaagtcagctacttcttcagtgatgaccctgacaggttctcgctggacaaggacacgggactcatcatgctgattgccaggctggactatgagctcatccagcgcttcaccctgacgatcattgcccgggacgggggcggcgaggagaccacaggccgggtcaggatcaatgtgttggatgtcaacgacaacgtgcccaccttccagaaggatgcctacgtgggtgctctgcgggagaacgagccttctgtcacacagctggtgcggctccgggcaacagatgaagactcccctcccaacaaccagatcacctacagcattgtcagtgcatctgcctttggcagctacttcgacatcagcctgtacgagggctatggagtgatcagcgtcagtcgccccctggattatgaacagatatccaatgggctgatttatctgacggtcatggccatggatgctggcaacccccctctcaacagcaccgtccctgtcaccatcgaggtgtttgatgagaatgacaaccctcccaccttcagcaagcccgcctacttcgtctccgtggtggagaacatcatggcaggagccacggtgctgttcctgaatgccacagacctggaccgctcccgggagtacggccaggagtccatcatctactccttggaaggctccacccagtttcggatcaatgcccgctcaggggaaatcaccaccacgtctctgcttgaccgagagaccaagtctgaatacatcctcatcgttcgcgcagtggacgggggtgtgggccacaaccagaaaactggcatcgccaccgtaaacatcaccctcctggacatcaatgacaaccaccccacgtggaaggacgcaccctactacatcaacctggtggagatgacccctccagactctgatgtgaccacggtggtggctgttgacccagacctgggggagaatggcaccctggtgtacagcatccagccacccaacaagttctacagcctcaacagcaccacgggcaagatccgcaccacccacgccatgctggaccgggagaaccccgacccccatgaggccgagctgatgcgcaaaatcgtcgtctctgttactgactgtggcaggccccctctgaaagccaccagcagtgccacagtgtttgtgaacctcttggatctcaatgacaatgaccccacctttcagaacctgccttttgtggccgaggtgcttgaaggcatcccggcgggggtctccatctaccaagtggtggccatcgacctcgatgagggcctgaacggcctggtgtcctaccgcatgccggtgggcatgccccgcatggacttcctcatcaacagcagcagcggcgtggtggtcaccaccaccgagctggaccgcgagcgcatcgcggagtaccagctgcgggtggtggccagtgatgcaggcacgcccaccaagagctccaccagcacgctcaccatccatgtgctggatgtgaacgacgagacgcccaccttcttcccggccgtgtacaatgtgtctgtgtccgaggacgtgccacgcgagttccgggtggtctggctgaactgcacggacaacgacgtgggcctcaatgcagagctcagctacttcatcacaggtggcaacgtggatgggaagttcagcgtgggttaccgcgatgccgttgtgagaaccgtggtgggcctggaccgggagaccacagccgcctacatgctcatcctggaggccatcgacaacggccctgtagggaagcgacacacgggcacagccaccgtgttcgtcactgtcctggatgtgaatgacaaccggcccatctttctgcagagcagctatgaggccagcgtccctgaggacatccctgaaggccacagcatcttgcaggaagacttggcctccccctgcatatctcccgccccacccagaagggcctttcagagtagcggggagaaagagacgtcacaatttcccggaaaggagttgagaagagagccagggcccagcaaggcccagaacagagctgctttcacagagcccttggccgaggctcccctcttgggaagtaaacaggcacaagaagaaagggctcctttgcccagggagcaggcgcaacagctccaaggctcagagggagagaagggaggaccctgaaaacaatttgggtgtgcacccacacctctgcccagaggcctcagttgctgggtggggagggaggcccggagtgaatgagtctctttaccaactatggggtttccgactcggaggctgagccaaacagggaatctgggcctgcccactggggcaggctcccgggcttgggagggacagaagcgtgggaggctggcaatgctcccctccctgcatcgggaccaggaggcgggcaggaaagggctggggagcagggagctgactcccagaaacacagagagcccagaaagccctgaggatttgcgagagtgtggtggctagctccagaaggaggaagtagagggttctctcgatcagggcctcagcttgtgaggacttggagcatacccccctggcctggtgcctgaaacccaattgagagccctccccctcctggacttttccttcttcaggcctcagggcagcctcaacccccaccccaacctccaggaagacagtgcctagtggccagcagggcctgctggtgaggtggatggctacaggctgaatccagcctaggatttgcagggaggccccaggggaagcaaaccaggaagaggttactgagcaggaagggaggaaggaacaaaacccttagggaggaggcctgccccactttctaaacccaaagacttggtttctatttacacaatactactcttactgaaatcctagagccagcgagttaatatagggcagccctgagttctcccatttctcagggagaaatgcagcgtctcaggatgacttctccaaggtcctcttggtaagtttcttgtgaagccggactcactttttgagatcagattgacttggaaggaagggacagtgggcttctccaatagagcctgcttggagagaaatctttctagagtcatctgagggaagatgaggctctgtgttatgccagcttccaccaagactcctgcctcagagggtggggacacacccaggctgggccacgcttcactctgtacacagaagcctcatacttctgtgcacagaactggggagtcaaagtgaggggctggacaatgtctggctctctgcaagctcccaagctggtaggaaagagaagacatagacaaaaaggacccatgctgccaagagaatgttccttttcctccccaagagaggtaggagacagtaggggcggctccaggcaggagggcttcacagagtgggtgtgtgtgaagcataagccacagttagtgggtgacaggtctttcagttttcctggagttttggatcaagatgaggctagaaagattaattggagccagctcccagagggcactgcacactgcgctgaggagctttggctatatccatttggcattagggagccagtgaaggttttggagctggggagtggcaagccagagctcactccttggggagacgtggctggctgcactgtgggtcacagcaggatgggggtggggcagctttgtggtgggatcctggccagctgactgggacaggagctgggcagcccaggtcctccctctgcccacccttcaaatttgggacctgaccaaagtgtttaaccctcgcgttgtgaggagaggtcaagggtttgggattctgagaagcccatcctggggtgggactgctttgacgggtcatcagcaaagcactcaccaaaaccacagatagcatccctagtgtgggcaggacttgggaccccacagctgtcctggagaggtccagaccatcccaccctcggggaggctgccgctttccctgggtgaggtgtggagctgctgtgagctgtcctcctccgagtccaggtggcatcacctccagctgctggaaatgccctgcctcttgccactctgtcacagcacccgccctggcctctgaagggagcctcctcgatcatcttcaatcccttcctgattgatcccaacgtgggtgccctgaagaggggccaccaagacggctgccaagaccatgcttggagagccctgtttgctcctcctcccagctggcacccaggcatctgttccaccaggagggaggcagctgctcccacagggcaccaggcagatgctggcagcacccgggaaacccaaggaagagagccccgaggttttgccccagcactgggccagcacagatgccaggacagtgtcttggccccggtgtaggctgagcatttcacttgactaaagggaacctttgccatttggcaacttctccatgctgggctttggcacctggagggcaaggcttctgtggcgagcgagggtgctgcttctaggaggtggttacgagccccaggttgtaccctgtggagcctcaggccaaaggcccagatgaccacgagtgcacatctcttgaccagaagtctttcatcaagcagcagcgagggggtctgcagagaggaaggtgctcttctgaggatcatctttgggaaagggcgctggcctgggcatgcaaggagcttcggggggtgagtgtgtgtcccagactgcttgggccactgtcttcctgcagcctgcagcaccggtctctgaagcaggaggatctacaggtagacctagggggatgtgggggcatgtttgtggacaccccattacatcttggtagattccatgtagtcacagtggctgcggttgtcctcggggcccggcaggggctgtcgagggacggtgggccggccatggcggaagctgtgcagggagaggcgcaaggagcccaggcgcttccagagccggagctggggctcactggggctcccagggtggtggggcatgcactcgtgagccctgcggcggctcgggtccagcgcggccggcttgcagagcgtcatgaacagcagacaggtggccagcaggaggaagatgcaggccagggcgatgagcatggggagggggtcagttgcctctgcaagggtcccgggagtgacgggagctgagagaaaggcgagggggctgatggctggggagctggcgaggctggggccctctgtgctcatggctcctgcaacagcaacaagacagaagctcaaaggcagatcagctggacccagggcagcgggtatagggaagacttacctagggaatgtggatgggggcaaggcactgttaaactggacagcatcatggccacatcacaggttaagacagcaaggtccagagacatcacaagtctaagtgtacacacagctgagcagtgatggagctgggcccaagctcaggccctcttcctgttccaccctgtgcccatctgccatgcagacaagagggcggtggcctgtccgcattttcaaatcaatcctcatgaatcatcacagggtcttaggcctggaaacttaagaccaactctgtcaataacttgctctgtggccaggaacgagttatggatggtaagaggccgcagctgccagggtccctagcagtaatctaataccaaagctgcaaactgggggcccacgggtgtgtttagttgggtccttgccatgtttttatcaatgtaattatgaatattttcaaaataataacagatttcacaaaaatatatgggtgcctgaattctcttgaaatgtcagaatttcaccactggcattggcccatgttcctgcctcatccctgtgtctggggctgagcagccgctgccccctgtagacagggcactgacctccagctccccaccctcccccacaggcccaccacacaccttatttcacctgcctggccccgtggggattcctgtgactgcttccccatgcagtccaacttgctcccacgacaggtgggaaactgaggtccgaagaggggatttggcattagggagccagtgaaggttttagaggtggggagtgacaagccagagctcactccttgggaaggcttggctggctgcattgtgggtcacagtagggtggggtggggcagcttggtggtgggaaggccaaggccacattgtgagccaatggccaagtgaaggtcagaagcaggtctcctgactcctggccccatggccttgccacccctctggcccccagccctttcggagctcagtgagctgctctgggaacaggtgggaaataaacccacaaggagttgacaagggggctggaaaccccccagggacatcatacacctgacagggcatttcctttcccactgaagatcatcccattagacgcagtgcagcagacggtccttgtcgatggaaaaccaggctgagcttttggctcaatatgtctggggttgtaataaaaatgctcacagatcctggccagcagataacacatgaccagagggtacagatgagcagggccacctggagagcactggctgggccctctcaaggaagtggaggggcctcagcccagaatggtgctgtcagtgccggagtgcaggcccagtgtggtcagctctgtcagtttcccaagagaagccagaaatctggatttttttaaaggcaaacattctagacgtttaaatgttggcagctaattcaaatttgttgaaggcaagaaagaagagaggtggggtgggggagaacacagcaaaagccaaataaacttgatttcaaaataa

SEQ ID NO: 3635 - DNA, 1649 bp, Homo sapiens
  source 1..1649: mol_type = unassigned DNA
acaggaagtgtgcccctctctcaggcagctgctaacacctgtcttccttcaactcccacagacaacggccctgtagggaagcgacacacgggcacagccaccgtgttcgtcactgtcctggatgtgaatgacaaccggcccatctttctgcagagcagctatgaggccagcgtccctgaggacatccctgaaggccacagcatcttgcagctgaaagccacggacgcagatgagggcgagtttgggcgtgtgtggtaccgcatcctccatggtgattgtgtacgtggaggacatcaacgatgaggcccccgtgttcacacagcagcagtacagccgtctggggcttcgagagaccgcaggcattggaacgtcagtcatcgtggtccaagccacagaccgagactctggggatggtggcctggtgaactaccgcatcctgtcgggcgcagaggggaagtttgagattgacgagagcacagggcttatcatcaccgtgaattacctggactacgagaccaagaccagctacatgatgaatgtgtcggccactgaccaggccccgcccttcaaccagggcttctgcagcgtctacatcactctgctcaacgagctggacgaggccgtgcagttctccaatgcctcatacgaggctgccatcctggagaatctggcactgggtactgagattgtgcgggtccaggcctactccatcgacaacctcaaccaaatcacgtaccgcttcaacgcctacaccagcacccaggccaaagccctcttcaagatagacgccatcacgggtgtgatcacagtccagggcctggtggaccgtgagaagggcgacttctataccttgacagtggtggcagatgacggcggccccaaggtggactccaccgtggtctacatcactgtgctggacgagaatgacaacagcccccggtttgacttcacctccgactcggcggtcagcatacccgaggactgccctgtgggccagcgagtggctactgtcaaggcctgggaccctgatgctggcagcaatgggcaggtggtcttctccctggcctctggcaacatcgcgggggcctttgagatcgtcaccaccaatgactccattggcgaagtgtttgtggccaggcccctggacagagaagagctggatcactacatcctccaggttgtggcttctgaccgaggcacccctccacggaagaaggaccacatcctgcaggtgaccatcctggacatcaatgacaaccctccagtcatcgagagcccctttggatacaatgtcagtgtgaatgagaacgtgggtggaggtactgctgtggtccaggtgagagccactgaccgtgacatcgggatcaacagtgttctgtcctactacatcaccgagggcaacaaggacatggccttccgcatggaccgcatcagcggtgagatcgccacacggcctgccccgcctgaccgcgagcgccagagcttctaccacctggtggccactgtggaggacgagggcaccccaaccctgtcggtgagcgatgggggtggccacagggaggagcgggtgggccagggcagctccgcctccgagtgaggggaacaagatgggtgagaatggaattccacacagcaggcgaatccttgac

SEQ ID NO: 3636 - DNA, 4114 bp, Homo sapiens
  source 1..4114: mol_type = unassigned DNA
cacagaggtgcagagaggtgacataacttccccaacatcacctgcttagtaagcatcatgggaggggcagagccacgtgacccaagcttatgaggaggctgtgggcccaccccagccacaagtcccagattctactggggaccgtcatcctttgtggggattgggagggtttggccaggagcacccctgggaagggcagattttagggggttcttctcaggctgaacctggcctggtctggtccacaggatctgtaatggtgaagtcccccatgaatcgggagctggttgccacctatgaggtcactctctcagtgattgacaatgccagcgacctaccagagcgctctgtcagtgtgccaaatgccaagctgactgtcaacgtcctggacgtcaatgacaatacgccccagttcaagccctttgggatcacctactacatggagcggatcctggagggggccacccctgggaccacactcattgctgtggcagccgtggaccctgacaagggccttaatgggctggtcacctacaccctgctggacctggtgcccccagggtatgtccagctggaggactcctcggcagggaaggtcattgccaaccggacagtggactacgaggaggtgcactggctcaactttaccgtgagggcctcagacaacgggtccccgccccgggcagctgagatccctgtctacctggaaatcgtggacatcaatgacaacaaccccatctttgaccagccctcctaccaggaggctgtctttgaggatgtgcctgtgggcacaatcatcctgacagtcactgccactgatgctgactcaggcaactttgcactcattgagtacagccttggagatggagagagcaagtttgccatcaaccccaccacgggtgacatctatgtgctgtcttctctggaccgggagaagaaggaccactatatcctgactgccttggccaaagacaaccctggggatgtagccagcaaccgtcgcgaaaattcagtgcaggtggtgatccaagtgctggatgtcaatgactgccggccacagttctccaagccccagttcagcacaagcgtgtatgagaatgagccggcgggcacctcggtcatcaccatgatggccactgaccaggatgaaggtcccaatggagagttgacctactcacttgagggccctggcgtggaggccttccatgtggacatggactcgggcttggtgaccacacagcggccactgcagtcctacgagaagttcagtctgaccgtggtggccacagatggtggagagcccccactctggggcaccaccatgctcctggtggaggtcatcgacgtcaatgacaaccgccctgtctttgtgcgcccacccaacggcaccatcctccacatcagagaggagatcccgctgcgctccaacgtgtacgaggtctacgccacggacaaggatgagggcctcaacggggcggtgcgctacagcttcctgaagactgcgggcaaccgggactgggagttcttcatcatcgacccaatcagcggcctcatccagactgctcagcgcctggaccgcgagtcgcaggcggtgtacagcctcatcttggtggccagcgacctgggccagccagtgccatacgagactatgcagccgctgcaggtggccctggaggacatcgatgacaacgaaccccttttcgtgaggcctccaaaaggcagcccccagtaccagctgctgacagtgcctgagcactcaccacgcggcaccctcgtgggcaacgtgacaggcgcagtggatgcagatgagggccccaacgcgatcgtgtactacttcatcgcagccggcaacgaagagaagaacttccatctgcagcccgatgggtgtctgctggtgctgcgggacctggaccgggagcgagaagccatcttctccttcatcgtcaaggcctccagcaatcgcagctggacacctccccgtggaccctccccaaccctcgacctggttgctgacctcacactgcaggaggtgcgcgttgtgctagaggacatcaacgaccagccaccacgcttcaccaaggctgagtacactgcaggggtggccaccgacgccaaggtgggctcagagttgatccaggtgctggccctggatgcagacattggcaacaacagccttgtcttctacagcattctggccatccactacttccgggcccttgccaacgactctgaagatgtgggccaggtcttcaccatggggagcatggacggcattctgcgcaccttcgacctcttcatggcctacagccccggctacttcgtggtggacattgtggcccgagacctggcaggccacaacgacacggccatcatcggcatctacatcctgagggacgaccagcgcgtcaagatcgtcattaacgagatccccgaccgtgtgcgcggcttcgaggaggagttcatccacctgctctccaacatcactggggccattgtcaatactgacaatgtgcagttccatgtggacaagaagggccgggtgaactttgcgcagacagaactgcttatccacgtggtgaaccgcgataccaaccgcatcctggacgtggaccgggtgatccagatgatcgatgagaacaaggagcagctacggaatcttttccggaactacaacgtcctggacgtgcagcctgccatctctgtccggctgccggatgacatgtctgccctgcagatggcgatcatcgtcctggctatcctcctgttcctggccgccatgctctttgtcctcatgaactggtactacaggactgtacacaagaggaagctcaaggccattgtggctggctcagctgggaatcgtggcttcatcgacatcatggacatgcctaacaccaacaagtactcctttgatggagccaaccctgtgtggctggatcccttctgtcggaacctggagctggccgcccaggcggagcatgaggatgacctaccggagaacctgagtgagatcgccgacctgtggaacagccccacgcgcacccatggaacttttgggcgtgagccagcagctgtcaagcctgatgatgaccgatacctgcgggctgccatccaggagtatgacaacattgccaagctgggccagatcattcgtgaggggccaatcaagctgatacagactgagctggacgaggagccaggagaccacagcccagggcagggtagcctgcgcttccgccacaagccaccagtggagctcaaggggcccgatgggatccatgtggtgcacggcagcacgggcacgctgctggccaccgacctcaacagcctgcccgaggaagaccagaagggcctgggccgctcgctggagacgctgaccgctgccgaggccactgccttcgagcgcaacgcccgcacagaatccgccaaatccacacccctgcacaaacttcgcgacgtgatcatggagacccccctggagatcacagagctgtgactagacagggaagccttgtgggtgtgagcagcacccatccaccgtcccctcccagggagcaagggcagggacagggccggtcgggggggaccctccaaggccaggccttggggacaaccttggcttggccctggcagcccgcatcagctgctcagatcccacttttgccagacgctcattcagcatctgacctctaccttcataagatctgttatttttataagaaaaccaaacaaaaatgttaagcatctaaggacaaggtaaggagggtcactggggcccaagagtctggggaccagcttggctcaggctgagctgaaagaggccaaacaggccctcctccctcccagctccaccccgcaagcaccatcccctccggctaagcaggcgcaagggaggcccagcgcggacatcccctgctggccggacacccgactccagtccaagtctcgctacatttccgccacatccctctctgctggacgtccaggtggaggtggcatccccacgtggacaagaaagtcaatgtcaatgaacaagcattctctccatttcactggcttcccaaatgtgtgcccagcttataaacagaagtgactgatgttccctccggttttg

SEQ ID NO: 3637 - DNA, 4224 bp, Homo sapiens
  source 1..4224: mol_type = unassigned DNA
ccctgctgcaccctgaactaactgatgttaaccctcttctctcttcctcatggctggcaggcccacaggtttgagctctgtttctctgtcacttcccacctcatctcttctctgcctcaccccattgccttcctccatgcccaccacacccccaccacccttcctgtcctgtggggcctgggccaaggccgtggcccagcctttgcagactgaatgcagccgccctctccccatcctcgctccccagcctgggggacagggagcgagagtaggaagaggaggaggaggaggaggaggaggcggcccagggatctgtaatggtgaagtcccccatgaatcgggagctggttgccacctatgaggtcactctctcagtgattgacaatgccagcgacctaccagagcgctctgtcagtgtgccaaatgccaagctgactgtcaacgtcctggacgtcaatgacaatacgccccagttcaagccctttgggatcacctactacatggagcggatcctggagggggccacccctgggaccacactcattgctgtggcagccgtggaccctgacaagggccttaatgggctggtcacctacaccctgctggacctggtgcccccagggtatgtccagctggaggactcctcggcagggaaggtcattgccaaccggacagtggactacgaggaggtgcactggctcaactttaccgtgagggcctcagacaacgggtccccgccccgggcagctgagatccctgtctacctggaaatcgtggacatcaatgacaacaaccccatctttgaccagccctcctaccaggaggctgtctttgaggatgtgcctgtgggcacaatcatcctgacagtcactgccactgatgctgactcaggcaactttgcactcattgagtacagccttggagatggagagagcaagtttgccatcaaccccaccacgggtgacatctatgtgctgtcttctctggaccgggagaagaaggaccactatatcctgactgccttggccaaagacaaccctggggatgtagccagcaaccgtcgcgaaaattcagtgcaggtggtgatccaagtgctggatgtcaatgactgccggccacagttctccaagccccagttcagcacaagcgtgtatgagaatgagccggcgggcacctcggtcatcaccatgatggccactgaccaggatgaaggtcccaatggagagttgacctactcacttgagggccctggcgtggaggccttccatgtggacatggactcgggcttggtgaccacacagcggccactgcagtcctacgagaagttcagtctgaccgtggtggccacagatggtggagagcccccactctggggcaccaccatgctcctggtggaggtcatcgacgtcaatgacaaccgccctgtctttgtgcgcccacccaacggcaccatcctccacatcagagaggagatcccgctgcgctccaacgtgtacgaggtctacgccacggacaaggatgagggcctcaacggggcggtgcgctacagcttcctgaagactgcgggcaaccgggactgggagttcttcatcatcgacccaatcagcggcctcatccagactgctcagcgcctggaccgcgagtcgcaggcggtgtacagcctcatcttggtggccagcgacctgggccagccagtgccatacgagactatgcagccgctgcaggtggccctggaggacatcgatgacaacgaaccccttttcgtgaggcctccaaaaggcagcccccagtaccagctgctgacagtgcctgagcactcaccacgcggcaccctcgtgggcaacgtgacaggcgcagtggatgcagatgagggccccaacgcgatcgtgtactacttcatcgcagccggcaacgaagagaagaacttccatctgcagcccgatgggtgtctgctggtgctgcgggacctggaccgggagcgagaagccatcttctccttcatcgtcaaggcctccagcaatcgcagctggacacctccccgtggaccctccccaaccctcgacctggttgctgacctcacactgcaggaggtgcgcgttgtgctagaggacatcaacgaccagccaccacgcttcaccaaggctgagtacactgcaggggtggccaccgacgccaaggtgggctcagagttgatccaggtgctggccctggatgcagacattggcaacaacagccttgtcttctacagcattctggccatccactacttccgggcccttgccaacgactctgaagatgtgggccaggtcttcaccatggggagcatggacggcattctgcgcaccttcgacctcttcatggcctacagccccggctacttcgtggtggacattgtggcccgagacctggcaggccacaacgacacggccatcatcggcatctacatcctgagggacgaccagcgcgtcaagatcgtcattaacgagatccccgaccgtgtgcgcggcttcgaggaggagttcatccacctgctctccaacatcactggggccattgtcaatactgacaatgtgcagttccatgtggacaagaagggccgggtgaactttgcgcagacagaactgcttatccacgtggtgaaccgcgataccaaccgcatcctggacgtggaccgggtgatccagatgatcgatgagaacaaggagcagctacggaatcttttccggaactacaacgtcctggacgtgcagcctgccatctctgtccggctgccggatgacatgtctgccctgcagatggcgatcatcgtcctggctatcctcctgttcctggccgccatgctctttgtcctcatgaactggtactacaggactgtacacaagaggaagctcaaggccattgtggctggctcagctgggaatcgtggcttcatcgacatcatggacatgcctaacaccaacaagtactcctttgatggagccaaccctgtgtggctggatcccttctgtcggaacctggagctggccgcccaggcggagcatgaggatgacctaccggagaacctgagtgagatcgccgacctgtggaacagccccacgcgcacccatggaacttttgggcgtgagccagcagctgtcaagcctgatgatgaccgatacctgcgggctgccatccaggagtatgacaacattgccaagctgggccagatcattcgtgaggggccaatcaagctgatacagactgagctggacgaggagccaggagaccacagcccagggcagggtagcctgcgcttccgccacaagccaccagtggagctcaaggggcccgatgggatccatgtggtgcacggcagcacgggcacgctgctggccaccgacctcaacagcctgcccgaggaagaccagaagggcctgggccgctcgctggagacgctgaccgctgccgaggccactgccttcgagcgcaacgcccgcacagaatccgccaaatccacacccctgcacaaacttcgcgacgtgatcatggagacccccctggagatcacagagctgtgactagacagggaagccttgtgggtgtgagcagcacccatccaccgtcccctcccagggagcaagggcagggacagggccggtcgggggggaccctccaaggccaggccttggggacaaccttggcttggccctggcagcccgcatcagctgctcagatcccacttttgccagacgctcattcagcatctgacctctaccttcataagatctgttatttttataagaaaaccaaacaaaaatgttaagcatctaaggacaaggtaaggagggtcactggggcccaagagtctggggaccagcttggctcaggctgagctgaaagaggccaaacaggccctcctccctcccagctccaccccgcaagcaccatcccctccggctaagcaggcgcaagggaggcccagcgcggacatcccctgctggccggacacccgactccagtccaagtctcgctacatttccgccacatccctctctgctggacgtccaggtggaggtggcatccccacgtggacaagaaagtcaatgtcaatgaacaagcattctctccatttcactggcttcccaaatgtgtgcccagcttataaacagaagtgactgatgttccctccggttttgaatgtggagtgtttgtgtgtgttccttttttaaattaagttattccctc

SEQ ID NO: 3638 - DNA, 4329 bp, Homo sapiens
  source 1..4329: mol_type = unassigned DNA
ccctgctgcaccctgaactaactgatgttaaccctcttctctcttcctcatggctggcaggcccacaggtttgagctctgtttctctgtcacttcccacctcatctcttctctgcctcaccccattgccttcctccatgcccaccacacccccaccacccttcctgtcctgtggggcctgggccaaggccgtggcccagcctttgcagactgaatgcagccgccctctccccatcctcgctccccagcctgggggacagggagcgagagtaggaagaggaggaggaggaggaggaggaggcggcccagggatctgtaatggtgaagtcccccatgaatcgggagctggttgccacctatgaggtcactctctcagtgattgacaatgccagcgacctaccagagcgctctgtcagtgtgccaaatgccaagctgactgtcaacgtcctggacgtcaatgacaatacgccccagttcaagccctttgggatcacctactacatggagcggatcctggagggggccacccctgggaccacactcattgctgtggcagccgtggaccctgacaagggccttaatgggctggtcacctacaccctgctggacctggtgcccccagggtatgtccagctggaggactcctcggcagggaaggtcattgccaaccggacagtggactacgaggaggtgcactggctcaactttaccgtgagggcctcagacaacgggtccccgccccgggcagctgagatccctgtctacctggaaatcgtggacatcaatgacaacaaccccatctttgaccagccctcctaccaggaggctgtctttgaggatgtgcctgtgggcacaatcatcctgacagtcactgccactgatgctgactcaggcaactttgcactcattgagtacagccttggagatggagagagcaagtttgccatcaaccccaccacgggtgacatctatgtgctgtcttctctggaccgggagaagaaggaccactatatcctgactgccttggccaaagacaaccctggggatgtagccagcaaccgtcgcgaaaattcagtgcaggtggtgatccaagtgctggatgtcaatgactgccggccacagttctccaagccccagttcagcacaagcgtgtatgagaatgagccggcgggcacctcggtcatcaccatgatggccactgaccaggatgaaggtcccaatggagagttgacctactcacttgagggccctggcgtggaggccttccatgtggacatggactcgggcttggtgaccacacagcggccactgcagtcctacgagaagttcagtctgaccgtggtggccacagatggtggagagcccccactctggggcaccaccatgctcctggtggaggtcatcgacgtcaatgacaaccgccctgtctttgtgcgcccacccaacggcaccatcctccacatcagagaggagatcccgctgcgctccaacgtgtacgaggtctacgccacggacaaggatgagggcctcaacggggcggtgcgctacagcttcctgaagactgcgggcaaccgggactgggagttcttcatcatcgacccaatcagcggcctcatccagactgctcagcgcctggaccgcgagtcgcaggcggtgtacagcctcatcttggtggccagcgacctgggccagccagtgccatacgagactatgcagccgctgcaggtggccctggaggacatcgatgacaacgaaccccttttcgtgaggcctccaaaaggcagcccccagtaccagctgctgacagtgcctgagcactcaccacgcggcaccctcgtgggcaacgtgacaggcgcagtggatgcagatgagggccccaacgcgatcgtgtactacttcatcgcagccggcaacgaagagaagaacttccatctgcagcccgatgggtgtctgctggtgctgcgggacctggaccgggagcgagaagccatcttctccttcatcgtcaaggcctccagcaatcgcagctggacacctccccgtggaccctccccaaccctcgacctggttgctgacctcacactgcaggaggtgcgcgttgtgctagaggacatcaacgaccagccaccacgcttcaccaaggctgagtacactgcaggggtggccaccgacgccaaggtgggctcagagttgatccaggtgctggccctggatgcagacattggcaacaacagccttgtcttctacagcattctggccatccactacttccgggcccttgccaacgactctgaagatgtgggccaggtcttcaccatggggagcatggacggcattctgcgcaccttcgacctcttcatggcctacagccccggctacttcgtggtggacattgtggcccgagacctggcaggccacaacgacacggccatcatcggcatctacatcctgagggacgaccagcgcgtcaagatcgtcattaacgagatccccgaccgtgtgcgcggcttcgaggaggagttcatccacctgctctccaacatcactggggccattgtcaatactgacaatgtgcagttccatgtggacaagaagggccgggtgaactttgcgcagacagaactgcttatccacgtggtgaaccgcgataccaaccgcatcctggacgtggaccgggtgatccagatgatcgatgagaacaaggagcagctacggaatcttttccggaactacaacgtcctggacgtgcagcctgccatctctgtccggctgccggatgacatgtctgccctgcagatggcgatcatcgtcctggctatcctcctgttcctggccgccatgctctttgtcctcatgaactggtactacaggactgtacacaagaggaagctcaaggccattgtggctggctcagctgggaatcgtggcttcatcgacatcatggacatgcctaacaccaacaagtactcctttgatggagccaaccctgtgtggctggatcccttctgtcggaacctggagctggccgcccaggcggagcatgaggatgacctaccggagaacctgagtgagatcgccgacctgtggaacagccccacgcgcacccatggaacttttgggcgtgagccagcagctgtcaagcctgatgatgaccgatacctgcgggctgccatccaggagtatgacaacattgccaagctgggccagatcattcgtgaggggccaatcaagggctcgctgctgaaggtggtcctggaggattacctgcggctcaaaaagctctttgcacagcggatggtgcaaaaagcctcctcctgccactcctccatctctgagctgatacagactgagctggacgaggagccaggagaccacagcccagggcagggtagcctgcgcttccgccacaagccaccagtggagctcaaggggcccgatgggatccatgtggtgcacggcagcacgggcacgctgctggccaccgacctcaacagcctgcccgaggaagaccagaagggcctgggccgctcgctggagacgctgaccgctgccgaggccactgccttcgagcgcaacgcccgcacagaatccgccaaatccacacccctgcacaaacttcgcgacgtgatcatggagacccccctggagatcacagagctgtgactagacagggaagccttgtgggtgtgagcagcacccatccaccgtcccctcccagggagcaagggcagggacagggccggtcgggggggaccctccaaggccaggccttggggacaaccttggcttggccctggcagcccgcatcagctgctcagatcccacttttgccagacgctcattcagcatctgacctctaccttcataagatctgttatttttataagaaaaccaaacaaaaatgttaagcatctaaggacaaggtaaggagggtcactggggcccaagagtctggggaccagcttggctcaggctgagctgaaagaggccaaacaggccctcctccctcccagctccaccccgcaagcaccatcccctccggctaagcaggcgcaagggaggcccagcgcggacatcccctgctggccggacacccgactccagtccaagtctcgctacatttccgccacatccctctctgctggacgtccaggtggaggtggcatccccacgtggacaagaaagtcaatgtcaatgaacaagcattctctccatttcactggcttcccaaatgtgtgcccagcttataaacagaagtgactgatgttccctccggttttgaatgtggagtgtttgtgtgtgttccttttttaaattaagttattccctc

SEQ ID NO: 3639 - DNA, 11122 bp, Homo sapiens
  source 1..11122: mol_type = unassigned DNA
gcggcggcggcggctcgggagagagggacgcgggctgcaggcgcgatgcttggctagaggacgcgtccgacggcggccggacgctgaggtggtcggggctagtcagcccggcctgggcatggagcgcggggtggcagagcctctggacgtttggggcgcgcccagtccgagcccccggcgcgcctgaagttgcgagcggcgagcggcgagcggcgagcggcccgcggagacccaggagctgccggcacgccgcggatgagccttcgcgccggcgggaagacgcggcggtggccagggccagagcaggcggcccgcgggggccgatccggcggagagcagagcccgaggcgaggcgaggcgcggcgccgctgcacacacgcacacggagccatggggcgccatgttgccaccagctgccacgtggcctggcttttggtgctgatctctggatgctggggccaggtgaaccggctgcccttcttcaccaaccacttctttgatacatacctgctgatcagcgaggacacgcctgtgggttcttctgtgacccagttgctggcccaagacatggacaatgaccccctggtgtttggcgtgtctggggaggaggcctctcgcttctttgcagtggagcctgacactggcgtggtgtggctccggcagccactggacagagagaccaagtcagagttcaccgtggagttctctgtcagcgaccaccagggggtgatcacacggaaggtgaacatccaggttggggatgtgaatgacaacgcgcccacatttcacaatcagccctacagcgtccgcatccctgagaatacaccagtggggacgcccatcttcatcgtgaatgccacagaccccgacttgggggcagggggcagcgtcctctactccttccagcccccctcccaattcttcgccattgacagcgcccgcggtatcgtcacagtgatccgggagctggactacgagaccacacaggcctaccagctcacggtcaacgccacagatcaagacaagaccaggcctctgtccaccctggccaacttggccatcatcatcacagatgtccaggacatggaccccatcttcatcaacctgccttacagcaccaacatctacgagcattctcctccgggcacgacggtgcgcatcatcaccgccatagaccaggataaaggacgtccccggggcattggctacaccatcgtttcagggaataccaacagcatctttgccctggactacatcagcggagtgctgaccttgaatggcctgctggaccgggagaaccccctgtacagccatggcttcatcctgactgtgaagggcacggagctgaacgatgaccgcaccccatctgacgctacagtcaccacgaccttcaatatcctggttattgacatcaatgacaatgccccggagttcaacagctccgagtacagcgtggccatcactgagctggcacaggtcggctttgcccttccactcttcatccaggtggtggacaaggatgagacccagggcctgaacagcatgtttgaggtgtacttggtggggaacaactcccaccacttcatcatctccccgacctccgtccaggggaaggcggacattcgtattcgggtggccatcccactggactacgagaccgtggaccgctacgactttgatctctttgccaatgagagtgtgcctgaccatgtgggctatgccaaggtgaagatcactctcatcaatgaaaatgacaaccggcccatcttcagccagccactgtacaacatcagcctgtacgagaacgtcaccgtggggacctctgtgctgacagtcctggcaactgacaatgatgcaggcacctttggggaagtcagctacttcttcagtgatgaccctgacaggttctcgctggacaaggacacgggactcatcatgctgattgccaggctggactatgagctcatccagcgcttcaccctgacgatcattgcccgggacgggggcggcgaggagaccacaggccgggtcaggatcaatgtgttggatgtcaacgacaacgtgcccaccttccagaaggatgcctacgtgggtgctctgcgggagaacgagccttctgtcacacagctggtgcggctccgggcaacagatgaagactcccctcccaacaaccagatcacctacagcattgtcagtgcatctgcctttggcagctacttcgacatcagcctgtacgagggctatggagtgatcagcgtcagtcgccccctggattatgaacagatatccaatgggctgatttatctgacggtcatggccatggatgctggcaacccccctctcaacagcaccgtccctgtcaccatcgaggtgtttgatgagaatgacaaccctcccaccttcagcaagcccgcctacttcgtctccgtggtggagaacatcatggcaggagccacggtgctgttcctgaatgccacagacctggaccgctcccgggagtacggccaggagtccatcatctactccttggaaggctccacccagtttcggatcaatgcccgctcaggggaaatcaccaccacgtctctgcttgaccgagagaccaagtctgaatacatcctcatcgttcgcgcagtggacgggggtgtgggccacaaccagaaaactggcatcgccaccgtaaacatcaccctcctggacatcaatgacaaccaccccacgtggaaggacgcaccctactacatcaacctggtggagatgacccctccagactctgatgtgaccacggtggtggctgttgacccagacctgggggagaatggcaccctggtgtacagcatccagccacccaacaagttctacagcctcaacagcaccacgggcaagatccgcaccacccacgccatgctggaccgggagaaccccgacccccatgaggccgagctgatgcgcaaaatcgtcgtctctgttactgactgtggcaggccccctctgaaagccaccagcagtgccacagtgtttgtgaacctcttggatctcaatgacaatgaccccacctttcagaacctgccttttgtggccgaggtgcttgaaggcatcccggcgggggtctccatctaccaagtggtggccatcgacctcgatgagggcctgaacggcctggtgtcctaccgcatgccggtgggcatgccccgcatggacttcctcatcaacagcagcagcggcgtggtggtcaccaccaccgagctggaccgcgagcgcatcgcggagtaccagctgcgggtggtggccagtgatgcaggcacgcccaccaagagctccaccagcacgctcaccatccatgtgctggatgtgaacgacgagacgcccaccttcttcccggccgtgtacaatgtgtctgtgtccgaggacgtgccacgcgagttccgggtggtctggctgaactgcacggacaacgacgtgggcctcaatgcagagctcagctacttcatcacaggtggcaacgtggatgggaagttcagcgtgggttaccgcgatgccgttgtgagaaccgtggtgggcctggaccgggagaccacagccgcctacatgctcatcctggaggccatcgacaacggccctgtagggaagcgacacacgggcacagccaccgtgttcgtcactgtcctggatgtgaatgacaaccggcccatctttctgcagagcagctatgaggccagcgtccctgaggacatccctgaaggccacagcatcttgcagctgaaagccacggacgcagatgagggcgagtttgggcgtgtgtggtaccgcatcctccatggtaaccatggcaacaacttccggatccatgtcagcaatgggctcctgatgcgagggccccggcccctggaccgggagcggaactcatcccacgtgctgatagtggaggcctacaaccacgacctgggccccatgcggagctccgtcagggtgattgtgtacgtggaggacatcaacgatgaggcccccgtgttcacacagcagcagtacagccgtctggggcttcgagagaccgcaggcattggaacgtcagtcatcgtggtccaagccacagaccgagactctggggatggtggcctggtgaactaccgcatcctgtcgggcgcagaggggaagtttgagattgacgagagcacagggcttatcatcaccgtgaattacctggactacgagaccaagaccagctacatgatgaatgtgtcggccactgaccaggccccgcccttcaaccagggcttctgcagcgtctacatcactctgctcaacgagctggacgaggccgtgcagttctccaatgcctcatacgaggctgccatcctggagaatctggcactgggtactgagattgtgcgggtccaggcctactccatcgacaacctcaaccaaatcacgtaccgcttcaacgcctacaccagcacccaggccaaagccctcttcaagatagacgccatcacgggtgtgatcacagtccagggcctggtggaccgtgagaagggcgacttctataccttgacagtggtggcagatgacggcggccccaaggtggactccaccgtgcaggtctacatcactgtgctggacgagaatgacaacagcccccggtttgacttcacctccgactcggcggtcagcatacccgaggactgccctgtgggccagcgagtggctactgtcaaggcctgggaccctgatgctggcagcaatgggcaggtggtcttctccctggcctctggcaacatcgcgggggcctttgagatcgtcaccaccaatgactccattggcgaagtgtttgtggccaggcccctggacagagaagagctggatcactacatcctccaggttgtggcttctgaccgaggcacccctccacggaagaaggaccacatcctgcaggtgaccatcctggacatcaatgacaaccctccagtcatcgagagcccctttggatacaatgtcagtgtgaatgagaacgtgggtggaggtactgctgtggtccaggtgagagccactgaccgtgacatcgggatcaacagtgttctgtcctactacatcaccgagggcaacaaggacatggccttccgcatggaccgcatcagcggtgagatcgccacacggcctgccccgcctgaccgcgagcgccagagcttctaccacctggtggccactgtggaggacgagggcaccccaaccctgtcggccaccacgcacgtgtacgtgaccattgtggatgagaatgataacgcgcccatgttccagcagccccactatgaggtgctgctggatgagggcccagacacgctcaacaccagcctcatcaccatccaggcactggacctggatgagggtcccaacggcacagtcacctatgccatcgtcgcaggcaacatcgtcaacaccttccgcatcgacagacacatgggtgtcatcactgctgccaaagagctggactacgagatcagccacggccgctacaccctgatcgtcactgccacagaccagtgccccatcttatcccaccgcctcacctctaccaccacggtgcttgtgaatgtgaatgacatcaacgacaatgtgcctaccttcccccgggactatgagggaccatttgaagtcactgagggccagccggggcccagagtgtggaccttcctggcccatgaccgagactcaggacccaacgggcaggtggagtacagcatcatggatggagaccctctgggggagtttgtgatctctcctgtggagggggtgctaagggtccggaaggacgtggagctggaccgggagaccatcgccttctacaacctgaccatctgtgcccgtgaccgggggatgcccccactcagctccacaatgctggtggggatccgggtgctggacatcaacgacaacgaccctgtgctgctgaacctgcccatgaacatcaccatcagcgagaacagccctgtctccagctttgtcgcccatgtcctggccagtgacgctgacagtggctgcaatgcacgcctcaccttcaacatcactgcgggcaaccgcgagcgggccttcttcatcaatgccacgacagggatcgtcactgtgaaccggcccctggaccgcgagcggatcccagagtacaagctgaccatttctgtgaaggacaacccggagaatccacgcatagccaggagggattatgacttgcttctgatcttcctttctgatgagaatgacaaccaccccctcttcactaaaagcacctaccaggcagaggtgatggaaaactctcccgctggcacccctctcacggtgctcaatgggcccatcctggccctggatgcagaccaagacatctacgccgtggtgacctaccagctgctgggtgcccagagtggcctctttgacatcaacagcagcaccggtgtggtgaccgtgaggtcaggtgtcatcattgaccgggaggcattctcgccacccatcctggagctgctgctgctggctgaggacatcgggctgctcaacagcacggcccacctgctcatcaccatcctggatgacaatgacaaccggcccacctttagccctgccaccctcactgtccatctgctagagaactgcccgcctggattctcagtccttcaagtcacagccacagatgaggacagtggcctcaatggggagctggtctaccgaatagaagctggggctcaggaccgcttcctcattcatctggtcaccggggtcatccgtgttggtaatgccaccatcgacagagaggagcaggagtcctacaggctaacggtggtggccaccgaccggggcaccgttcctctctcgggcacagccattgtcaccattctgatcgatgacatcaatgactcccgccccgagttcctcaaccccatccagacagtgagcgtgctggagtcggctgagccaggcactgtcattgccaatatcacggccattgaccacgacctcaacccaaagctagagtaccacattgtcggcattgtggccaaggacgacactgatcgcctggtgcccaaccaggaggacgcctttgctgtgaatatcaacacaggatctgtaatggtgaagtcccccatgaatcgggagctggttgccacctatgaggtcactctctcagtgattgacaatgccagcgacctaccagagcgctctgtcagtgtgccaaatgccaagctgactgtcaacgtcctggacgtcaatgacaatacgccccagttcaagccctttgggatcacctactacatggagcggatcctggagggggccacccctgggaccacactcattgctgtggcagccgtggaccctgacaagggccttaatgggctggtcacctacaccctgctggacctggtgcccccagggtatgtccagctggaggactcctcggcagggaaggtcattgccaaccggacagtggactacgaggaggtgcactggctcaactttaccgtgagggcctcagacaacgggtccccgccccgggcagctgagatccctgtctacctggaaatcgtggacatcaatgacaacaaccccatctttgaccagccctcctaccaggaggctgtctttgaggatgtgcctgtgggcacaatcatcctgacagtcactgccactgatgctgactcaggcaactttgcactcattgagtacagccttggagatggagagagcaagtttgccatcaaccccaccacgggtgacatctatgtgctgtcttctctggaccgggagaagaaggaccactatatcctgactgccttggccaaagacaaccctggggatgtagccagcaaccgtcgcgaaaattcagtgcaggtggtgatccaagtgctggatgtcaatgactgccggccacagttctccaagccccagttcagcacaagcgtgtatgagaatgagccggcgggcacctcggtcatcaccatgatggccactgaccaggatgaaggtcccaatggagagttgacctactcacttgagggccctggcgtggaggccttccatgtggacatggactcgggcttggtgaccacacagcggccactgcagtcctacgagaagttcagtctgaccgtggtggccacagatggtggagagcccccactctggggcaccaccatgctcctggtggaggtcatcgacgtcaatgacaaccgccctgtctttgtgcgcccacccaacggcaccatcctccacatcagagaggagatcccgctgcgctccaacgtgtacgaggtctacgccacggacaaggatgagggcctcaacggggcggtgcgctacagcttcctgaagactgcgggcaaccgggactgggagttcttcatcatcgacccaatcagcggcctcatccagactgctcagcgcctggaccgcgagtcgcaggcggtgtacagcctcatcttggtggccagcgacctgggccagccagtgccatacgagactatgcagccgctgcaggtggccctggaggacatcgatgacaacgaaccccttttcgtgaggcctccaaaaggcagcccccagtaccagctgctgacagtgcctgagcactcaccacgcggcaccctcgtgggcaacgtgacaggcgcagtggatgcagatgagggccccaacgcgatcgtgtactacttcatcgcagccggcaacgaagagaagaacttccatctgcagcccgatgggtgtctgctggtgctgcgggacctggaccgggagcgagaagccatcttctccttcatcgtcaaggcctccagcaatcgcagctggacacctccccgtggaccctccccaaccctcgacctggttgctgacctcacactgcaggaggtgcgcgttgtgctagaggacatcaacgaccagccaccacgcttcaccaaggctgagtacactgcaggggtggccaccgacgccaaggtgggctcagagttgatccaggtgctggccctggatgcagacattggcaacaacagccttgtcttctacagcattctggccatccactacttccgggcccttgccaacgactctgaagatgtgggccaggtcttcaccatggggagcatggacggcattctgcgcaccttcgacctcttcatggcctacagccccggctacttcgtggtggacattgtggcccgagacctggcaggccacaacgacacggccatcatcggcatctacatcctgagggacgaccagcgcgtcaagatcgtcattaacgagatccccgaccgtgtgcgcggcttcgaggaggagttcatccacctgctctccaacatcactggggccattgtcaatactgacaatgtgcagttccatgtggacaagaagggccgggtgaactttgcgcagacagaactgcttatccacgtggtgaaccgcgataccaaccgcatcctggacgtggaccgggtgatccagatgatcgatgagaacaaggagcagctacggaatcttttccggaactacaacgtcctggacgtgcagcctgccatctctgtccggctgccggatgacatgtctgccctgcagatggcgatcatcgtcctggctatcctcctgttcctggccgccatgctctttgtcctcatgaactggtactacaggactgtacacaagaggaagctcaaggccattgtggctggctcagctgggaatcgtggcttcatcgacatcatggacatgcctaacaccaacaagtactcctttgatggagccaaccctgtgtggctggatcccttctgtcggaacctggagctggccgcccaggcggagcatgaggatgacctaccggagaacctgagtgagatcgccgacctgtggaacagccccacgcgcacccatggaacttttgggcgtgagccagcagctgtcaagcctgatgatgaccgatacctgcgggctgccatccaggagtatgacaacattgccaagctgggccagatcattcgtgaggggccaatcaagggctcgctgctgaaggtggtcctggaggattacctgcggctcaaaaagctctttgcacagcggatggtgcaaaaagcctcctcctgccactcctccatctctgagctgatacagactgagctggacgaggagccaggagaccacagcccagggcagggtagcctgcgcttccgccacaagccaccagtggagctcaaggggcccgatgggatccatgtggtgcacggcagcacgggcacgctgctggccaccgacctcaacagcctgcccgaggaagaccagaagggcctgggccgctcgctggagacgctgaccgctgccgaggccactgccttcgagcgcaacgcccgcacagaatccgccaaatccacacccctgcacaaacttcgcgacgtgatcatggagacccccctggagatcacagagctgtgactagacagggaagccttgtgggtgtgagcagcacccatccaccgtcccctcccagggagcaagggcagggacagggccggtcgggggggaccctccaaggccaggccttggggacaaccttggcttggccctggcagcccgcatcagctgctcagatcccacttttgccagacgctcattcagcatctgacctctaccttcataagatctgttatttttataagaaaaccaaacaaaaatgttaagcatctaaggacaaggtaaggagggtcactggggcccaagagtctggggaccagcttggctcaggctgagctgaaagaggccaaacaggccctcctccctcccagctccaccccgcaagcaccatcccctccggctaagcaggcgcaagggaggcccagcgcggacatcccctgctggccggacacccgactccagtccaagtctcgctacatttccgccacatccctctctgctggacgtccaggtggaggtggcatccccacgtggacaagaaagtcaatgtcaatgaacaagcattctctccatttcactggcttcccaaatgtgtgcccagcttataaacagaagtgactgatgttccctccggttttgaatgtggagtgtttgtgtgtgttccttttttaaattaagttattccctc

SEQ ID NO: 3640 - DNA, 1759 bp, Homo sapiens
  source 1..1759: mol_type = unassigned DNA
cgggagagagggacgcgggctgcaggcgcgatgcttggctagaggacgcgtccgacggcggccggacgctgaggtggtcggggctagtcagcccggcctgggcatggagcgcggggtggcagagcctctggacgtttggggcgcgcccagtccgagcccccggcgcgcctgaagttgcgagcggcgagcggcgagcggcgagcggcccgcggagacccaggagctgccggcacgccgcggatgagccttcgcgccggcgggaagacgcggcggtggccagggccagagcaggcggcccgcgggggccgatccggcggagagcagagcccgaggcgaggcgaggcgcggcgccgctgcacacacgcacacggttcttctgtgacccagttgctggcccaagacatggacaatgaccccctggtgtttggcgtgtctggggaggaggcctctcgcttctttgcagtggagcctgacactggcgtggtgtggctccggcagccactggacagagagaccaagtcagagttcaccgtggagttctctgtcagcgaccaccagggggtgatcacacggaaggtgaacatccaggttggggatgtgaatgacaacgcgcccacatttcacaatcagccctacagcgtccgcatccctgagaatacaccagtggggacgcccatcttcatcgtgaatgccacagaccccgacttgggggcagggggcagcgtcctctactccttccagcccccctcccaattcttcgccattgacagcgcccgcggtatcgtcacagtgatccgggagctggactacgagaccacacaggcctaccagctcacggtcaacgccttggccatcatcatcaccaacctgccttacagcaccaacatctacgagcattctcctccgggcacgacggtgcgcatcatcaccgccatagaccaggataaaggacgtccccggggcattggctacaccatcgtttcagggaataccaacagcatctttgccctggactacatcagcggagtgctgaccttgaatggcctgctggaccgggagaaccccctgtacagccatggcttcatcctgactgtgaagggcacggagctgaacgatgaccgcaccccatctgacgctacagtcaccacgaccttcaatatcctggttattgacatcaatgacaatgccccggagttcaacagctccgagtacagcgtggccatcactgagctggcacaggtcggctttgcccttccactcttcatccaggtggtggacaaggatgagggcctgaacagcatgtttgaggtgtacttggtggggaacaactcccaccacttcatcatctccccgacctccgtccaggggaaggcggacattcgtattcgggtggccatcccactggactacgagaccgtggaccgctacgactttgatctctttgccaatgagagtgtgcctgaccatgtgggctatgccaaggtgaagatcactctcatcaatgaaaatgacaaccggcccatcttcagccagccactgtacaacatcagcctgtacgagaacgtcaccgtggggacctctgtgctgacagtcctggtgagtccccgcttcactgcagggccactgagctctccagggccgactgtggtgaggcacccagagggattttgtccaagggacctcagcaatcagggaaggaggcacccccaaatccctgagctgtgtttgttggtgtattaaataaagtttttggactctt

SEQ ID NO: 3641 - DNA, 4533 bp, Homo sapiens
  source 1..4533: mol_type = unassigned DNA
gcggcggcggcggctcgggagagagggacgcgggctgcaggcgcgatgcttggctagaggacgcgtccgacggcggccggacgctgaggtggtcggggctagtcagcccggcctgggcatggagcgcggggtggcagagcctctggacgtttggggcgcgcccagtccgagcccccggcgcgcctgaagttgcgagcggcgagcggcgagcggcgagcggcccgcggagacccaggagctgccggcacgccgcggatgagccttcgcgccggcgggaagacgcggcggtggccagggccagagcaggcggcccgcgggggccgatccggcggagagcagagcccgaggcgaggcgaggcgcggcgccgctgcacacacgcacacggagccatggggcgccatgttgccaccagctgccacgtggcctggcttttggtgctgatctctggatgctggggccaggtgaaccggctgcccttcttcaccaaccacttctttgatacatacctgctgatcagcgaggacacgcctgtgggttcttctgtgacccagttgctggcccaagacatggacaatgaccccctggtgtttggcgtgtctggggaggaggcctctcgcttctttgcagtggagcctgacactggcgtggtgtggctccggcagccactggacagagagaccaagtcagagttcaccgtggagttctctgtcagcgaccaccagggggtgatcacacggaaggtgaacatccaggttggggatgtgaatgacaacgcgcccacatttcacaatcagccctacagcgtccgcatccctgagaatacaccagtggggacgcccatcttcatcgtgaatgccacagaccccgacttgggggcagggggcagcgtcctctactccttccagcccccctcccaattcttcgccattgacagcgcccgcggtatcgtcacagtgatccgggagctggactacgagaccacacaggcctaccagctcacggtcaacgccacagatcaagacaagaccaggcctctgtccaccctggccaacttggccatcatcatcacagatgtccaggacatggaccccatcttcatcaacctgccttacagcaccaacatctacgagcattctcctccgggcacgacggtgcgcatcatcaccgccatagaccaggataaaggacgtccccggggcattggctacaccatcgtttcagggaataccaacagcatctttgccctggactacatcagcggagtgctgaccttgaatggcctgctggaccgggagaaccccctgtacagccatggcttcatcctgactgtgaagggcacggagctgaacgatgaccgcaccccatctgacgctacagtcaccacgaccttcaatatcctggttattgacatcaatgacaatgccccggagttcaacagctccgagtacagcgtggccatcactgagctggcacaggtcggctttgcccttccactcttcatccaggtggtggacaaggatgagaatttgggcctgaacagcatgtttgaggtgtacttggtggggaacaactcccaccacttcatcatctccccgacctccgtccaggggaaggcggacattcgtattcgggtggccatcccactggactacgagaccgtggaccgctacgactttgatctctttgccaatgagagtgtgcctgaccatgtgggctatgccaaggtgaagatcactctcatcaatgaaaatgacaaccggcccatcttcagccagccactgtacaacatcagcctgtacgagaacgtcaccgtggggacctctgtgctgacagtcctggcaactgacaatgatgcaggcacctttggggaagtcagctacttcttcagtgatgaccctgacaggttctcgctggacaaggacacgggactcatcatgctgattgccaggctggactatgagctcatccagcgcttcaccctgacgatcattgcccgggacgggggcggcgaggagaccacaggccgggtcaggatcaatgtgttggatgtcaacgacaacgtgcccaccttccagaaggatgcctacgtgggtgctctgcgggagaacgagccttctgtcacacagctggtgcggctccgggcaacagatgaagactcccctcccaacaaccagatcacctacagcattgtcagtgcatctgcctttggcagctacttcgacatcagcctgtacgagggctatggagtgatcagcgtcagtcgccccctggattatgaacagatatccaatgggctgatttatctgacggtcatggccatggatgctggcaacccccctctcaacagcaccgtccctgtcaccatcgaggtgtttgatgagaatgacaaccctcccaccttcagcaagcccgcctacttcgtctccgtggtggagaacatcatggcaggagccacggtgctgttcctgaatgccacagacctggaccgctcccgggagtacggccaggagtccatcatctactccttggaaggctccacccagtttcggatcaatgcccgctcaggggaaatcaccaccacgtctctgcttgaccgagagaccaagtctgaatacatcctcatcgttcgcgcagtggacgggggtgtgggccacaaccagaaaactggcatcgccaccgtaaacatcaccctcctggacatcaatgacaaccaccccacgtggaaggacgcaccctactacatcaacctggtggagatgacccctccagactctgatgtgaccacggtggtggctgttgacccagacctgggggagaatggcaccctggtgtacagcatccagccacccaacaagttctacagcctcaacagcaccacgggcaagatccgcaccacccacgccatgctggaccgggagaaccccgacccccatgaggccgagctgatgcgcaaaatcgtcgtctctgttactgactgtggcaggccccctctgaaagccaccagcagtgccacagtgtttgtgaacctcttggatctcaatgacaatgaccccacctttcagaacctgccttttgtggccgaggtgcttgaaggcatcccggcgggggtctccatctaccaagtggtggccatcgacctcgatgagggcctgaacggcctggtgtcctaccgcatgccggtgggcatgccccgcatggacttcctcatcaacagcagcagcggcgtggtggtcaccaccaccgagctggaccgcgagcgcatcgcggagtaccagctgcgggtggtggccagtgatgcaggcacgcccaccaagagctccaccagcacgctcaccatccatgtgctggatgtgaacgacgagacgcccaccttcttcccggccgtgtacaatgtgtctgtgtccgaggacgtgccacgcgagttccgggtggtctggctgaactgcacggacaacgacgtgggcctcaatgcagagctcagctacttcatcacaggtggcaacgtggatgggaagttcagcgtgggttaccgcgatgccgttgtgagaaccgtggtgggcctggaccgggagaccacagccgcctacatgctcatcctggaggccatcgacaacggccctgtagggaagcgacacacgggcacagccaccgtgttcgtcactgtcctggatgtgaatgacaaccggcccatctttctgcagagcagctatgaggccagcgtccctgaggacatccctgaaggccacagcatcttgcaggcagccacggacgcagatgagggcgagtttgggcgtgtgtggtaccgcatcctccatggtaaccatggcaacaacttccggatccatgtcagcaatgggctcctgatgcgagggccccggcccctggaccgggagcggaactcatcccacgtgctgatagtggaggcctacaaccacgacctgggccccatgcggagctccgtcagggtgattgtgtacgtggaggacatcaacgatgaggcccccgtgttcacacagcagcagtacagccgtctggggcttcgagagaccgcaggcattggaacgtcagtcatcgtggtccaagccacagaccgagactctggggatggtggcctggtgaactaccgcatcctgtcgggcgcagaggggaagtttgagattgacgagagcacagggcttatcatcaccgtgaattacctggactacgagaccaagaccagctacatgatgaatgtgtcggccactgaccaggccccgcccttcaaccagggcttctgcagcgtctacatcactctgctcaacgagctggacgaggccgtgcagttctccaatgcctcatacgaggctgccatcctggagaatctggcactgggtactgagattgtgcgggtccaggcctactccatcgacaacctcaaccaaatcacgtaccgcttcaacgcctacaccagcacccaggccaaagccctcttcaagatagacgccatcacggtgaggggctgggggcagggagcaccatttcttccaatctaa

SEQ ID NO: 3642 - DNA, 3182 bp, Homo sapiens
  source 1..3182: mol_type = unassigned DNA; mol_type = unassigned DNA
agtcttttgtgtacgtgcaggaccatggtggctttagtttctaccccacccttcctaggaactctacttgtggcaaacgtatgttcaagcttacaagtcagcccaccccactctgataaatgcaagaaaagctgaaaagggaggagcaagatgggatgaaagcatctgggccaaagtgacctgaaaacctttagagaagaagctgctggctgagaaggaggtgtgtggctccggtgagaccaccagcttggaggactggtcatcagctgcacgttctgggtctgtcttgggtattcccatatggccatgagatccgggaggcacccctcgctgctgctgcttctagtgctgctgctgtggctgctgcaggtcagtatcattgacagtgttcaacaggaaacagatgatcttactaagcaaacaaaggaaaagatctaccagcctctacggcgatccaagagaagatgggttatcaccaccttggagctggaggaggaagacccgggaccctttcccaaactcattggtgagctgttcaataatatgtcttataacatgtcactaatgtatctaatcagtggacctggtgtggatgaatatccagagattggtttgttttctctagaagatcatgagaacggaaggatatatgttcaccgccctgtcgatcgagaaatgacaccatctttcacggtttattttgatgttgtggagcgctcaacaggaaaaattgtggatacatccttgattttcaacattaggatcagtgatgtgaatgatcatgcaccccagtttccagagaaggaatttaacatcactgtgcaagaaaaccaatctgcagggcaacctatttttcagatgttagcagtcgatttggatgaagaaaacactccaaattctcaagtcctttacttcctcatttctcaaacaccattactgaaagaaagtggtttccgggttgatcgccttagtggagaaatacgactctctggctgcttagattatgagaccgctcctcagtttacactgctaatcagagccagggactgtggagaaccgtcactgtcatccacgaccaccgttcacgtggatgtgcaagaaggcaacaaccacaggcctgcatttacccaggagaactataaggttcagattcctgaaggccgagccagccagggcgtgttgcgtctcctggttcaagatcgagattctccatttacatcagcttggagagcaaaattcaacatattgcatggcaatgaagaggggcattttgacatttcgactgaccctgagaccaacgaagggatattaaatgttatcaagcctttggattatgagactcgcccagcgcaaagcctcatcattgtcgtggagaatgaggagaggctcgtcttctgtgagagaggaaagcttcagccgccaaggaaggcagcagccagcgccactgtgagtgtgcaggtgacagacgccaacgacccaccagcctttcacccccagagcttcattgtcaataaagaggagggcgccaggcctgggaccctgttgggaacttttaatgccatggatccagacagccagataagatatgaactggttcatgacccagcaaattgggtcagcgtcgacaaaaactccggagtggtcatcaccgtggagccaattgaccgagaatcccctcatgtaaataacagtttttatgtaatcatcattcacgctgttgatgatggcttcccaccgcagactgctacagggaccctaatgctcttcctgtctgacatcaatgacaacgtcccgactctccggccacgttcccgctacatggaggtctgtgagtctgctgtgcatgagcccctccacatcgaggcagaggatccggacctggagccgttctctgacccatttacatttgaattggacaatacctggggaaatgcggaggacacatggaagttggggagaaattggggtcaatcagttgaacttttaaccttgagaagcctgccacgtggtaattacttggtgccactcttcattggagacaaacagggactttcccagaagcaaactgtccatgtaaggatctgcccctgtgccagtgggctcacatgtgtggagcttgcagatgcagaagtggggcttcatgtgggggccctgttccctgtctgtgcagcatttgtggctctggcagtggctctgctttttctgttgcgatgctattttgtgcttgaacctaagaggcatggatgctctgtatccaatgatgaaggccaccaaacactggtcatgtataatgcggagagcaaaggcacttcagcccagacatggtcagatgttgaaggccagaggccggctctgctcatctgcacagctgcagcaggacccacgcagggagttaaggatctcgaggaagtgcctccatctgcagcgagtcagtcagcccaagcacgctgtgctctggggagctggggttatggcaagccctttgagccaagaagtgtgaaaaacatacactctactcctgcttacccagatgccacaatgcacagacaactcctggctccggtggaaggaaggatggcagagacattgaatcagaaactccatgttgccaatgtgctggaagatgaccccggctacctacctcacgtctacagcgaggaaggggagtgtggaggggccccatccctcagctctctggccagcttggaacaggagttgcaacctgatttgctggactctttgggttcaaaagcgactccgtttgaggaaatatattcagagtcaggtgttccttcctaaaaaaaaaagtctattttggagaattgaaataattcatggaagggaatcactattcagggatttttcccctttgctcttcttttccctccttaaaagaaaaattaccttctagtcctaggatgaggacacactattagtttgaattaaatgctttgatattctcagatcagccatcttgaaccaaagcaaaaccacaagttacactttcttaaaatttgatttgtcatattttctagagaaacttgaatttaattgtgttattcttagcttccactggcagcctagctttgagggtaaatgaaaatataacccatagattacccagccacttgggaacagcaggtaatactgaagaaaaataaaaatagattttgaaaacgtta

SEQ ID NO: 3643 - DNA, 597 bp, Homo sapiens
  source 1..597: mol_type = unassigned DNA
atccctggcctccgcccagtagatgtcagtagcacccctcagctgtgacaaccaaaagtgtcaccagacattgccaaatgtccctcagggagaagaatcacccttgggtgagaagtctgcacctgaggttttcacaccgtgttcaggattctagagggaagtataaggttcagattcctgaaggccgagccagccagggcgtgttgcgtctcctggttcaagatcgagattctccatttacatcagcttggagagcaaaattcaacatattgcatggcaatgaagaggggcattttgacatttcgactgaccctgagaccaacgaagggatattaaatgttatcaagcctttggattatgagactcgcccagcgcaaagcctcatcattgtcgtggagaatgaggagaggctcgtcttctgtgagagaggaaagcttcagccgccaaggaaggcagcagccagcgccactgtgagtgtgcaggtgacagacgccaacgacccaccagcctttcacccccagagcttcattgtcaataaagaggagggcgccaggcctgggaccctgttgggaacttttaatgccatggatccagaca

SEQ ID NO: 3644 - DNA, 1669 bp, Homo sapiens
  source 1..1669: mol_type = unassigned DNA
ccaggcctgggaccctgttgggaacttttaatgccatggatccagacagccagataagatatgaactggttcatgacccagcaaattgggtcagcgtcgacaaaaactccggagtggtcatcaccgtggagccaattgaccgagaatcccctcatgtaaataacagtttttatgtaatcatcattcacgctgttgatgatggcttcccaccgcagactgctacagggaccctaatgctcttcctgtctgacatcaatgacaacgtcccgactctccggccacgttcccgctacatggaggtctgtgagtctgctgtgcatgagcccctccacatcgaggcagaggatccggacctggagccgttctctgacccatttacatttgaattggacaatacctggggaaatgcggaggacacatggaagttggggagaaattggggtcaatcagttgaacttttaaccttgagaagcctgccacgtggtaattacttggtgccactcttcattggagacaaacagggactttcccagaagcaaactgtccatgtaaggatctgcccctgtgccagtgggctcacatgtgtggagcttgcagatgcagaagtggggcttcatgtgggggccctgttccctgtctgtgcagcatttgtggctctggcagtggctctgctttttctgttgcgatgctattttgtgcttgaacctaagaggcatggatgctctgtatccaatgatgaaggccaccaaacactggtcatgtataatgcggagagcaaaggcacttcagcccagacatggtcagatgttgaaggccagaggccggctctgctcatctgcacagctgcagcaggacccacgcagggagttaaggcttacccagatgccacaatgcacagacaactcctggctccggtggaaggaaggatggcagagacattgaatcagtctaaagagagaaatcgcttcagcctcagcaggggctgcatcatcccccagggaagagccacagctgggcgaggattgccacaagacatttacaaggagatgatgccacggagactaacgcagactggtaaacggaaacacggggctttggctcgaacaccctctttcaagaaagttgtttatgaccacaaggaagatgaggagaacaaggctgggagaaagcaaaggagccacttgtttaaggttatgcagctgagaaatgaacaaggtggggttcgagtccagagtgcgcattccccatcaccccttaacaaaaaggcatgtttcccaggagactacagaggagaatcggcaggtggtcacaattgcagggctgtctcaggctgagcagagagtacggtggaggggcatgggcctgctgttggcggtgagggccttggaaatggcttcctggaggagatggcaattatccaggtagacaagatgtgtgtgtgtgtgtgtgtgtgtgtgtgtgtgatcatgaagaagaaataatgtgcaaagccctggtcataaataacttttcctctgcaaactgtggatggcagttcaccatgtttctcaccactggcctggtcactgcttatccaatatgcatgtaagaattactttttctcttttttcccttctataaattctcatagaacttcctttaatgcattaaaaaagcaactagcatgttc

SEQ ID NO: 3645 - DNA, 1429 bp, Homo sapiens
  source 1..1429: mol_type = unassigned DNA
tgcacgagataaacaactcctgaaacttcctccccatacaaggcttcccaccgcagactgctacagggaccctaatgctcttcctgtctgacatcaatgacaacgtcccgactctccggccacgttcccgctacatggaggtctgtgagtctgctgtgcatgagcccctccacatcgaggcagaggatccggacctggagccgttctctgacccatttacatttgaattggacaatacctggggaaatgcggaggacacatggaagttggggagaaattggggtcaatcagttgaacttttaaccttgagaagcctgccacgtggtaattacttggtgccactcttcattggagacaaacagggactttcccagaagcaaactgtccatgtaaggatctgcccctgtgccagtgggctcacatgtgtggagcttgcagatgcagaagtggggcttcatgtgggggccctgttccctgtctgtgcagcatttgtggctctggcagtggctctgctttttctgttgcgatgctattttgtgcttgaacctaagaggcatggatgctctgtatccaatgatgaaggccaccaaacactggtcatgtataatgcggagagcaaaggcacttcagcccagacatggtcagatgttgaaggccagaggccggctctgctcatctgcacagctgcagcaggacccacgcagggagttaagggttatggcaagccctttgagccaagaagtgtgaaaaacatacactctactcctgcttacccagatgccacaatgcacagacaactcctggctccggtggaaggaaggatggcagagacattgaatcagaaactccatgttgccaatgtgctggaagatgaccccggctacctacctcacgtctacagcgaggaaggggagtgtggaggggccccatccctcagctctctggccagcttggaacaggagttgcaacctgatttgctggactctttgggttcaaaagcgactccgtttgaggaaatatattcagagtcaggtgttccttcctaaaaaaaaaagtctattttggagaattgaaataattcatggaagggaatcactattcagggatttttcccctttgctcttcttttccctccttaaaagaaaaattaccttctagtcctaggatgaggacacactattagtttgaattaaatgctttgatattctcagatcagccatcttgaaccaaagcaaaaccacaagttacactttcttaaaatttgatttgtcatattttctagagaaacttgaatttaattgtgttattcttagcttccactggcagcctagctttgagggtaaatgaaaatataacccatagattacccagccacttgggaacagcaggtaatactgaagaaaaataaaaatagattttgaaaacgtta

SEQ ID NO: 3646 - DNA, 1931 bp, Homo sapiens
  source 1..1931: mol_type = unassigned DNA
tggcaaggctaataagaaagcagcttttccaagaaacaatacaatattactggccagatagtattattgattaattcaacaaacagttatgtagcatctactggtaccctggaactgtgctgaactttatagctacacagatgactaagacgcaatttggccttgccagttcatgactgagttatacatgaacagaacaagatcctcatgaaacctctgatatggacatggtcagatgttgaaggccagaggccggctctgctcatctgcacagctgcagcaggacccacgcagggagttaaggcttacccagatgccacaatgcacagacaactcctggctccggtggaaggaaggatggcagagacattgaatcagaaactccatgttgccaatgtgctggaagatgaccccggctacctacctcacgtctacagcgaggaaggggagtgtggaggggccccatccctcagctctctggccagcttggaacaggagttgcaacctgatttgctggactctttgggttcaaaagcgactccgtttgaggaaatatattcagagtcaggtgttccttcctaaaaaaaaaagtctattttggagaattgaaataattcatggaagggaatcactattcagggatttttcccctttgctcttcttttccctccttaaaagaaaaattaccttctagtcctaggatgaggacacactattagtttgaattaaatgctttgatattctcagatcagccatcttgaaccaaagcaaaaccacaagttacactttcttaaaatttgatttgtcatattttctagagaaacttgaatttaattgtgttattcttagcttccactggcagcctagctttgagggtaaatgaaaatataacccatagattacccagccacttgggaacagcaggtaatactgaagaaaaataaaaatagattttgaaaacgttacttacatttctatgattatgattctgcttccatttaagggaaaacttaggtaaatagagaaattttttctataacatttgtagtcagtatttgaagtgattttttaaaaaataagtattggtccctgttcactttttgattagataaatagataaaatatgttatcttgagaaaaatgattatgctgaaagctttataaacagtatactctttaaaaaatgaagagctgacataatttaacttgtatgtattatgtaagtaaaagagttaggagcctttgaatgagtaagttctgattagattttatctttaaacaaaaccacaaaatttaattggtttttacttgtccacttactgctagtgtcagtttcaggggaagaaatggtttcttttaaaaatcttaataggggacatatgccctaaaaatagtcagttttctagtctgagtaatagataagagactgactaagcaaagtttaaaatgctatttggacactttaatgcacatattggatatctaaaagtctacagccatataaaaattttatataattaatgagcaaatgccgtctctcatgccctaaaataaatcagtagaaacatgtttgctggtgaatcagtgaagcattatgttaaacagtgagttacagctcagagttaaaactttctccttctttttgaagaagctgtgcaaatacttctttttaaggagatctggccttttcctacctggttacctcagtcttcctctgctttgggaagctgaaaaagaagaaaaatcacatttaaagcactggaatgtctgaatgggacgcttgaatgtgtagaacagctgtactgatcctagcatgactcagaggacagtctagggcattttctgggtaattcaggataaaagtatttttttttttaagaaaaatacatgtttttggacaacaaaacaaagtaaacattagtttattcgat

SEQ ID NO: 3647 - DNA, 2494 bp, Homo sapiens
  source 1..2494: mol_type = unassigned DNA; mol_type = unassigned DNA
aataagaaagcagcttttccaagaaacaatacaatattactggccagatagtattattgattaattcaacaaacagttatgtagcatctactggtaccctggaactgtgctgaactttatagctacacagatgactaagacgcaatttggccttgccagttcatgactgagttatacatgaacagaacaagatcctcatgaaacctctgatatggacatggtcagatgttgaaggccagaggccggctctgctcatctgcacagctgcagcaggacccacgcagggagttaaggatctcgaggaagtgcctccatctgcagcgagtcagtcagcccaagcacgctgtgctctggggagctggggttatggcaagccctttgagccaagaagtgtgaaaaacatacactctactcctgcttacccagatgccacaatgcacagacaactcctggctccggtggaaggaaggatggcagagacattgaatcagaaactccatgttgccaatgtgctggaagatgaccccggctacctacctcacgtctacagcgaggaaggggagtgtggaggggccccatccctcagctctctggccagcttggaacaggagttgcaacctgatttgctggactctttgggttcaaaagcgactccgtttgaggaaatatattcagagtcaggtgttccttcctaaaaaaaaaagtctattttggagaattgaaataattcatggaagggaatcactattcagggatttttcccctttgctcttcttttccctccttaaaagaaaaattaccttctagtcctaggatgaggacacactattagtttgaattaaatgctttgatattctcagatcagccatcttgaaccaaagcaaaaccacaagttacactttcttaaaatttgatttgtcatattttctagagaaacttgaatttaattgtgttattcttagcttccactggcagcctagctttgagggtaaatgaaaatataacccatagattacccagccacttgggaacagcaggtaatactgaagaaaaataaaaatagattttgaaaacgttacttacatttctatgattatgattctgcttccatttaagggaaaacttaggtaaatagagaaattttttctataacatttgtagtcagtatttgaagtgattttttaaaaaataagtattggtccctgttcactttttgattagataaatagataaaatatgttatcttgagaaaaatgattatgctgaaagctttataaacagtatactctttaaaaaatgaagagctgacataatttaacttgtatgtattatgtaagtaaaagagttaggagcctttgaatgagtaagttctgattagattttatctttaaacaaaaccacaaaatttaattggtttttacttgtccacttactgctagtgtcagtttcaggggaagaaatggtttcttttaaaaatcttaataggggacatatgccctaaaaatagtcagttttctagtctgagtaatagataagagactgactaagcaaagtttaaaatgctatttggacactttaatgcacatattggatatctaaaagtctacagccatataaaaattttatataattaatgagcaaatgccgtctctcatgccctaaaataaatcagtagaaacatgtttgctggtgaatcagtgaagcattatgttaaacagtgagttacagctcagagttaaaactttctccttctttttgaagaagctgtgcaaatacttctttttaaggagatctggccttttcctacctggttacctcagtcttcctctgctttgggaagctgaaaaagaagaaaaatcacatttaaagcactggaatgtctgaatgggacgcttgaatgtgtagaacagctgtactgatcctagcatgactcagaggacagtctagggcattttctgggtaattcaggataaaagtatttttttttttaagaaaaatacatgtttttggacaacaaaacaaagtaaacattagtttattcgattgcctccttatacttgcctctttcattctgtcccctgtagatttttaaaaaattatctcattttaaaactttattatttcattttaaataattgacatataataattgtacatatttagggggtacatagtcatgtttcaatacatttacagtgatcagatcagggtggttaacgtaatcattggctcaaacatttttcatttctttgtattggtacggagcattcaatatccatcccccttctagctatctaaaactatgtattattgttaactataggcaacatataatggtatagagtgctagaacgtattcctcctaggaataatttgctgtaattttgtatcctttaataaatctctccctatccctctttccccccacccttcccagctgctgtgtcctctgttctaccttctacttccgagataaacttggttttagcttcca

SEQ ID NO: 3648 - DNA, 418 bp, Homo sapiens
  source 1..418: mol_type = unassigned DNA
aagaaacaatacaatattactggccagatagtattattgattaattcaacaaacagttatgtagcatctactggtaccctggaactgtgctgaactttatagctacacagatgactaagacgcaatttggccttgccagttcatgactgagttatacatgaacagaacaagatcctcatgaaacctctgatatggacatggtcagatgttgaaggccagaggccggctctgctcatctgcacagctgcagcaggacccacgcagggagttaagggttatggcaagccctttgagccaagaagtgtgaaaaacatacactctactcctgcttacccagatgccacaatgcacagacaactcctggctccggtggaaggaaggatggcagagacattgaatcagaaactccatgttgcca

SEQ ID NO: 3649 - DNA, 1976 bp, Homo sapiens
  source 1..1976: mol_type = unassigned DNA; mol_type = unassigned DNA
aaagttcagcagtacacagtcatcgttcaggccacagatatggaaggaaatctcaactatggcctctcaaacacagccacagccatcatcacggtgacagatgtgaatgacaacccgccagaatttaccgccagcacgtttgcaggggaggtccccgaaaaccgcgtggagaccgtggtcgcaaacctcacggtgatggaccgagatcagccccactctccaaactggaatgccgtttaccgcatcatcagtggggatccatccgggcacttcagcgtccgcacagaccccgtaaccaacgagggcatggtcaccgtggtgaaggcagtcgactacgagctcaacagagctttcatgctgacagtgatggtgtccaaccaggcgcccctggccagcggaatccagatgtccttccagtccacggcaggggtgaccatctccatcatggacatcaacgaggctccctacttcccctcaaaccacaagctgatccgcctggaggagggcgtgccccccggcaccgtgctgaccacgttttcagctgtggaccctgaccggttcatgcagcaggctgtgagatactcaaagctgtcagacccagcgagctggctgcacatcaatgccaccaacggccagatcaccacggcggcagtgctggaccgtgagtccctctacaccaaaaacaacgtctacgaggccaccttcctggcagctgacaatgggatacccccggccagcggcaccgggaccctccagatctatctcattgacatcaacgacaacgcccctgagctgctgcccaaggaggcgcagatctgcgagaggcccaacctgaacgccatcaacatcacggcggccgacgctgacgtcgaccccaacatcggcccctacgtcttcgagctgccctttgtcccggcggccgtgcggaagaactggaccatcacccgcctgaacggtgactatgcccaactcagcttgcgcatcctgtacctggaggccgggatgtatgacgtccccatcatcgtcacagactctggaaaccctcccctgtccaacacgtccatcatcaaagtcaaggtgtgcccatgtgatgacaacggggactgcaccaccattggcgcagtggcagcggctggtctgggcaccggtgccatcgtggccatcctcatctgcatcctcatcctgctgaccatggtcctgctgtttgtcatgtggatgaagcggcgagagaaggagcgccacacgaagcagctgctcattgaccccgaggacgacgtccgcgacaacatcctcaagtatgacgaggaaggcggtggcgaggaggaccaggactacgacctcagccagctgcagcagccggaagccatggggcacgtgccaagcaaagcccctggcgtgcgtcgcgtggatgagcggccggtgggtgctgagccccagtacccgatcaggcccatggtgccgcacccaggcgacatcggtgacttcatcaatgagggactccgcgctgctgacaacgaccccacggcacccccctatgactccctgctggtcttcgactacgaggggagcggctccaccgcaggctccgtcagctccctgaactcatccagttccggggaccaagactacgattacctcaacgactgggggcccagattcaagaagctggcggacatgtatggaggtggtgaagaggattgactgacctcgcatcttcggaccgaagtgagagccgtgctcggacgccggaggagcaggactgagcagaggcggccggtcttcccgactccctgcggctgtgtccttagtgctgttaggaggccccccaatccccacgttgagctgtctagcatgagcacccacccccacagcgccctgcacccggccgctgcccagcaccgcgctggctggcactgaaggacagcaagaggcactctgtcttcacttgaatttcctagaacagaagcactgttttt

SEQ ID NO: 3650 - DNA, 2008 bp, Homo sapiens
  source 1..2008: mol_type = unassigned DNA
aaagttcagcagtacacagtcatcgttcaggccacagatatggaaggaaatctcaactatggcctctcaaacacagccacagccatcatcacggtgacagatgtgaatgacaacccgccagaatttaccgccagcacgtttgcaggggaggtccccgaaaaccgcgtggagaccgtggtcgcaaacctcacggtgatggaccgagatcagccccactctccaaactggaatgccgtttaccgcatcatcagtggggatccatccgggcacttcagcgtccgcacagaccccgtaaccaacgagggcatggtcaccgtggtgaaggcagtcgactacgagctcaacagagctttcatgctgacagtgatggtgtccaaccaggcgcccctggccagcggaatccagatgtccttccagtccacggcaggggtgaccatctccatcatggacatcaacgaggctccctacttcccctcaaaccacaagctgatccgcctggaggagggcgtgccccccggcaccgtgctgaccacgttttcagctgtggaccctgaccggttcatgcagcaggctgtgagatactcaaagctgtcagacccagcgagctggctgcacatcaatgccaccaacggccagatcaccacggcggcagtgctggaccgtgagtccctctacaccaaaaacaacgtctacgaggccaccttcctggcagctgacaatgggatacccccggccagcggcaccgggaccctccagatctatctcattgacatcaacgacaacgcccctgagctgctgcccaaggaggcgcagatctgcgagaggcccaacctgaacgccatcaacatcacggcggccgacgctgacgtcgaccccaacatcggcccctacgtcttcgagctgccctttgtcccggcggccgtgcggaagaactggaccatcacccgcctgaacggtgactatgcccaactcagcttgcgcatcctgtacctggaggccgggatgtatgacgtccccatcatcgtcacagactctggaaaccctcccctgtccaacacgtccatcatcaaagtcaaggtgtgcccatgtgatgacaacggggactgcaccaccattggcgcagtggcagcggctggtctgggcaccggtgccatcgtggccatcctcatctgcatcctcatcctgctgaccatggtcctgctgtttgtcatgtggatgaagcggcgagagaaggagcgccacacgaagcagctgctcattgaccccgaggacgacgtccgcgacaacatcctcaagtatgacgaggaaggcggtggcgaggaggaccaggactacgacctcagccagctgcagcagccggaagccatggggcacgtgccaagcaaagcccctggcgtgcgtcgcgtggatgagcggccggtgggtgctgagccccagtacccgatcaggcccatggtgccgcacccaggcgacatcggtgacttcatcaatgagggactccgcgctgctgacaacgaccccacggcacccccctatgactccctgctggtcttcgactacgaggggagcggctccaccgcaggctccgtcagctccctgaactcatccagttccggggaccaagactacgattacctcaacgactgggggcccagattcaagaagctggcggacatgtatggaggtggtgaagaggattgactgacctcgcatcttcggaccgaagtgagagccgtgctcggacgccggaggagcaggactgagcagaggcggccggtcttcccgactccctgcggctgtgtccttagtgctgttaggaggccccccaatccccacgttgagctgtctagcatgagcacccacccccacagcgccctgcacccggccgctgcccagcaccgcgctggctggcactgaaggacagcaagaggcactctgtcttcacttgaatttcctagaacagaagcactgtttttaaaaaaaaaaaaaaaaaaaagaagaaagaaag

SEQ ID NO: 3651 - DNA, 5377 bp, Homo sapiens
  source 1..5377: mol_type = unassigned DNA
aaagttcagcagtacacagtcatcgttcaggccacagatatggaaggaaatctcaactatggcctctcaaacacagccacagccatcatcacggtgacagatgtgaatgacaacccgccagaatttaccgccagcacgtttgcaggggaggtccccgaaaaccgcgtggagaccgtggtcgcaaacctcacggtgatggaccgagatcagccccactctccaaactggaatgccgtttaccgcatcatcagtggggatccatccgggcacttcagcgtccgcacagaccccgtaaccaacgagggcatggtcaccgtggtgaaggcagtcgactacgagctcaacagagctttcatgctgacagtgatggtgtccaaccaggcgcccctggccagcggaatccagatgtccttccagtccacggcaggggtgaccatctccatcatggacatcaacgaggctccctacttcccctcaaaccacaagctgatccgcctggaggagggcgtgccccccggcaccgtgctgaccacgttttcagctgtggaccctgaccggttcatgcagcaggctgtgagatactcaaagctgtcagacccagcgagctggctgcacatcaatgccaccaacggccagatcaccacggcggcagtgctggaccgtgagtccctctacaccaaaaacaacgtctacgaggccaccttcctggcagctgacaatgggatacccccggccagcggcaccgggaccctccagatctatctcattgacatcaacgacaacgcccctgagctgctgcccaaggaggcgcagatctgcgagaggcccaacctgaacgccatcaacatcacggcggccgacgctgacgtcgaccccaacatcggcccctacgtcttcgagctgccctttgtcccggcggccgtgcggaagaactggaccatcacccgcctgaacggtgactatgcccaactcagcttgcgcatcctgtacctggaggccgggatgtatgacgtccccatcatcgtcacagactctggaaaccctcccctgtccaacacgtccatcatcaaagtcaaggtgtgcccatgtgatgacaacggggactgcaccaccattggcgcagtggcagcggctggtctgggcaccggtgccatcgtggccatcctcatctgcatcctcatcctgctgaccatggtcctgctgtttgtcatgtggatgaagcggcgagagaaggagcgccacacgaagcagctgctcattgaccccgaggacgacgtccgcgacaacatcctcaagtatgacgaggaaggcggtggcgaggaggaccaggactacgacctcagccagctgcagcagccggaagccatggggcacgtgccaagcaaagcccctggcgtgcgtcgcgtggatgagcggccggtgggtgctgagccccagtacccgatcaggcccatggtgccgcacccaggcgacatcggtgacttcatcaatgagggactccgcgctgctgacaacgaccccacggcacccccctatgactccctgctggtcttcgactacgaggggagcggctccaccgcaggctccgtcagctccctgaactcatccagttccggggaccaagactacgattacctcaacgactgggggcccagattcaagaagctggcggacatgtatggaggtggtgaagaggattgactgacctcgcatcttcggaccgaagtgagagccgtgctcggacgccggaggagcaggactgagcagaggcggccggtcttcccgactccctgcggctgtgtccttagtgctgttaggaggccccccaatccccacgttgagctgtctagcatgagcacccacccccacagcgccctgcacccggccgctgcccagcaccgcgctggctggcactgaaggacagcaagaggcactctgtcttcacttgaatttcctagaacagaagcactgtttttaaaaaaaaaaaaaaaaaaaagaagaaagaaagaaaaaaaaaaaaaaaagaaagtgccttttggtacatgtatcagattccctcaaactcaggagtgtctaaagcagacagaccgtccccaccttcccatcccgagcggcctccaaccccagctagtcccagctctgaaggcatcattcagaaatgggggagactgtgtctgtctttcttactttttttttggtcttttattaagaaaaagaaagtgggtgacttgtttgaaaacagagtggggttcaaatcccagcagcctttgctgtacacagctgggggtctcttgagcctcttgggagtcaaggccagctgggaggcttagcccttcagccccagcagaaggccctggggctggtggggctcagaatacccctaccttgtggctgctccccaccccctcccggatgctgtgaggagctcaggcaggggcctggaggggaacaggggtcatcctgaaggggctccacccccagtcaacccaggcctccctcagggacacctgtcaccctgagtgccaccaggtcccctctgcctttggtccagaagagtgagttgtccaaaccagccagcatctggctccagccctccaaccctggcgaccagaccccatggggtgccatcaacggccccgcgacaggcatcaattcaaaccccaggacactctcgacagctccaaccatccggagggctgtgcagatggcaggaaccaaggaccctccctggcagctgaagagggcagttacggttgggcgtggtgaccagaacacacccagcagcctgcgaagcctccccgtccccagcctgtgctcctgattcccgccagacgcttgtgagcctgtgtgggtggcaggaggccccgtcttgccgtgcctacctgtcgcacaggtgcctctgcacgctgcagacggtgcctctcctctcctatggaccctcgtcgggggcaggcagcggccgggtccaaacttgctgctgtcctcgaggctggcactgctatctccagggctgggttgactcaagccagacagggggaaggaattggttctgcaggacagtgagagggtctgtgtcccggcacccctgggacagcgctcggctgcctgtgctcactgcatgagaaaactcagagggtgcattctccctctggcatggctgtgtctgggcgccttgggctgcggcagggggcaggccccacgtggggaagcctcgtgcttggtcagctttctgtctctcccaggccagtgacaactggcttcccgaggaaggaggtgaggtaccagggaccctgggcaggacctggtgtcgggcagggcggtgccagcactggggaaggacagggagccctcccggagccccaccctgcacctgccactggggtcagggagtgtctcggggtgcctttgggggcagcatgagctccaccaggggccccggcccccacctcagcctatggcccttccccatggctaaggtcatgccttttctgaacagctttggccttgagtgcacacatctgtgccaggctcacggcatgttcccgttggatgtcagggtccttgtccaaaccaaactcacagctgcccctgtgcagccttcagagttgagctggggtctcagtctccaacctgtcctttctgaccctcccatggctgcccagggagggcggggttcactgtgccacgtgctgggtgcccccctctgcagacagccagtccaggagatggaccaacagaggtcaaggggcagctggccaggccgcaccggggtccccgagttctgagctgtgctatgcaaacaagaatgctcctgtgtgggggggcatggccgttggaggtatagctgggcgggtagtggaaggactggaaatctctgttgttgtttggggaagtccatgcttcagtccttcggagtatgcgtggattgttcgaagtgtgactatggcccgggagccagggcagcatgaactcctttctctgaaatttcgaggcctccttgggttccctgaactccgggctgatgttcccaggacccagcaccaggagaccccagtcccgccagcagccgccgctacccaggagggctgggcgacattggccgcctcccactagctccccctcctcgcccacagcctcttgtcactgccaagcccccgttccttttgcccaaatcacgcaggcggaagctgcagtgccagctggagggatgttcatagggcttcctgtgcccatccctgctccaaacagctggacagcttcccctctacccccaccctggtgagcccctgggggccagagaaagatggggttcctgcaccttcccagctccacctctgaacttgagttagcgttagctaagcatacaatcagtgtcgaacgtctctcttccttaagcttgtagatacgactgcctataatcaggggactcccactggaggccgggaggccaatgctggccaggtgcgagggcatggtttggttcctttagggaatttttgttttgcaaacaggagaaacctgtgctgcaggttggagtggcaggaacgactggccttggtcagcaggcagcccccagcctagggccacagtcctcttcagggcctgggcagccccaatttctggcccagcaggtttctctttgtagtgtctttcagcacatccaaaatgctaggcctcctgccaccaacgtgtcagagcaatgtccaactgtcaggctctcagagatgcctcagtttccctagcatgagcaccagccgacacacacagtccactgagatgataattctgttctctccaaagcaaaaagctgggcgaggggtagtctcaatttctgtcagtgctcaaaggaataacaccaaaagaatcaacacagaatctcccagacacacgtgacccagctcgtggcgccgtgggtccgtaggagggacagtacctcacaacaggcccagcgggggaccacctctctgtacaattggaatgcgttttacttttcttttctctccttttttcattccgattttttttgcatgtttctttttgaaatgggcaaaatgtgtagcagcctgcatgagcacagttgttttggggaaagatactggagtatgatgtactcacacctgcaaatctgagcatcgcgaggttaaacgttccacctttttttgtaatcgtcaacagcacaactattttgtattgttgtttgtatcattttgtaccaaaaaaaaaaaggaaaaaaaaagggaagagagttgatgttttcagtgtgtttccagtgccagacagtcttggtcctgaactcagtagacccttgcggagcggttgtgcgcgggcaggcggggcgcgctgctccagagaatgaataaagtcccccttttccgta

SEQ ID NO: 3652 - DNA, 6513 bp, Homo sapiens
  source 1..6513: mol_type = unassigned DNA
agcggcggcggtggtctcggcggcggcggcggcggcggcggcagggagcgggctcccggtgccgggcaccgggcgggcggcggggaagatgaccgcgggcgccggcgtgctccttctgctgctctcgctctccggcgcgctccgggcccataatgaggatcttacaactagagagacctgcaaggctgggttctctgaagatgattacacggcattaatctcccaaaatattctagaaggggaaaagctacttcaagtcaagttcagcagctgtgtggggaccaaggggacacaatatgagaccaacagcatggacttcaaagttggggcagatgggacagtcttcgccacccgggagctgcaggtcccctccgagcaggtggcgttcacggtgactgcatgggacagccagacagcagagaaatgggacgccgtggtgcggttgctggtggcccagacctcgtccccgcactctggacacaagccgcagaaaggaaagaaggtcgtggctctggacccctctccgcctccgaaggacaccctgctgccgtggccccagcaccagaacgccaacgggctgaggcggcgcaaacgggactgggtcatcccgcccatcaacgtgcccgagaactcgcgcgggcccttcccgcagcagctcgtgaggatccggtccgacaaagacaatgacatccccatccggtacagcatcacgggagtgggcgccgaccagccccccatggaggtcttcagcattgactccatgtccggccggatgtacgtcacaaggcccatggaccgggaggagcacgcctcttaccacctccgagcccacgctgtggacatgaatggcaacaaggtggagaaccccatcgacctgtacatctacgtcatcgacatgaatgacaaccgccctgagttcatcaaccaggtctacaacggctccgtggacgagggctccaagccaggcacctacgtgatgaccgtcacggccaacgatgctgacgacagcaccacggccaacgggatggtgcggtaccggatcgtgacccagaccccacagagcccgtcccagaatatgttcaccatcaacagcgagactggagatatcgtcacagtggcggctggcctggaccgagagaaagttcagcagtacacagtcatcgttcaggccacagatatggaaggaaatctcaactatggcctctcaaacacagccacagccatcatcacggtgacagatgtgaatgacaacccgccagaatttaccgccagcacgtttgcaggggaggtccccgaaaaccgcgtggagaccgtggtcgcaaacctcacggtgatggaccgagatcagccccactctccaaactggaatgccgtttaccgcatcatcagtggggatccatccgggcacttcagcgtccgcacagaccccgtaaccaacgagggcatggtcaccgtggtgaaggcagtcgactacgagctcaacagagctttcatgctgacagtgatggtgtccaaccaggcgcccctggccagcggaatccagatgtccttccagtccacggcaggggtgaccatctccatcatggacatcaacgaggctccctacttcccctcaaaccacaagctgatccgcctggaggagggcgtgccccccggcaccgtgctgaccacgttttcagctgtggaccctgaccggttcatgcagcaggctgtgagatactcaaagctgtcagacccagcgagctggctgcacatcaatgccaccaacggccagatcaccacggcggcagtgctggaccgtgagtccctctacaccaaaaacaacgtctacgaggccaccttcctggcagctgacaatgggatacccccggccagcggcaccgggaccctccagatctatctcattgacatcaacgacaacgcccctgagctgctgcccaaggaggcgcagatctgcgagaagcccaacctgaacgccatcaacatcacggcggccgacgctgacgtcgaccccaacatcggcccctacgtcttcgagctgccctttgtcccggcggccgtgcggaagaactggaccatcacccgcctgaacggtgactatgcccaactcagcttgcgcatcctgtacctggaggccgggatgtatgacgtccccatcatcgtcacagactctggaaaccctcccctgtccaacacgtccatcatcaaagtcaaggtgtgcccatgtgatgacaacggggactgcaccaccattggcgcagtggcagcggctggtctgggcaccggtgccatcgtggccatcctcatctgcatcctcatcctgctgaccatggtcctgctgtttgtcatgtggatgaagcggcgagagaaggagcgccacacgaagcagctgctcattgaccccgaggacgacgtccgcgacaacatcctcaagtatgacgaggaaggcggtggcgaggaggaccaggactacgacctcagccagctgcagcagccggaagccatggggcacgtgccaagcaaagcccctggcgtgcgtcgcgtggatgagcggccggtgggcgctgagccccagtacccgatcaggcccatggtgccgcacccaggcgacatcggtgacttcatcaatgagggactccgcgctgctgacaacgaccccacggcacccccctatgactccctgctggtcttcgactacgaggggagcggctccaccgcaggctccgtcagctccctgaactcatccagttccggggaccaagactacgattacctcaacgactgggggcccagattcaagaagctggcggacatgtatggaggtggtgaagaggattgactgacctcgcatcttcggaccgaagtgagagccgtgctcggacgccggaggagcaggactgagcagaggcggccggtcttcccgactccctgcggctgtgtccttagtgctgttaggaggccccccaatccccacgttgagctgtctagcatgagcacccacccccacagcgccctgcacccggccgctgcccagcaccgcgctggctggcactgaaggacagcaagaggcactctgtcttcacttgaatttcctagaacagaagcactgtttttaaaaaaaaaaaaaaaaaaagaagaaagaaagaaaaaaaaaaaaaaaagaaagtgccttttggtacatgtatcagattccctcaaactcaggagtgtctaaagcagacagaccgtccccaccttcccatcccgagcggcctccaaccccagctagtcccagctctgaaggcatcattcagaaatgggggagactgtgtctgtctttcttactttttttttggtcttttattaagaaaaagaaagtgggtgacttgtttgaaaacagagtggggttcaaatcccagcagcctttgctgtacacagctgggggtctcttgagcctcttgggagtcaaggccagctgggaggcttagcccttcagccccagcagaaggccctggggctggtggggctcagaatacccctaccttgtggctgctccccacccctcccggatgctgtgaggagctcaggcaggggcctggaggggaacaggggtcatcctgaaggggctccacccccagtcaacccaggcctccctcagggacacctgtcaccctgagtgccaccaggtcccctctgcctttggtccagaagagtgagttgtccaaaccagccagcatctggctccagccctccaaccctggcgaccagaccccatggggtgccatcaacggccccgcgacaggcatcaattcaaaccccaggacactctcgacagctccaaccatccggagggctgtgcagatggcaggaaccaaggaccctccctggcagctgaagagggcagttacggttgggcgtggtgaccagaacacacccagcagcctgcgaagcctccccgtccccagcctgtgctcctgattcccgccagacgcttgtgagcctgtgtgggtggcaggaggccccgtcttgccgtgcctacctgtcgcacagatgcctctgcacgctgcagacggtgcctctcctctcctatggaccctcgtcgggggcaggcagcggccgggtccaaacttgctgctgtcctcgaggctggcactgctatctccagggctgggttgactcaagccagacagggggaaggaattggttctgcaggacagtgagagggtctgtgtcccggcacccctgggacagcgctcggctgcctgtgctcactgcatgagaaaactcagagggtgcattctccctctggcatggctgtgtctgggcgccttgggctgcggcagggggcaggccccacgtggggaagcctcgtgcttggtcagctttctgtctctcccaggccagtgacaactggcttcccgaggaaggaggtgaggtaccagggaccctgggcaggacctggtgtcgggcagggcggtgccagcactggggaaggacagggagccctcccggagccccaccctgcacctgccactggggtcagggagtgtctcggggtgcctttgggggcagcatgagctccaccaggggccccggcccccacctcagcctatggcccttccccatggctaaggtcatgccttttctgaacagctttggccttgagtgcacacatctgtgccaggctcacggcatgttcccgttggatgtcagggtccttgtccaaaccaaactcacagctgcccctgtgcagccttcagagttgagctggggtctcagtctccaacctgtcctttctgaccctcccatggctgcccagggagggcggggttcactgtgccacgtgctgggtgcccccctctgcagacagccagtccaggagatggaccaacagaggtcaaggggcagctggccaggccgcaccggggtccccgagttctgagctgtgctatgcaaacaagaatgctcctgtgtgggggggcatggccgttggaggtatagctgggcgggtagtggaaggactggaaatctctgttgttgtttggggaagtccatgcttcagtccttcggagtatgcgtggattgttcgaagtgtgactatggcccgggagccagggcagcatgaactcctttctctgaaatttcgaggcctccttgggttccctgaactccgggctgatgttcccaggacccagcaccaggagaccccagtcccgccagcagccgccgctacccaggagggctgggcgacattggccgcctcccactagctccccctcctcgcccacagcctcttgtcactgccaagcccccgttccttttgcccaaatcacgcaggcggaagctgcagtgccagctggagggatgttcatagggcttcctgtgcccatccctgctccaaacagctggacagcttcccctctacccccaccctggtgagcccctgggggccagagaaagatggggttcctgcaccttcccagctccacctctgaacttgagttagcgttagctaagcatacaatcagtgtcgaacgtctctcttccttaagcttgtagatacgactgcctataatcaggggactcccactggaggccgggaggccaatgctggccaggtgcgagggcatggtttggttcctttagggaatttttgttttgcaaacaggagaaacctgtgctgcaggttggagtggcaggaacgactggccttggtcagcaggcagcccccagcctagggccacagtcctcttcagggcctgggcagccccaatttctggcccagcaggtttctctttgtagtgtctttcagcacatccaaaatgctaggcctcctgccaccaacgtgtcagagcaatgtccaactgtcaggctctcagagatgcctcagtttccctagcatgagcaccagccgacacacacagtccactgagatgataattctgttctctccaaagcaaaaagctgggcgaggggtagtctcaatttctgtcagtgctcaaaggaataacaccaaaagaatcaacacagaatctcccagacacacgtgacccagctcgtggcgccgtgggtccgtaggagggacagtacctcacaacaggcccagcgggggaccacctctctgtacaattggaatgcgttttacttttcttttctctccttttttcattccgattttttttgcatgtttctttttgaaatgggcaaaatgtgtagcagcctgcatgagcacagttgttttggggaaagatactggagtatgatgtactcacacctgcaaatctgagcatcgcgaggttaaacgttccacctttttttgtaatcgtcaacagcacaactattttgtattgttgtttgtatcattttgtaccaaaaaaaaaaaggaaaaaaaaagggaagagagttgatgttttcagtgtgtttccagtgccagacagtcttggtcctgaactcagtagacccttgcggagcggttgtgcgcgggcaggcggggcgcgctgctccagagaatgaataaagtcccccttttccgta

SEQ ID NO: 3653 - DNA, 3304 bp, Homo sapiens
  source 1..3304: mol_type = unassigned DNA
atcttgggcctgtcacttggggagcactgtagaaggttctggagaaggcattgagactataattctactttaatgagctgggctacctagattctatggtacagcaagagaagctgtttgtatgcacctgtatgtacgtgccttacttaaaattcagaaagaaaatcttcaggtgccagaattacttgtgaggctggtgaagagtgaaaagccacttcccaggccagacaggaaagagtgccctggttgggaccagacgggcctggctgcagacgtacactttgggcttcagcagccctggtgctgccttgagcttgacccgaattgcttcttcccagaggctgggtctccctcgcagcccctgctctcaaggatgggaatgagaaggtcgatgacaaggcacctctgctttacatccaagcgttgacttttgtggcttcctttaccccattgctctgccctttaaagggtcctggtgtgtttgggaatgggacagacaattttgtttttcacaatggtattgggctgtggatccagaactcaagttccagaggaaagcgatgccaaagtcaacagggatgcttcacggaggcagggaaaatgcaggagtcaagttcagcagctgtgtggggaccaaggggacacaatatgagaccaacagcatggacttcaaaccgcagaaaggaaagaaggtcgtggctctggacccctctccgcctccgaaggacaccctgctgccgtggccccagcaccagaacgccaacgggctgaggcggcgcaaacgggactgggtcatcccgcccatcaacgtgcccgagaactcgcgcgggcccttcccgcagcagctcgtgaggatccggtccgacaaagacaatgacatccccatccggtacagcatcacgggagtgggcgccgaccagccccccatggaggtcttcagcattgactccatgtccggccggatgtacgtcacaaggcccatggaccgggaggagcacgcctcttaccacctccgagcccacgctgtggacatgaatggcaacaaggtggagaaccccatcgacctgtacatctacgtcatcgacatgaatgacaaccgccctgagttcatcaaccaggtctacaacggctccgtggacgagggctccaagccaggcacctacgtgatgaccgtcacggccaacgatgctgacgacagcaccacggccaacgggatggtgcggtaccggatcgtgacccagaccccacagagcccgtcccagaatatgttcaccatcaacagcgagactggagatatcgtcacagtggcggctggcctggaccgagagaaagttcagcagtacacagtcatcgttcaggccacagatatggaaggaaatctcaactatggcctctcaaacacagccacagccatcatcacggtgacagatgtgaatgacaacccgccagaatttaccgccagcacgtttgcaggggaggtccccgaaaaccgcgtggagaccgtggtcgcaaacctcacggtgatggaccgagatcagccccactctccaaactggaatgccgtttaccgcatcatcagtggggatccatccgggcacttcagcgtccgcacagaccccgtaaccaacgagggcatggtcaccgtggtgaaggcagtcgactacgagctcaacagagctttcatgctgacagtgatggtgtccaaccaggcgcccctggccagcggaatccagatgtccttccagtccacggcaggggtgaccatctccatcatggacatcaacgaggctccctacttcccctcaaaccacaagctgatccgcctggaggagggcgtgccccccggcaccgtgctgaccacgttttcagctgtggaccctgaccggttcatgcagcaggctgtgagatactcaaagctgtcagacccagcgagctggctgcacatcaatgccaccaacggccagatcaccacggcggcagtgctggaccgtgagtccctctacaccaaaaacaacgtctacgaggccaccttcctggcagctgacaatgggatacccccggccagcggcaccgggaccctccagatctatctcattgacatcaacgacaacgcccctgagctgctgcccaaggaggcgcagatctgcgagaagcccaacctgaacgccatcaacatcacggcggccgacgctgacgtcgaccccaacatcggcccctacgtcttcgagctgccctttgtcccggcggccgtgcggaagaactggaccatcacccgcctgaacggtgactatgcccaactcagcttgcgcatcctgtacctggaggccgggatgtatgacgtccccatcatcgtcacagactctggaaaccctcccctgtccaacacgtccatcatcaaagtcaaggtgtgcccatgtgatgacaacggggactgcaccaccattggcgcagtggcagcggctggtctgggcaccggtgccatcgtggccatcctcatctgcatcctcatcctgctgaccatggtcctgctgtttgtcatgtggatgaagcggcgagagaaggagcgccacacgaagcagctgctcattgaccccgaggacgacgtccgcgacaacatcctcaagtatgacgaggaaggcggtggcgaggaggaccaggactacgacctcagccagctgcagcagccggaagccatggggcacgtgccaagcaaagcccctggcgtgcgtcgcgtggatgagcggccggtgggcgctgagccccagtacccgatcaggcccatggtgccgcacccaggcgacatcggtgacttcatcaatgagggactccgcgctgctgacaacgaccccacggcacccccctatgactccctgctggtcttcgactacgaggggagcggctccaccgcaggctccgtcagctccctgaactcatccagttccggggaccaagactacgattacctcaacgactgggggcccagattcaagaagctggcggacatgtatggaggtggtgaagaggattgactgacctcgcatcttcggaccgaagtgagagccgtgctcggacgccggaggagcaggactgagcagaggcggccggtcttcccgactccctgcggctgtgtccttagtgctgttaggaggccccccaatccccacgttgagctgtctagcatgagcacccacccccacagcgccctgcacccggccgctgcccagcaccgcgctggctggcactgaaggacagcaagaggcactctgtcttcacttgaatttcctagaacagaagcactgttttt

SEQ ID NO: 3654 - DNA, 3117 bp, Homo sapiens
  source 1..3117: mol_type = unassigned DNA
gcactggcgctctggctttcttctttctccctctgccttaatgatgctgcccctttcctgttcctggttgaagctgaagcccgcttcccttcgccgcacacaacacaggagcaatcttctcagccgtgcactcacagcttggaaaataaagggaggaaggagtcccagccacagggtagaggaacggcctctccacagagaagctgctgctgctgagctgaagtgacagtcaagttcagcagctgtgtggggaccaaggggacacaatatgagaccaacagcatggacttcaaagttggggcagatgggacagtcttcgccacccgggagctgcaggtcccctccgagcaggtggcgttcacggtgactgcatgggacagccagacagcagagaaatgggacgccgtggtgcggttgctggtggcccagacctcgtccccgcactctggacacaagccgcagaaaggaaagaaggtcgtggctctggacccctctccgcctccgaaggacaccctgctgccgtggccccagcaccagaacgccaacgggctgaggcggcgcaaacgggactgggtcatcccgcccatcaacgtgcccgagaactcgcgcgggcccttcccgcagcagctcgtgaggatccggtccgacaaagacaatgacatccccatccggtacagcatcacgggagtgggcgccgaccagccccccatggaggtcttcagcattgactccatgtccggccggatgtacgtcacaaggcccatggaccgggaggagcacgcctcttaccacctccgagcccacgctgtggacatgaatggcaacaaggtggagaaccccatcgacctgtacatctacgtcatcgacatgaatgacaaccgccctgagttcatcaaccaggtctacaacggctccgtggacgagggctccaagccaggcacctacgtgatgaccgtcacggccaacgatgctgacgacagcaccacggccaacgggatggtgcggtaccggatcgtgacccagaccccacagagcccgtcccagaatatgttcaccatcaacagcgagactggagatatcgtcacagtggcggctggcctggaccgagagaaagttcagcagtacacagtcatcgttcaggccacagatatggaaggaaatctcaactatggcctctcaaacacagccacagccatcatcacggtgacagatgtgaatgacaacccgccagaatttaccgccagcacgtttgcaggggaggtccccgaaaaccgcgtggagaccgtggtcgcaaacctcacggtgatggaccgagatcagccccactctccaaactggaatgccgtttaccgcatcatcagtggggatccatccgggcacttcagcgtccgcacagaccccgtaaccaacgagggcatggtcaccgtggtgaaggcagtcgactacgagctcaacagagctttcatgctgacagtgatggtgtccaaccaggcgcccctggccagcggaatccagatgtccttccagtccacggcaggggtgaccatctccatcatggacatcaacgaggctccctacttcccctcaaaccacaagctgatccgcctggaggagggcgtgccccccggcaccgtgctgaccacgttttcagctgtggaccctgaccggttcatgcagcaggctgtgagatactcaaagctgtcagacccagcgagctggctgcacatcaatgccaccaacggccagatcaccacggcggcagtgctggaccgtgagtccctctacaccaaaaacaacgtctacgaggccaccttcctggcagctgacaatgggatacccccggccagcggcaccgggaccctccagatctatctcattgacatcaacgacaacgcccctgagctgctgcccaaggaggcgcagatctgcgagaagcccaacctgaacgccatcaacatcacggcggccgacgctgacgtcgaccccaacatcggcccctacgtcttcgagctgccctttgtcccggcggccgtgcggaagaactggaccatcacccgcctgaacggtgactatgcccaactcagcttgcgcatcctgtacctggaggccgggatgtatgacgtccccatcatcgtcacagactctggaaaccctcccctgtccaacacgtccatcatcaaagtcaaggtgtgcccatgtgatgacaacggggactgcaccaccattggcgcagtggcagcggctggtctgggcaccggtgccatcgtggccatcctcatctgcatcctcatcctgctgaccatggtcctgctgtttgtcatgtggatgaagcggcgagagaaggagcgccacacgaagcagctgctcattgaccccgaggacgacgtccgcgacaacatcctcaagtatgacgaggaaggcggtggcgaggaggaccaggactacgacctcagccagctgcagcagccggaagccatggggcacgtgccaagcaaagcccctggcgtgcgtcgcgtggatgagcggccggtgggcgctgagccccagtacccgatcaggcccatggtgccgcacccaggcgacatcggtgacttcatcaatgagggactccgcgctgctgacaacgaccccacggcacccccctatgactccctgctggtcttcgactacgaggggagcggctccaccgcaggctccgtcagctccctgaactcatccagttccggggaccaagactacgattacctcaacgactgggggcccagattcaagaagctggcggacatgtatggaggtggtgaagaggattgactgacctcgcatcttcggaccgaagtgagagccgtgctcggacgccggaggagcaggactgagcagaggcggccggtcttcccgactccctgcggctgtgtccttagtgctgttaggaggccccccaatccccacgttgagctgtctagcatgagcacccacccccacagcgccctgcacccggccgctgcccagcaccgcgctggctggcactgaaggacagcaagaggcactctgtcttcacttgaatttcctagaacagaagcactgtttttaaaaaaaaaaaaaaaaaaagaagaaagaaag

SEQ ID NO: 3655 - DNA, 2728 bp, Homo sapiens
  source 1..2728: mol_type = unassigned DNA
ctagggcagtccgaggagattgaaagggcaaaactatcaagcaagaaaactgtaagttctgattagttttatgactttgccttcatgcctcaggagctcaactgatcacggctttcacgacaggctaaggtacttactacaccattctttggcgaaggctattcagcagtggtgacctcttccaatccaacactctacagattattatctctggactcccagctgacaccctgccggaggcaagagctactaagccaactggaactgtgccttttctcttgtcaaggtttttttcttacacaggaaaaagaaagaaaaaaaaaagatgaagttgggcaaagtggagttctgccattttctgcagctaatagctcttttcctgtgtttttctgggatgagtcaagcagaactctcaaggtccagatcaaagccctatttccaatcagggaggtcccggaccaagcgcagctgggtgtggaatcagttctttgtgctggaggaatacatgggttcagaccccctctatgtaggaaagcttcactctgatgttgataaaggagatggttccatcaaatacatcttgtcaggcgaaggggcaagttccattttcattattgatgagaacactggggatattcatgccaccaagagactggatcgtgaggagcaggcctactacacgctccgagctcaagcgctggataggctcaccaacaaacccgtggagcccgagtcggagtttgtcatcaaaattcaggatatcaacgacaatgaacccaaatttttggatggcccatacacggcaggagttcccgaaatgtctcccgtggggacctcagtggtacaagtgacagcgacggatgctgatgatcctacatatggcaacagtgccagagtggtctacagtattctgcaaggacagccgtacttctcagtggagccaaagacaggagtcatcaagactgcccttccaaacatggatagagaggctaaagaccagtatttgcttgtcattcaggcaaaggatatggttggtcaaaatggaggactgtcaggaactacatcagtcactgtgaccctaactgatgtcaacgataatccacctcgctttcctcgaaggtcttatcaatataacgtcccagagtcattacctgtagcctcagttgtggccagaattaaagctgctgatgcagatattggagctaatgctgaaatggagtacaagattgtggatggtgatggtttgggcatttttaagatttctgttgacaaagaaacccaggaaggaatcattactatacagaaggagctggattttgaagccaaaacaagttacacgctacggatagaagctgcaaataaagatgccgaccctcgctttctgagcttgggtccgttcagtgacacgacaactgtgaagataattgtggaagatgtagatgagccccctgtgttctcttcacccttgtaccctatggaggtgtcggaagctacccaggttgggaatatcattggcactgtagcagctcatgacccagattcttccaatagccctgtgaggtactcaattgacagaaacacagacttggagagatacttcaatattgatgccaacagtggggtcatcacaactgccaagtctttggatcgagagacaaatgctattcacaatatcacagtccttgcaatggagagccagaatccatctcaagtaggaagaggctatgtggccatcactatacttgacatcaatgataacgcccctgaatttgccatggactatgagaccaccgtctgtgaaaatgcccagccggggcaggttatccagaaaatcagtgctgtggataaagatgagccatccaatggacaccagttttacttcagcttaacaacggatgcaacaaataaccacaacttttcattgaaagataacaaagacaacacagcctcaatactgaccaggagaaacggcttccggagacaggaacaatcagtttactatctgccaattttcattgtggacagtggatctccctcacttagcagcaccaacaccctcaccatccgcgtgtgtgactgtgatgctgacggcgtagcccagacctgcaatgcagaggcctatgtcctacctgctggcctcagtacaggagccctgatagccatactcgcctgtgtcttgacattattggtgttgatcctccttatcgtcactatgagaagacggaaaaaagagccccttatttttgacgaagaaagagacatcagagaaaatattgtgagatacgatgacgagggcgggggagaggaggacacggaagcgtttgacatggctgcactgagaaacctcaacgtcatccgagacaccaagacccggagggatgtgactccagaaattcaattcctgagtcgaccagcttttaaaagcatcccagataatgtcatctttagggaatttatttgggaaagattaaaagaagccgatgttgatcctggtgctcctccttatgactccctgcagacatatgcttttgaaggaaatggctcagttgctgaatcactcagctctttagattccatcagctcaaactctgatcagaactatgactacctaagtgactggggacctcgctttaaacgactcgcggacatgtatgggactggccaagagagtttgtactcatagccttggaaccttaattcgaaatgtactgaagaaaaagtaacagca

SEQ ID NO: 3656 - DNA, 3766 bp, Homo sapiens
  source 1..3766: mol_type = unassigned DNA
ctgggaggcgccgaagtctcagtggctccctgggccggcctccgacagcgctgacagcaggcgcccgccgcccaccatcgtcgccctcttcccctccctcttcggccccggctccggcgcgctctctcctcctctcctgcgcgccctctcgccctctctctggccgcgcgctcccgctggctccggaccctgcgtctcagctgcccgggcgagccggaggggcccctcgcagtgagcagacgcagcgggcccccggcgcccgaggccggggcagggtccccgcgcaccgcggagtgggctgtgattggaggaggagcccgtgccgggcgggcccgagcgggtgtcgagccggttcctccagtctgccccgcgcgcggagctgcgcgcactgggtccccaagagcccgcgggcgtccggcagccgagcgcacgttctttcggatgcacacgcccgggtccctggcgtctgacgccgtggggagggcagcgaggccccaggtacttactacaccattctttggcgaaggctattcagcagtggtgacctcttccaatccaacactctacagattattatctctggactcccagctgacaccctgccggaggcaagagctactaagccaactggaactgtgccttttctcttgtcaaggtttttttcttacacaggaaaaagaaagaaaaaaaaaagatgaagttgggcaaagtggagttctgccattttctgcagctaatagctcttttcctgtgtttttctgggatgagtcaagcagaactctcaaggtccagatcaaagccctatttccaatcagggaggtcccggaccaagcgcagctgggtgtggaatcagttctttgtgctggaggaatacatgggttcagaccccctctatgtaggaaagcttcactctgatgttgataaaggagatggttccatcaaatacatcttgtcaggcgaaggggcaagttccattttcattattgatgagaacactggggatattcatgccaccaagagactggatcgtgaggagcaggcctactacacgctccgagctcaagcgctggataggctcaccaacaaacccgtggagcccgagtcggagtttgtcatcaaaattcaggatatcaacgacaatgaacccaaatttttggatggcccatacacggcaggagttcccgaaatgtctcccgtggggacctcagtggtacaagtgacagcgacggatgctgatgatcctacatatggcaacagtgccagagtggtctacagtattctgcaaggacagccgtacttctcagtggagccaaagacaggagtcatcaagactgcccttccaaacatggatagagaggctaaagaccagtatttgcttgtcattcaggcaaaggatatggttggtcaaaatggaggactgtcaggaactacatcagtcactgtgaccctaactgatgtcaacgataatccacctcgctttcctcgaaggtcttatcaatataacgtcccagagtcattacctgtagcctcagttgtggccagaattaaagctgctgatgcagatattggagctaatgctgaaatggagtacaagattgtggatggtgatggtttgggcatttttaagatttctgttgacaaagaaacccaggaaggaatcattactatacagaaggagctggattttgaagccaaaacaagttacacgctacggatagaagctgcaaataaagatgccgaccctcgctttctgagcttgggtccgttcagtgacacgacaactgtgaagataattgtggaagatgtagatgagccccctgtgttctcttcacccttgtaccctatggaggtgtcggaagctacccaggttgggaatatcattggcactgtagcagctcatgacccagattcttccaatagccctgtgaggtactcaattgacagaaacacagacttggagagatacttcaatattgatgccaacagtggggtcatcacaactgccaagtctttggatcgagagacaaatgctattcacaatatcacagtccttgcaatggagagccagaatccatctcaagtaggaagaggctatgtggccatcactatacttgacatcaatgataacgcccctgaatttgccatggactatgagaccaccgtctgtgaaaatgcccagccggggcaggttatccagaaaatcagtgctgtggataaagatgagccatccaatggacaccagttttacttcagcttaacaacggatgcaacaaataaccacaacttttcattgaaagataacaaagacaacacagcctcaatactgaccaggagaaacggcttccggagacaggaacaatcagtttactatctgccaattttcattgtggacagtggatctccctcacttagcagcaccaacaccctcaccatccgcgtgtgtgactgtgatgctgacggcgtagcccagacctgcaatgcagaggcctatgtcctacctgctggcctcagtacaggagccctgatagccatactcgcctgtgtcttgacattattgggtaggtactgtttccagggcttgctctgaaagagctgtcacaataaccacatgtcacgacttgcctattatcttctccatttggtgaacatatgcagatattctactggatggtgtttgttttgttttgtttttctttgagacggggtctcactctgttgcccaggctggagtgcagtagaatgatctgggctcactgcagcctctgcctcccaggttcaagcaattctcccacctcagcctcccgagtagctgggattacaggggtgcaccaccacacccagctaacttttgtatctttagtagagactgagtttcaccatgttgggcaggctggtcttgaactcctgacctcaggtgatccacccaccttggcctcccaaagtgctgggattacaggagtgagccacagctcctggcctggatggtgttttgctcactaagtaatacaattgttggccacactttccagtggtatatttgaagtataactcagacaaaaagttgtatcaatttcattttcaaagcaacagtgaagataaatggcttatgctttaaattaatgctttttaggattaaaaataatctatcttatcccagttctttgctttagagcactctacagaggagatacactagactggagaatacattttctatattgttttgacaatatgcttattttagaaattatggctttatattctactttttaaagaaattatttgattgctttcttaaattatttgcaaatttgaaatgattacaatttcagcaatgcaaatcttatatttttaaagtattaaatactaacacatttaattgtacatttccatgattagtttattactcggttaaattaaatttataactcatatttgcagtaactcagattttgcagcatccttttaaaaattgggagatgtccaatgtggacactgggtaatgggtttattccaaagaaacatttttcttcacattgtaacttgtaacacgaacacaacaagaacagagtaaacattcaatataccgttccatatggtgaatgttcaataaattttaagtgttactgatggaaaattataagctaagacctagttactaatacattataaatgctgtcgtgaaaatggaggttattgtcttaagtaacttaagctaaacaagtaaatctaaaagaaaataaactatattttgcatagaacttta

SEQ ID NO: 3657 - DNA, 12231 bp, Homo sapiens
  source 1..12231: mol_type = unassigned DNA
gggcagggtccccgcgcaccgcggagtgggctgtgattggaggaggagcccgtgccgggcgggcccgagcgggtgtcgagccggttcctccagtctgccccgcgcgcggagctgcgcgcactgggtccccaagagcccgcgggcgtccggcagccgagcgcacgttctttcggatgcacacgcccgggtccctggcgtctgacgccgtggggagggcagcgaggccccaggtacttactacaccattctttggcgaaggctattcagcagtggtgacctcttccaatccaacactctacagattattatctctggactcccagctgacaccctgccggaggcaagagctactaagccaactggaactgtgccttttctcttgtcaaggtttttttcttacacaggaaaaagaaagaaaaaaaaaagatgaagttgggcaaagtggagttctgccattttctgcagctaatagctcttttcctgtgtttttctgggatgagtcaagcagaactctcaaggtccagatcaaagccctatttccaatcagggaggtcccggaccaagcgcagctgggtgtggaatcagttctttgtgctggaggaatacatgggttcagaccccctctatgtaggaaagcttcactctgatgttgataaaggagatggttccatcaaatacatcttgtcaggcgaaggggcaagttccattttcattattgatgagaacactggggatattcatgccaccaagagactggatcgtgaggagcaggcctactacacgctccgagctcaagcgctggataggctcaccaacaaacccgtggagcccgagtcggagtttgtcatcaaaattcaggatatcaacgacaatgaacccaaatttttggatggcccatacacggcaggagttcccgaaatgtctcccgtggggacctcagtggtacaagtgacagcgacggatgctgatgatcctacatatggcaacagtgccagagtggtctacagtattctgcaaggacagccgtacttctcagtggagccaaagacaggagtcatcaagactgcccttccaaacatggatagagaggctaaagaccagtatttgcttgtcattcaggcaaaggatatggttggtcaaaatggaggactgtcaggaactacatcagtcactgtgaccctaactgatgtcaacgataatccacctcgctttcctcgaaggtcttatcaatataacgtcccagagtcattacctgtagcctcagttgtggccagaattaaagctgctgatgcagatattggagctaatgctgaaatggagtacaagattgtggatggtgatggtttgggcatttttaagatttctgttgacaaagaaacccaggaaggaatcattactatacagaaggagctggattttgaagccaaaacaagttacacgctacggatagaagctgcaaataaagatgccgaccctcgctttctgagcttgggtccgttcagtgacacgacaactgtgaagataattgtggaagatgtagatgagccccctgtgttctcttcacccttgtaccctatggaggtgtcggaagctacccaggttgggaatatcattggcactgtagcagctcatgacccagattcttccaatagccctgtgaggtactcaattgacagaaacacagacttggagagatacttcaatattgatgccaacagtggggtcatcacaactgccaagtctttggatcgagagacaaatgctattcacaatatcacagtccttgcaatggagagccagaatccatctcaagtaggaagaggctatgtggccatcactatacttgacatcaatgataacgcccctgaatttgccatggactatgagaccaccgtctgtgaaaatgcccagccggggcaggttatccagaaaatcagtgctgtggataaagatgagccatccaatggacaccagttttacttcagcttaacaacggatgcaacaaataaccacaacttttcattgaaagataacaaagacaacacagcctcaatactgaccaggagaaacggcttccggagacaggaacaatcagtttactatctgccaattttcattgtggacagtggatctccctcacttagcagcaccaacaccctcaccatccgcgtgtgtgactgtgatgctgacggcgtagcccagacctgcaatgcagaggcctatgtcctacctgctggcctcagtacaggagccctgatagccatactcgcctgtgtcttgacattattggtgttgatcctccttatcgtcactatgagaagacggaaaaaagagccccttatttttgacgaagaaagagacatcagagaaaatattgtgagatacgatgacgagggcgggggagaggaggacacggaagcgtttgacatggctgcactgagaaacctcaacgtcatccgagacaccaagacccggagggatgtgactccagaaattcaattcctgagtcgaccagcttttaaaagcatcccagataatgtcatctttagggaatttatttgggaaagattaaaagaagccgatgttgatcctggtgctcctccttatgactccctgcagacatatgcttttgaaggaaatggctcagttgctgaatcactcagctctttagattccatcagctcaaactctgatcagaactatgactacctaagtgactggggacctcgctttaaacgactcgcggacatgtatgggactggccaagagagtttgtactcatagccttggaaccttaattcgaaatgtactgaagaaaaagtaacagcaaaaaataaaataaaatgaaataaaataataaaccactacatacagaaaacaagaactccccttgctggagacagatggttgtaaatatttctccatttttaattgtttagatttctgccttggtgaggcatatcttcattagacttatctaaaggactgcactgaccacagactctgagcatttgaaggttttttgataaaaataaatgctcagtggtttgtgaatagatagcaactctcatatacctgcaaaggcaccaaacctctatgagaaagtagtgccctgtgttgtcagtgagtcaaagatgccctgtacataccttcatggtactgtcattgagaggaatagaacatgatgagctattgaaaaaccctggaacttgttgcatatcaaaacttgggacaaatttaatttacagagatgcttatagcttactatattatagaatccaacagaattatgttgctcttgattaacagaaatattttatttaggaatatataaattcccagaaattccttcctaactgaaaaccctaccacaaaagccagtaaaatttagtttaaggcaatataaaccattgtttatccaataaattatgaagtgttccaaataagaaaaaggtaaataatttgatagttttgagatgcttgtgtaggtatgataaaaaaaaaagttgctgtctgttcattgatttttattatctcttctgatttgtacaggagaatatcttttcttttttatttgacacatggtgttgtatttattttggagctccaatctccactaaattcaggtccatcatactgcctcatagtattaaactcatcagaacatgctgatttttctccagcccgagctacatgaaggaaatgaagcatggaaatggagaactaatagtaaagcaattgagccctgttgcaggtcacatctcaaagaggagcacagctacaaggacatataaattgttcttctgagccattagaatgtcaaaacattggaataaaatatttgtattttagaaagacttcagagagaattgagattttctttgatgcaagaattatttttcaagatcatgagttctacatgctccaaagacgatttcaagaacacaacctttcttgctgcaaacctattgagtaaaatattgagtttttaaaagtcttaatataatgttataaaaattaaaatccatctttaaattctgatgcaaatatgtccctcaagaattaaccaagcaatgtatgatttctgtgtggtttagatgtgccaaaggaaggaaggcaattgcaagtcatcatgtgtttaagtttgagttgagcttgttagagtatgactttcatgaccaaaatgatgtttctacctattatttttcctagattaatactagtttaatgtgcatatacattcaagtaagaatggatttattttttccttcctttctccttttaaaaataattcattgttgggttcctaatacatttacagatagtaaacactgtgtagagaatcatgttctaaaagtgctttttgaaaggtagacagtggaattagaatattaatatgttgattacacaaagaagaactatgtaggattctgtaaacttgcagcccaactttagaaatgaagtatgtaaaagtggccttcaacttcataagtataaataatccaataaatttcattacctgcaaacagttctttaatttgaatagagttttgtagacattgttttatgactatatagatatgcttcttgctgtattaatatgcatatatattttaaaaaattataacagtgaaagatactgttcataacttttaatcacacatgcaagtttttcaaactaaaaaataacaaacaaacaaaaaaacacgcgtatttacccagttcaataaaatcagagtgtggtgcaggaattacagagttgttaagtcagcaaggtgctgagaaaacagtttgtaataatccccttgttgtctgcaagaagatgaaatagtttagtacatttggatgatgtcaaaactgctgattgttgcacataccactaaacggaggtgtggatgtattttagaaaaggaacacacatcattcaccctgctttttctgcttttaaaatgtgtgttttttctcattaattttttcaaatggttaccaatgatagattggaaaaagaaaggttcatgtttaaataataatttaaaattattgcatatacccaattgctatttatgtgtggatgattatatgaatacagtattacatttcattcagtggtattttttaattaaaaaaattaatttaaaaaattaatttttgagatggctggaagaatgttcctaatataggtagtatttatatgaagtattctaagcttaattgtaatagtagtaaattttttgccgttgcttattttagttttcttttttcttctgaaatctaatgctatatatgatgactgtcaatacttgagatataggctttgttttaaaaacagtgattgaagagctgattgataaaattaatattaagtctagttggaaaattctccaaatatgatttaaataaatatatattatcaagttgcttaaattcagtattatactgaaaccaactagaatgagctcacaggaactaattcttcatatctcttcccaactccaggtacagtgatatcattttggtaggttgatgtcagccttggtgggattatttagaccacaacagtaatcagcaaacactacccttttctctggagaacaagttgttaaacatttaccagcactctactgcttaaattattttataaaatgaaatgtcataattgtaaatatagtatgaatttatatgatttaaaataatgacatgaaaggaatttatgctatattttactactaaataacaatgtatgtggtagtgatttcctgaagtgaaatccttggagctacttgtagacagggagaggagtcacttctttatggaaaacaatggctaaatttcaagtagagataatagttcaggaagtcaatatatttaattattttccacttgtccatacaggagcatcaatagaaactcagggtttgccaaattatgcccattttgaacagtttaatttattgaaaaatcagatgcattttacttcttactgtctatgtcaaggaaatacacccaagcccttaatctgaattgtcaccattgcattattaaaaatcaacataaaaatataaaaatcaaatcttaaggaaatggatttctggagatcaagcctaaattatcaatctcaattcacaaattagtctctgaaagaaatattccaagatcagccagctaaggaacaaaatcaggaaagagacatcaataaaaaattaggtagtaatttgcaggcaataagtagatttttgatttttctacaagcaatcaccagatctgggatctggtaaatgtctttatttgccaggaagctctgctgatgactacaattgaggttagttgtctacaagatacatgcaggaggtagtagtggttaagtaatggtagctgccttttcactctgccctctgaggaagttttaaattattttatcttcatgcacaattacatttactacattggatggtagacataggcaattattttcatgtcaacggcatagttacacaatgtaggaatgatatttgtgaagtgatccacatgcccaagaaatgcaaatgcaaatagtgttgttagcatttatattgaaatataaaatctaaagcagcttaaaataagctaagctaaacaaactgcaagaagctaaatgatttaaacatgttaaagttttaaagcactagctgtaaatattaatcttcagattttcaatttaacatgtattcacttacaaactgttctaataataacactaattattttccaagtcaccatttaaagttttatttacagttgacctaatccaattgaagttgatgaaagcttcaacttattttttaactctttctggtccacgatgcctggaggcaagtgaaatatatatgacaaataatagataaaccaatttattttctgttagtgtatgtttattttttaattattaataatgtatattgtgtgtatatatgacggtgtatgaaagttggcaatgaaagctaatacaatcatgttagtcggctggatataataaagaacaagaaaggaataatagcatttgcattttaaatgtaattgaaactatttcagaagagtgggataagcccttaagaaaaatgggagatgtttaaggctgtgatttggccgacattgtaacgtataattctgtgggaaatttttcaagcaaatcaagacaggcagtgtgcgttgcattctgacactttttcattgttatgctaacttctactggcttagaatgtaactgaaaaggatgtgtgcctgtgtttttttttttttttttttttttgacgtggagtctcgctctgtcgcccaggctggagtgcagtggtgcgatctcggctcactgcaagctccgcctccagggttcacaccgttctcctgcctcaacctccggagtagctgggactacaggcgcccgccaccgcgccccgctaatttttttgtatttttagtacagacggggtttcaccgtggtctcgatctcctgacctcgtgattcgcccgcctcggcctcccaaagtgctgggattacaggcgtgagccaccgcgcccggccctgtgtgtgcgttttcatgtgtgtgattgggaaccttgagagatgtatctgaagtaatgtaaaaataagagtctcataattcctggttaatgctggcgtattgttgtcacctgccaagtgactgttaggcaataagactagaaaatatggtaccgaatgaaaggagaaatatcttatttgctgtaacaatctaatttatattaaggtaaggattttggtggctaaggaaagaacatttagctgttatttgtgtaattgtcacatattattgtgcagatttaatctcattgttaacagaatatagagtgtgaattatttgttattaaatgttactgggctttggtgtcagtgtggtataccagaaattacctctggtctgtggttataaaatctaggtcagaagctcagtttcgccacatttttgctgtgccctagatgccattttcattctctgaacttttatagcttcatgattaaaattgagttaattactattgtgtttcagaggcttgtgaatgattaagtgaaagactgtgtaaacagtaaaacactataaaaagataaagctttattatgggaaataatgggaattatataaaaaggttgataattgttatatggtaaacagagaatttctgtttggagatacatacattaaggaaaaatatatgcaacttggtatcctaaattggaaaataatattcaaatagataattgtcataattaattgaagccactcaaatacagttatttataagatctcagaagattgcagtttaactcaacataattcaaccattcatatgaattaatgatatccatatgtgaatgggattataaataaagaacaaatctttcttacttataatgataactgagtggaagataaaggactgcctttagatgatcccagcctcattgatgaacacaaaacaccagaatagagaaaaagacaataatgagtataagttaagtggtcttccaggcatccagagtagataaagaaaatgaagttctagagaatacaatactttttaaagtcacagtgacatatgtgtaattaataatttatacacttgaaaaaattagatgcaatgatattgacttaacatgaaaaccatcctgaatgcaatgcactcttgatgactcaaactcacttatatcttacaacagctcatcttaatctcttacgaatgaagaaactctaggaaactaaaaaataatatataatggatattactttttgtcagtgatgccaagatgaatgttaataagctctcttctcaactttagctcttagttatctggttattttatgctcatgtgaacagacactagaaacaaatatattaataactatgtaactaatgagaatgttgaaagtacagcatactttcattcaaaaacaaacttgcattttcattttattaatgaatataatgatgttaatggtttatataagcaggaaaaacttatatgattcactaccctacagcttcatgttctaattttgtgagtataaaccctatgtttttgtatatcaagatctggaatatgttgtatactgtatatgaccaatactttaagaacaatcaagtttttttattattattattatactttaagttttagggtacatgtgcacaatgtgcaggttagttacatatgtatacatgtgccatgctggtgtgcggcacccattaactcgtcatttagcattaggtatatctcctaattctatccctcccccctccccctaccccacaacagtccctagagtgtggtgttccccttcctgtgtaactatatagcaatttcattttacatgcagtaattttaaatgcccaaaaataaaaggaaaaggaaaaataagtcactacacaacttatatatattatgtatttgtctttgaattttgtgtgcgtatgtgtgtgtgtatatatagacagcatgcgcacacatacatacacgtgtgcaggaacacacacaatttgaggcgaaatgttgaagtaaagtaaatgacttttaaatattttctttttagcttttaagatgtctattagatccaacctctacaattaaattatatgagcatactgagggagaattgcacatttgtaaagtttctctttagtagagatttcagaattttttttctcaaatttagaggaacgaacaattcacattagtaaaacacacagcattactttcaatgaaactataatttttatgtttatgagattccattataattacattaaaaagaaaaccacttttataatatttttgcttatgtaagagtcacttctatagtaaaagagccttaaaaatgttaattcaattgactgcagaattgatcctgaaaatccagttcatttaaccttggaaatgagacatgaagcataaaacctggggtcaggatgtatgtccaaactgaatagattattttcgttcagctcaagtgctatctttcaggcaaatagactcctacaatattcagtattggagatgtttaaaacaaatataagaaagagtactgtttcagaactaaccagcgaagagatgtatacaaagtgtactctgaattggaataagtgtaggaagacaagccgtgagaatgtgagacctcagtatattgctgtgttttattgtgtgttttgctgtatttttaaaaaataagaaaaaattatcacagagtaagatacatagaagaaaataatttccgcaattcttggtacctcaaaagacctgacacactacaatgaagacttctgttgtcatcattctcagctgtgatggtggcgccatcctggtttccagcttatacctcctgacaactcggtacagaaaatgagtatcattgtaattaaagtttgatattttcttctaagtgactgatttttaatataaaagtatcacaataaagtttttccacagatatgtaattttaagttagataacattctaacatatacatggtttcaattttcttataagtctgtgaatcactcaagttaggcattgttaggttttttaaggaaaaactttgatgcccagaataactgtaacttatgcaaacacacacacacacacacacactcacacacacacgaagtaaatggtagaaatgaaagaagaagaagaagaaaaaaacattgggacattttgccctttatctttttattaagactgtcaataaatgatggtttggtttaagaggataagaagatagctgaaactctaataattggactttccaatcttaattatgctttagttcccttaccaggattaggaaacttctttgtgattcttttttaaaaataatttaatcaggaagtgacattaaattctgtttcaatgtaatgagaaaatagaaatatttatattgtcattacgatggcacttcaccagtatgtcctaatctattctctattacgtctctgaggtgggacattgttgtgagaatggacgagagcacaaaaacacggcagaccagattttctgagggttacccgctatgcagattcataaacttgttattgaatagttggcacacaagggtaggagaaaaatcccaacaacccttccaccttttccaaaaagaaaaaaaagaaagaaaaagctaaatcttatgaagctaaactgtcaacaaacagttccactgaagttgccatagggacagctccaacccagtgctgggctcgtggaaggcagcaaggtacctgcatcaagccaagatccatgaaagtgctaatgtcatttgaggccagtttcacccctacctcccataaatcattttaaaccaaatatgaattagtagtcaaaaatgaccaaacacagacgataacccaccatgaaggagatggttcatagaaatctccaagaacttcagataattcaggtaattatcagaaacatgacaagaaaaagctttgtgtaaaatacagaatacaacacaaggaataatgaaaagatgatctatgatggtgtatacttgcaaaataactaaagagtgtatttaagatttaaatatatctttgaagctagaagtactatggagattgtatatactatattagacactgtgcaagaaggaacttgtgaagctaaaaaatagaatgcaataaattagctagtctgccacatagagaaaaaaagataatctgcaagaacataagggacaaggataaaatacggagtttaacgtgcttataaccagtgtgatccttgttaatcagaattctagaatgttccattgccttatgtgacacctccactgcccccactttttctttttttttgacaaggtctcattatgtttcccaggctggcttttaactcctggcctcaagttatcctcctgcctctgcctccttaaatactggaattacaggtgtgagtcaccatgccaggtgtctcccattttttaatggtagcttaacttcacctgaagcctcctatgccactatctttataggaagctttaccgactttgtacgacttggtttaatttattcagcttaatggtccatttaaccaatattgttataaatttatgaagcttcaattctagcaaaaataaactatgtgcactcatcaaaatgtgtggcacacctatgaaaagtgatcaggatgcccaagcaattttaattaaaatcagataattaaatatg

SEQ ID NO: 3658 - DNA, 741 bp, Homo sapiens
  source 1..741: mol_type = unassigned DNA
gtgctggaggaatacatgggttcagaccccctctatgtaggaaagatatggatctataacagatgaataaactgggacccaagcaccatcaagacagcacaacatggagcagaatggagattcagtagccatacctggggcttctttgcattgaccttccaattgggccactctgcctctaagaaaatggaccgtgaccccctagaatggctgtttctcacaagtgaattactgtgaactttttctgagaataaaaacaatatgagtagtattttttcttttcatttgttacttaataaaagaaatgatatttagggcaatattaccattacctatgcacttcctgaattatgtctctttcctttattcttgtttgtaaaacaattaatatcttcttaaaccacacgtcttcattagagatgctttataagtgaattgtgttccattaccttgaaccacagtaataattataaattaggaatacttcaaccagaaagaaatgactcatacatttgttttcatctgtaacatttattcaacagcttgataattgcaatatatacagtggtatgtggaaaatatttattaaaagacataatagaaaacttgtttataatatgtatattcaggcatttttacttctgccaatcattgtttaaatctaccttctatacttaaaattttaaccttgtaaaattttaataaaattaccctgtatgggttctaataatctggaataca

SEQ ID NO: 3659 - DNA, 8009 bp, Homo sapiens
  source 1..8009: mol_type = unassigned DNA
gaaatttcaatgaaaagaaaagccaatggattgtggtcttagaaaagctgcttagatgatgtctgtttcccgtgctatagacacgtggcagagctgtaagtaaatgctcggcactgcatgatgaattggatggctgcagaccggagacaaaaaaaataattgtctcattttcgtggtgatttgcttaactggtgggaccatgccagaacggctagcggaaatgctcttggatctctggactccattaataatattatggattactcttcccccttgcatttacatggctccgatgaatcagtctcaagttttaatgagtggatcccctttggaactaaacagtctgggtgaagaacagcgaattttgaaccgctccaaaagaggctgggtttggaatcaaatgtttgtcctggaagagttttctggacctgaaccgattcttgttggccggctacacacagacctggatcctgggagcaaaaaaatcaagtatatcctatcaggtgatggagctgggaccatatttcaaataaatgatgtaactggagatatccatgctataaaaagacttgaccgggaggaaaaggctgagtataccctaacagctcaagcagtggactgggagacaagcaaacctctggagcctccttctgaatttattattaaagttcaagacatcaatgacaatgcaccagagtttcttaatggaccctatcatgctactgtgccagaaatgtccattttgggtacatctgtcactaacgtcactgcgaccgacgctgatgacccagtttatggaaacagtgcaaagttggtttatagtatattggaagggcagccttatttttccattgagcctgaaacagctattataaaaactgcccttcccaacatggacagagaagccaaggaggagtacctggttgttatccaagccaaagatatgggtggacactctggtggcctgtctgggaccacgacacttacagtgactcttactgatgttaatgacaatcctccaaaatttgcacagagcctgtatcacttctcagtaccggaagatgtggttcttggcactgcaataggaagggtgaaggccaatgatcaggatattggtgaaaatgcacagtcatcatatgatatcatcgatggagatggaacagcactttttgaaatcacttctgatgcccaggcccaggatggcattataaggctaagaaaacctctggactttgagaccaaaaaatcctatacgctaaaggtagaggcagccaatgtccatattgacccacgcttcagtggcagggggccctttaaagacacggcgacagtcaaaatcgtggttgaagatgctgatgagcctccggtcttctcttcaccgacttacctacttgaagttcatgaaaatgctgctctaaactccgtgattgggcaagtgactgctcgtgaccctgatatcacttccagtcctataaggttttccatcgaccggcacactgacctggagaggcagttcaacattaatgcagacgatgggaagataacgctggcaacaccacttgacagagaattaagtgtatggcacaacataacaatcattgctactgaaattaggaaccacagtcagatatcacgagtacctgttgctattaaagtgctggatgtcaatgacaacgcccctgaattcgcatccgaatatgaggcatttttatgtgaaaatggaaaacccggccaagtcattcaaactgttagcgccatggacaaagatgatcccaaaaacggacattatttcttatacagtctccttccagaaatggtcaacaatccgaatttcaccatcaagaaaaatgaagataattccctcagtattttggcaaagcataatggattcaaccgccagaagcaagaagtctatcttttaccaatcataatcagtgatagtggaaatcctccactgagcagcactagcaccttgacaatcagggtctgtggctgcagcaatgacggtgtcgtccagtcttgcaatgtcgaagcttatgtccttccaattggactcagtatgggcgccttaattgccatattagcatgcatcattttgctgttagtcatcgtggtgctgtttgtaactctacggcggcataaaaatgaaccattaattatcaaagatgatgaagacgttcgagaaaacatcattcgctacgatgatgaaggaggaggggaggaggacacagaggcttttgacattgcaactttacaaaatccagatggaattaatggatttttaccccggtggggcttgccaattcagtggtgggaggagagaaatcccattcaaacatgcttgttttctagaagcaggattcctcgttccctcctcttcatcttcttccacaaggacacaaagataaactgtatcacacagtggactacataagagacagatggttttattgctagcgcgtgaatttatttgtttaatcctcgaaataaatattttattgatgtccattaatgcttttatttattaaggtcggtaatctatagattaaggggatatatgggaaaaaactaaattatatccattaataatcctttagattgttttatataaatatatatacaatgaatgtttaatacatgtacattttgatgagatgagtatggcaggcaatattatcgaaaggagagctaatagtctctttagagtagaaagtgttattgtaactggagatggcaggaacagcatcttcccagacaaacttttggactgttttctattttgttcataatcctagtatttggtgtttttactacaagcacaaacatcctaaagtatattgattcctgtgaatatttaaactctagacttttagatacctacatcatgccctgcccaataaacatgcttcaatttacccccacagttttagagcaggaactgatttgtacataatttcactgtttacgtttttagcactcctatccctgatcttcatggtgatgcacagaatgtcttagactccaaaaaggaacagcactagaagatgtgagcatatttaatttgtaatgcaaacctgccatttaggagtagaaaatgtatgataaaactcaagtattacatgcagatcattttaattttctactttgctttaatgcaatattgtttattcactccatgtattgtattcagagaaactcctgtattgtttcctactttgtgaaatatatttttataaatacctttgttgtcattaatttttttttcaatcagtggaagatctattaacagaatcatcaactcaaactaaaattctagaatactcaaccaaatcatcccaagggtcacttttgtttgtaagactctttattatagagaaacagagaagagaaatggcttgccagtgatcacacagcaagataccagcagggacataagaggaacatggaacacctaaaggctagtccagctgtgtcatttgggtccttctggaagcagacgcattgggcagggaaaaccttcagacaagtttgcagacctaaaacttgtaacaatagagggattgggagcaggatttggcaagagagtcttagactgcagtgcggacctggcaaaatctctgccagtctgacagggggttctagagtgaaaacacatccattaaagcagtcaggctgtggtcctctgtcatctcagtcattggtgcggggctgctaagaagagaacggtttttgactcaaaagctgaacgcaccaacttctagaggccaccttcactgtgacagaaactgcatgtttaaatactatactaacaatttataactatccggtggcttaatcaactttttattgagtttctgttgctgagaataagtcatcttttatgcgtattattacggctagtgaacactttttcttgaggtcaaagggatggtccaacatgactttaaaatatactaggacttggcacagtgtctaaaacaagtgcttggtgaatgtaaattattagtagtagttgcagtaataaccaatagtaatattccaactatcttacaccttccaaaccaaggagagattattatgttttatgtatctcttgaacaccagactcatttctagtgtactttgaagtgcccaaagattatagacacacaaatatgtctaacagaataattacagtattttttaaggagtataaaatctgtatcctcaaatattggtaatcaacaggataatcttcgtacagtggtttctgtgagcaggagataatgtctgctctactagttgcccaaatatcgcctaagtattctctttgcctaggaacacagaatgaaagcttgcatctcttgctgactttctttgccaccacagtgtcagcattttgtgtttaaaagcctatttcaggtcttgtaacatagaataaagtgactaataccttgatcctaataagattgacctatacttttagagtgtcatgaattaaactaaaaatctcaggaactatctctctctttctctctttctctctctctctctctctctctctcacacacacacacacacacacacacacacacacacaacaaacaaataaaaaacacacattttgacttgaagttttactttagcaatagacttgccaggactttcccaaccaaaagatatcaataaggttcctaacattttctaagatttaagtatcccatgctcaatttgttaaataacacattttaaaaactttattgaaatgactatatttttaaagctatgtgcattgttgtctgtttcatcaacattgacatagcagaaacaagagtactctctgctaaatagagaagaatgattaagttggagccaagtgagacaaagttatctccctctgcctacctcacaattcaaggttcccacctagggaactgatgcatccctgggtgattggacacaacatgggatcaattcagcctctactctgcctatgatttgatcaaatcatattagcaaagtgtctcttaaacatccatatatgaatattaaagagtattaaggggggcatttcttaacaatatttttatgagtatagttataagtttctaaacatttataatacgatgactaaaatatgctatttttaaattcaagtgttaaccttgccacacagaattatgacttctagggtgtaaactttaaagtgaaactgttttgaaaaaaatctgcagttaagtgtatgtgtatatatagaagaaaaggaaacttagatttactggtatcaccagtgaagcaagaatgcttagaaagatacaaatgtgtctttgggagagtctgcttaatcagatgcttaaagtaagacaagtctctgcatgagacttagaaatctcctaggagcagctggattccacactgagactcaacagagttctgggctatgctgtattttggaaaaggaaaagcgggtgctgagagctaagtagccaattactctttatagccacataaggactgaaggcaagtaggcccttccaacaagttgtattatgcgatcactggctttgcagggaatctcacgaatgtataaccttctgattgcctttttgattgaaagttccatctgagatcagggcagtgtaaccagtaataagatttcaaaaaaatcccatcactggcactgtcggaaaggctgagcatgactgaaatcctatcattgtcagtcaaaaagataaggtaacagcgggcatcactataaaagctctataaatgcacaacttaaacatgaatatcaacattaaaaagaatatatatatccttatacatatatttataaatatattcatatatataaatatgcacatatatacacaattcagttactggggataatttatagttttaatttttcatctcataatctcacgcactgccaacaaattgaaattgtggctctctgttttcatgaatctaaccttgaatttgaaagaagttgaattgagggtaaagggttttaaaagcagctttttatttgtgaacagaataatggctcataatacctgggattagaattaaatatgtcacgttgtgaggctgtacttagactttttaaatgtcattgtatttttttgtggacaaaataattgtagaatatactttgcaggaaatacttttctatattttttcaatttcaatactgttttatttgctataaaaagtgtctttgcactgttactcagccaaacagtgttgaatgtattatttgcccttgtaattattgcttcttatgataattgtagaagagcatgtctttatgatctatcatttaaaaatacatttattgtcattgtagttttagtcaacacaaatttatggattacatggtatactgttgctattgaagatattctagtcctagtattttgagcacagacctagcgttatggaggacataaaatttaaaaatttcctgacttgatggactatctgaggaaaaagaattttgtctgtcacatttattgagtatctatcagtacagaaattaagctacatggttgatacagaaagattaaatacagtagcattctcaaacttattttctttatttataaaatgtacctaatcaatctcataagaactaattgttgaattttttttttatctatggataaatactatttgagtctgggtttaagtttggttgatctgacactaaatccccttaactttcaactaaacagttatctctgtaattatgagacttttgatgataagaaatagaaactaagttatatatagtgctatggaagtactgaggaggaagtaagggaccccatatgggaagactcaagaagacgtcacggtgaaattttccaaaaagatgggaactcaagaatgggtgcaacagaaatcacagcttttccaaatactaaaagggaaaattataaaaagcaccaatggcacacttttggacattcagaaagatccagaaattaggtgcttataggaaactctaggtttgccaaattgtagtgttttatggataggaaaaatgaagttcagaaacgttataaggaattttcagggttaaattacacatcaaatatgtgagagaaacagaaattacatgctggtatttggggtcatctcctgagttgtaatgttgtaagtgtttttgtatgtattctcctccttcctttatgtgtggaagtttcatctaggtctcaaggttagtaggcatttgctggtgaaaatagtgcctttgggtactatttccccaacttgagttacctgccaccatctaattcacatcttgaatgcaagtattatttcttgcaagtatccctactaatagataatagatatttctattattatccacagattacagaagagggttgctaggaggaatatcacaagatgctgtctgaagagaaagactgtggaaaaccatggcttcaatgaactcagaggtcaggaccagaaaaggaaatgagaggtcaccaaagccaaatgttaatttcttgggatttcttctgtacatgcaaagaacttcaggccatcctatgattcctcaaaaataagaggaaaattttaacaattatgctctaagatggaccatgacaatttaggagtcattgggatcaccccccaaagccaaatgttaatttcttgggatttcttctgtacatgcaaagaacttcaggccatcctatgatccctcacaaataagaggaagattttaacaattatgctctaagatggaacatgacaatttaggagtcactgggatcaccccccccacctttccaacgttactctgctttaactacaaatatgtcgaatggttttctaatttttctttaacttaacctctaaagttcgagagctgtcatctttgtcaagtctgattgttgagtatgtgaatggatgtttttggctcaatgttagagccaaaatttataaataataattatttatacataatgatattgcaaataaactttaagaaagagctttaaacataaaaa

SEQ ID NO: 3660 - DNA, 9076 bp, Homo sapiens
  source 1..9076: mol_type = unassigned DNA
agcgtcaagacaccagctgcactttgggttgcggacacccagagcccagcgcgcccgccctgcgtctccgcaccaagccctgtagctccgagaggcatgaacggaatccggaggcgcctgcctagcgagcgaggaccggtcggcgcttgccgccctcgggagctaaccccgagcacctccagccatttgtgaacctggaggcttgacattcgccagcgcagggccccacaagagaaatttcaatgaaaagaaaagccaatggattgtggtcttagaaaagctgcttagatgatgtctgtttcccgtgctatagacacgtggcagagctgtaagtaaatgctcggcactgcatgatgaattggatggctgcagaccggagacaaaaaaaataattgtctcattttcgtggtgatttgcttaactggtgggaccatgccagaacggctagcggaaatgctcttggatctctggactccattaataatattatggattactcttcccccttgcatttacatggctccgatgaatcagtctcaagttttaatgagtggatcccctttggaactaaacagtctgggtgaagaacagcgaattttgaaccgctccaaaagaggctgggtttggaatcaaatgtttgtcctggaagagttttctggacctgaaccgattcttgttggccggctacacacagacctggatcctgggagcaaaaaaatcaagtatatcctatcaggtgatggagctgggaccatatttcaaataaatgatgtaactggagatatccatgctataaaaagacttgaccgggaggaaaaggctgagtataccctaacagctcaagcagtggactgggagacaagcaaacctctggagcctccttctgaatttattattaaagttcaagacatcaatgacaatgcaccagagtttcttaatggaccctatcatgctactgtgccagaaatgtccattttgggtacatctgtcactaacgtcactgcgaccgacgctgatgacccagtttatggaaacagtgcaaagttggtttatagtatattggaagggcagccttatttttccattgagcctgaaacagctattataaaaactgcccttcccaacatggacagagaagccaaggaggagtacctggttgttatccaagccaaagatatgggtggacactctggtggcctgtctgggaccacgacacttacagtgactcttactgatgttaatgacaatcctccaaaatttgcacagagcctgtatcacttctcagtaccggaagatgtggttcttggcactgcaataggaagggtgaaggccaatgatcaggatattggtgaaaatgcacagtcatcatatgatatcatcgatggagatggaacagcactttttgaaatcacttctgatgcccaggcccaggatggcattataaggctaagaaaacctctggactttgagaccaaaaaatcctatacgctaaaggtagaggcagccaatgtccatattgacccacgcttcagtggcagggggccctttaaagacacggcgacagtcaaaatcgtggttgaagatgctgatgagcctccggtcttctcttcaccgacttacctacttgaagttcatgaaaatgctgctctaaactccgtgattgggcaagtgactgctcgtgaccctgatatcacttccagtcctataaggttttccatcgaccggcacactgacctggagaggcagttcaacattaatgcagacgatgggaagataacgctggcaacaccacttgacagagaattaagtgtatggcacaacataacaatcattgctactgaaattagtcattcaaactgttagcgccatggacaaagatgatcccaaaaacggacattatttcttatacagtctccttccagaaatggtcaacaatccgaatttcaccatcaagaaaaatgaagataattccctcagtattttggcaaagcataatggattcaaccgccagaagcaagaagtctatcttttaccaatcataatcagtgatagtggaaatcctccactgagcagcactagcaccttgacaatcagggtctgtggctgcagcaatgacggtgtcgtccagtcttgcaatgtcgaagcttatgtccttccaattggactcagtatgggcgccttaattgccatattagcatgcatcattttgctgttagtcatcgtggtgctgtttgtaactctacggcggcataaaaatgaaccattaattatcaaagatgatgaagacgttcgagaaaacatcattcgctacgatgatgaaggaggaggggaggaggacacagaggcttttgacattgcaactttacaaaatccagatggaattaatggatttttaccccgtaaggatattaaaccagatttgcagtttatgccaaggcaagggcttgctccagttccaaatggtgttgatgtcgatgaatttataaatgtaaggctgcatgaggcagataatgatcccacggccccgccatatgactccattcagatatatggctatgaaggccgagggtcagtggctggctccctcagctccttggagtccaccacatcagactcagaccagaattttgactacctcagtgactggggtccccgctttaagagactgggcgaactctactctgttggtgaaagtgacaaagaaacttgacagtggattataaataaatcactggaactgagcattctgtaatattctagggtcactccccttagatacaaccaatgtggctatttgttttagaggcaagtttagcaccagtcatctataaactcaaccacattttaatgttgaaccaaaaaaagataataaaataaaaaagtatatgttaggaggttataaatcttgtggagtgtgaattaagtatgtggagtgtctagaagtccttggatatttgatatttacctgaccaccacagacaaagattgggatcctggctaatccttagataaatggtttaaatagaggaaaaaatcataattaaaaggtgctttcttagaaaaaaaaatacggacctgcaaggaatctgctgctgatatgtgtcttctgcaaggatttttatgaatgcaaatggttttttccccttcaccaataaggatcccgccacaaatgataaagcaatacttggtctgctgtacattataactttttggagttttgagaggcctcctagattatacagtacggtgaccacacattgtacataattgttggccccactcactagagactgaatagcatctttaaatattgtgtcgagccttaaaatattcacatgttcgtaatccattccagggtggggcttgccaattcagtggtgggaggagagaaatcccattcaaacatgcttgttttctagaagcaggattcctcgttccctcctcttcatcttcttccacaaggacacaaagataaactgtatcacacagtggactacataagagacagatggttttattgctagcgcgtgaatttatttgtttaatcctcgaaataaatattttattgatgtccattaatgcttttatttattaaggtcggtaatctatagattaaggggatatatgggaaaaaactaaattatatccattaataatcctttagattgttttatataaatatatatacaatgaatgtttaatacatgtacattttgatgagatgagtatggcaggcaatattatcgaaaggagagctaatagtctctttagagtagaaagtgttattgtaactggagatggcaggaacagcatcttcccagacaaacttttggactgttttctattttgttcataatcctagtatttggtgtttttactacaagcacaaacatcctaaagtatattgattcctgtgaatatttaaactctagacttttagatacctacatcatgccctgcccaataaacatgcttcaatttacccccacagttttagagcaggaactgatttgtacataatttcactgtttacgtttttagcactcctatccctgatcttcatggtgatgcacagaatgtcttagactccaaaaaggaacagcactagaagatgtgagcatatttaatttgtaatgcaaacctgccatttaggagtagaaaatgtatgataaaactcaagtattacatgcagatcattttaattttctactttgctttaatgcaatattgtttattcactccatgtattgtattcagagaaactcctgtattgtttcctactttgtgaaatatatttttataaatacctttgttgtcattaatttttttttcaatcagtggaagatctattaacagaatcatcaactcaaactaaaattctagaatactcaaccaaatcatcccaagggtcacttttgtttgtaagactctttattatagagaaacagagaagagaaatggcttgccagtgatcacacagcaagataccagcagggacataagaggaacatggaacacctaaaggctagtccagctgtgtcatttgggtccttctggaagcagacgcattgggcagggaaaaccttcagacaagtttgcagacctaaaacttgtaacaatagagggattgggagcaggatttggcaagagagtcttagactgcagtgcggacctggcaaaatctctgccagtctgacagggggttctagagtgaaaacacatccattaaagcagtcaggctgtggtcctctgtcatctcagtcattggtgcggggctgctaagaagagaacggtttttgactcaaaagctgaacgcaccaacttctagaggccaccttcactgtgacagaaactgcatgtttaaatactatactaacaatttataactatccggtggcttaatcaactttttattgagtttctgttgctgagaataagtcatcttttatgcgtattattacggctagtgaacactttttcttgaggtcaaagggatggtccaacatgactttaaaatatactaggacttggcacagtgtctaaaacaagtgcttggtgaatgtaaattattagtagtagttgcagtaataaccaatagtaatattccaactatcttacaccttccaaaccaaggagagattattatgttttatgtatctcttgaacaccagactcatttctagtgtactttgaagtgcccaaagattatagacacacaaatatgtctaacagaataattacagtattttttaaggagtataaaatctgtatcctcaaatattggtaatcaacaggataatcttcgtacagtggtttctgtgagcaggagataatgtctgctctactagttgcccaaatatcgcctaagtattctctttgcctaggaacacagaatgaaagcttgcatctcttgctgactttctttgccaccacagtgtcagcattttgtgtttaaaagcctatttcaggtcttgtaacatagaataaagtgactaataccttgatcctaataagattgacctatacttttagagtgtcatgaattaaactaaaaatctcaggaactatctctctctttctctctttctctctctctctctctctctctctcacacacacacacacacacacacacacacacacacaacaaacaaataaaaaacacacattttgacttgaagttttactttagcaatagacttgccaggactttcccaaccaaaagatatcaataaggttcctaacattttctaagatttaagtatcccatgctcaatttgttaaataacacattttaaaaactttattgaaatgactatatttttaaagctatgtgcattgttgtctgtttcatcaacattgacatagcagaaacaagagtactctctgctaaatagagaagaatgattaagttggagccaagtgagacaaagttatctccctctgcctacctcacaattcaaggttcccacctagggaactgatgcatccctgggtgattggacacaacatgggatcaattcagcctctactctgcctatgatttgatcaaatcatattagcaaagtgtctcttaaacatccatatatgaatattaaagagtattaaggggggcatttcttaacaatatttttatgagtatagttataagtttctaaacatttataatacgatgactaaaatatgctatttttaaattcaagtgttaaccttgccacacagaattatgacttctagggtgtaaactttaaagtgaaactgttttgaaaaaaatctgcagttaagtgtatgtgtatatatagaagaaaaggaaacttagatttactggtatcaccagtgaagcaagaatgcttagaaagatacaaatgtgtctttgggagagtctgcttaatcagatgcttaaagtaagacaagtctctgcatgagacttagaaatctcctaggagcagctggattccacactgagactcaacagagttctgggctatgctgtattttggaaaaggaaaagcgggtgctgagagctaagtagccaattactctttatagccacataaggactgaaggcaagtaggcccttccaacaagttgtattatgcgatcactggctttgcagggaatctcacgaatgtataaccttctgattgcctttttgattgaaagttccatctgagatcagggcagtgtaaccagtaataagatttcaaaaaaatcccatcactggcactgtcggaaaggctgagcatgactgaaatcctatcattgtcagtcaaaaagataaggtaacagcgggcatcactataaaagctctataaatgcacaacttaaacatgaatatcaacattaaaaagaatatatatatccttatacatatatttataaatatattcatatatataaatatgcacatatatacacaattcagttactggggataatttatagttttaatttttcatctcataatctcacgcactgccaacaaattgaaattgtggctctctgttttcatgaatctaaccttgaatttgaaagaagttgaattgagggtaaagggttttaaaagcagctttttatttgtgaacagaataatggctcataatacctgggattagaattaaatatgtcacgttgtgaggctgtacttagactttttaaatgtcattgtatttttttgtggacaaaataattgtagaatatactttgcaggaaatacttttctatattttttcaatttcaatactgttttatttgctataaaaagtgtctttgcactgttactcagccaaacagtgttgaatgtattatttgcccttgtaattattgcttcttatgataattgtagaagagcatgtctttatgatctatcatttaaaaatacatttattgtcattgtagttttagtcaacacaaatttatggattacatggtatactgttgctattgaagatattctagtcctagtattttgagcacagacctagcgttatggaggacataaaatttaaaaatttcctgacttgatggactatctgaggaaaaagaattttgtctgtcacatttattgagtatctatcagtacagaaattaagctacatggttgatacagaaagattaaatacagtagcattctcaaacttattttctttatttataaaatgtacctaatcaatctcataagaactaattgttgaattttttttttatctatggataaatactatttgagtctgggtttaagtttggttgatctgacactaaatccccttaactttcaactaaacagttatctctgtaattatgagacttttgatgataagaaatagaaactaagttatatatagtgctatggaagtactgaggaggaagtaagggaccccatatgggaagactcaagaagacgtcacggtgaaattttccaaaaagatgggaactcaagaatgggtgcaacagaaatcacagcttttccaaatactaaaagggaaaattataaaaagcaccaatggcacacttttggacattcagaaagatccagaaattaggtgcttataggaaactctaggtttgccaaattgtagtgttttatggataggaaaaatgaagttcagaaacgttataaggaattttcagggttaaattacacatcaaatatgtgagagaaacagaaattacatgctggtatttggggtcatctcctgagttgtaatgttgtaagtgtttttgtatgtattctcctccttcctttatgtgtggaagtttcatctaggtctcaaggttagtaggcatttgctggtgaaaatagtgcctttgggtactatttccccaacttgagttacctgccaccatctaattcacatcttgaatgcaagtattatttcttgcaagtatccctactaatagataatagatatttctattattatccacagattacagaagagggttgctaggaggaatatcacaagatgctgtctgaagagaaagactgtggaaaaccatggcttcaatgaactcagaggtcaggaccagaaaaggaaatgagaggtcaccaaagccaaatgttaatttcttgggatttcttctgtacatgcaaagaacttcaggccatcctatgattcctcaaaaataagaggaaaattttaacaattatgctctaagatggaccatgacaatttaggagtcattgggatcaccccccaaagccaaatgttaatttcttgggatttcttctgtacatgcaaagaacttcaggccatcctatgatccctcacaaataagaggaagattttaacaattatgctctaagatggaacatgacaatttaggagtcactgggatcaccccccccacctttccaacgttactctgctttaactacaaatatgtcgaatggttttctaatttttctttaacttaacctctaaagttcgagagctgtcatctttgtcaagtctgattgttgagtatgtgaatggatgtttttggctcaatgttagagccaaaatttataaataataattatttatacataatgatattgcaaataaactttaagaaagagctttaaacataaaaa

SEQ ID NO: 3661 - DNA, 9721 bp, Homo sapiens
  source 1..9721: mol_type = unassigned DNA
aacataacgccagccccagagctcaggtgagacctctagagagaaagctcgcaggtacctcatccgcatgctgttattatctgccagcccacttatccaggagctcggtcctcagcgggctgcgcgcaccgcgcggaagggcgcatcttcacctcgtggctctggcggcagagacgcgcggggcttgctcgggagcgaggagcgaaaagttgtgcgcccacttgggtagggggaaagagagcgatcgagccagcgcgggagagcgaagggggaaggcggggagggggcggggaggggggactgcttacatgaatttccaagtggtagacctgcctctgcgctctgcccaatgagatccgtcaggggaggcacccggctcacttttccacatcacttcacagttacatttggcaggcaggcgggctcgcacgccggagcgctcagcccagaattagtggatttatttggaatctccctgcctcctccaagctccgccgccgccgccggcttgtgcatagacggtagcgtcaagacaccagctgcactttgggttgcggacacccagagcccagcgcgcccgccctgcgtctccgcaccaagccctgtagctccgagaggcatgaacggaatccggaggcgcctgcctagcgagcgaggaccggtcggcgcttgccgccctcgggagctaaccccgagcacctccagccatttgtgaacctggaggcttgacattcgccagcgcagggccccacaagagaaatttcaatgaaaagaaaagccaatggattgtggtcttagaaaagctgcttagatgatgtctgtttcccgtgctatagacacgtggcagagctgtaagtaaatgctcggcactgcatgatgaattggatggctgcagaccggagacaaaaaaaataattgtctcattttcgtggtgatttgcttaactggtgggaccatgccagaacggctagcggaaatgctcttggatctctggactccattaataatattatggattactcttcccccttgcatttacatggctccgatgaatcagtctcaagttttaatgagtggatcccctttggaactaaacagtctgggtgaagaacagcgaattttgaaccgctccaaaagaggctgggtttggaatcaaatgtttgtcctggaagagttttctggacctgaaccgattcttgttggccggctacacacagacctggatcctgggagcaaaaaaatcaagtatatcctatcaggtgatggagctgggaccatatttcaaataaatgatgtaactggagatatccatgctataaaaagacttgaccgggaggaaaaggctgagtataccctaacagctcaagcagtggactgggagacaagcaaacctctggagcctccttctgaatttattattaaagttcaagacatcaatgacaatgcaccagagtttcttaatggaccctatcatgctactgtgccagaaatgtccattttgggtacatctgtcactaacgtcactgcgaccgacgctgatgacccagtttatggaaacagtgcaaagttggtttatagtatattggaagggcagccttatttttccattgagcctgaaacagctattataaaaactgcccttcccaacatggacagagaagccaaggaggagtacctggttgttatccaagccaaagatatgggtggacactctggtggcctgtctgggaccacgacacttacagtgactcttactgatgttaatgacaatcctccaaaatttgcacagagcctgtatcacttctcagtaccggaagatgtggttcttggcactgcaataggaagggtgaaggccaatgatcaggatattggtgaaaatgcacagtcatcatatgatatcatcgatggagatggaacagcactttttgaaatcacttctgatgcccaggcccaggatggcattataaggctaagaaaacctctggactttgagaccaaaaaatcctatacgctaaaggtagaggcagccaatgtccatattgacccacgcttcagtggcagggggccctttaaagacacggcgacagtcaaaatcgtggttgaagatgctgatgagcctccggtcttctcttcaccgacttacctacttgaagttcatgaaaatgctgctctaaactccgtgattgggcaagtgactgctcgtgaccctgatatcacttccagtcctataaggttttccatcgaccggcacactgacctggagaggcagttcaacattaatgcagacgatgggaagataacgctggcaacaccacttgacagagaattaagtgtatggcacaacataacaatcattgctactgaaattaggaaccacagtcagatatcacgagtacctgttgctattaaagtgctggatgtcaatgacaacgcccctgaattcgcatccgaatatgaggcatttttatgtgaaaatggaaaacccggccaagtcattcaaactgttagcgccatggacaaagatgatcccaaaaacggacattatttcttatacagtctccttccagaaatggtcaacaatccgaatttcaccatcaagaaaaatgaagataattccctcagtattttggcaaagcataatggattcaaccgccagaagcaagaagtctatcttttaccaatcataatcagtgatagtggaaatcctccactgagcagcactagcaccttgacaatcagggtctgtggctgcagcaatgacggtgtcgtccagtcttgcaatgtcgaagcttatgtccttccaattggactcagtatgggcgccttaattgccatattagcatgcatcattttgctgttagtcatcgtggtgctgtttgtaactctacggcggcataaaaatgaaccattaattatcaaagatgatgaagacgttcgagaaaacatcattcgctacgatgatgaaggaggaggggaggaggacacagaggcttttgacattgcaactttacaaaatccagatggaattaatggatttttaccccgtaaggatattaaaccagatttgcagtttatgccaaggcaagggcttgctccagttccaaatggtgttgatgtcgatgaatttataaatgtaaggctgcatgaggcagataatgatcccacggccccgccatatgactccattcagatatatggctatgaaggccgagggtcagtggctggctccctcagctccttggagtccaccacatcagactcagaccagaattttgactacctcagtgactggggtccccgctttaagagactgggcgaactctactctgttggtgaaagtgacaaagaaacttgacagtggattataaataaatcactggaactgagcattctgtaatattctagggtcactccccttagatacaaccaatgtggctatttgttttagaggcaagtttagcaccagtcatctataaactcaaccacattttaatgttgaaccaaaaaaagataataaaataaaaaagtatatgttaggaggttataaatcttgtggagtgtgaattaagtatgtggagtgtctagaagtccttggatatttgatatttacctgaccaccacagacaaagattgggatcctggctaatccttagataaatggtttaaatagaggaaaaaatcataattaaaaggtgctttcttagaaaaaaaaatacggacctgcaaggaatctgctgctgatatgtgtcttctgcaaggatttttatgaatgcaaatggttttttccccttcaccaataaggatcccgccacaaatgataaagcaatacttggtctgctgtacattataactttttggagttttgagaggcctcctagattatacagtacggtgaccacacattgtacataattgttggccccactcactagagactgaatagcatctttaaatattgtgtcgagccttaaaatattcacatgttcgtaatccattccagggtggggcttgccaattcagtggtgggaggagagaaatcccattcaaacatgcttgttttctagaagcaggattcctcgttccctcctcttcatcttcttccacaaggacacaaagataaactgtatcacacagtggactacataagagacagatggttttattgctagcgcgtgaatttatttgtttaatcctcgaaataaatattttattgatgtccattaatgcttttatttattaaggtcggtaatctatagattaaggggatatatgggaaaaaactaaattatatccattaataatcctttagattgttttatataaatatatatacaatgaatgtttaatacatgtacattttgatgagatgagtatggcaggcaatattatcgaaaggagagctaatagtctctttagagtagaaagtgttattgtaactggagatggcaggaacagcatcttcccagacaaacttttggactgttttctattttgttcataatcctagtatttggtgtttttactacaagcacaaacatcctaaagtatattgattcctgtgaatatttaaactctagacttttagatacctacatcatgccctgcccaataaacatgcttcaatttacccccacagttttagagcaggaactgatttgtacataatttcactgtttacgtttttagcactcctatccctgatcttcatggtgatgcacagaatgtcttagactccaaaaaggaacagcactagaagatgtgagcatatttaatttgtaatgcaaacctgccatttaggagtagaaaatgtatgataaaactcaagtattacatgcagatcattttaattttctactttgctttaatgcaatattgtttattcactccatgtattgtattcagagaaactcctgtattgtttcctactttgtgaaatatatttttataaatacctttgttgtcattaatttttttttcaatcagtggaagatctattaacagaatcatcaactcaaactaaaattctagaatactcaaccaaatcatcccaagggtcacttttgtttgtaagactctttattatagagaaacagagaagagaaatggcttgccagtgatcacacagcaagataccagcagggacataagaggaacatggaacacctaaaggctagtccagctgtgtcatttgggtccttctggaagcagacgcattgggcagggaaaaccttcagacaagtttgcagacctaaaacttgtaacaatagagggattgggagcaggatttggcaagagagtcttagactgcagtgcggacctggcaaaatctctgccagtctgacagggggttctagagtgaaaacacatccattaaagcagtcaggctgtggtcctctgtcatctcagtcattggtgcggggctgctaagaagagaacggtttttgactcaaaagctgaacgcaccaacttctagaggccaccttcactgtgacagaaactgcatgtttaaatactatactaacaatttataactatccggtggcttaatcaactttttattgagtttctgttgctgagaataagtcatcttttatgcgtattattacggctagtgaacactttttcttgaggtcaaagggatggtccaacatgactttaaaatatactaggacttggcacagtgtctaaaacaagtgcttggtgaatgtaaattattagtagtagttgcagtaataaccaatagtaatattccaactatcttacaccttccaaaccaaggagagattattatgttttatgtatctcttgaacaccagactcatttctagtgtactttgaagtgcccaaagattatagacacacaaatatgtctaacagaataattacagtattttttaaggagtataaaatctgtatcctcaaatattggtaatcaacaggataatcttcgtacagtggtttctgtgagcaggagataatgtctgctctactagttgcccaaatatcgcctaagtattctctttgcctaggaacacagaatgaaagcttgcatctcttgctgactttctttgccaccacagtgtcagcattttgtgtttaaaagcctatttcaggtcttgtaacatagaataaagtgactaataccttgatcctaataagattgacctatacttttagagtgtcatgaattaaactaaaaatctcaggaactatctctctctttctctctttctctctctctctctctctctctctcacacacacacacacacacacacacacacacacacaacaaacaaataaaaaacacacattttgacttgaagttttactttagcaatagacttgccaggactttcccaaccaaaagatatcaataaggttcctaacattttctaagatttaagtatcccatgctcaatttgttaaataacacattttaaaaactttattgaaatgactatatttttaaagctatgtgcattgttgtctgtttcatcaacattgacatagcagaaacaagagtactctctgctaaatagagaagaatgattaagttggagccaagtgagacaaagttatctccctctgcctacctcacaattcaaggttcccacctagggaactgatgcatccctgggtgattggacacaacatgggatcaattcagcctctactctgcctatgatttgatcaaatcatattagcaaagtgtctcttaaacatccatatatgaatattaaagagtattaaggggggcatttcttaacaatatttttatgagtatagttataagtttctaaacatttataatacgatgactaaaatatgctatttttaaattcaagtgttaaccttgccacacagaattatgacttctagggtgtaaactttaaagtgaaactgttttgaaaaaaatctgcagttaagtgtatgtgtatatatagaagaaaaggaaacttagatttactggtatcaccagtgaagcaagaatgcttagaaagatacaaatgtgtctttgggagagtctgcttaatcagatgcttaaagtaagacaagtctctgcatgagacttagaaatctcctaggagcagctggattccacactgagactcaacagagttctgggctatgctgtattttggaaaaggaaaagcgggtgctgagagctaagtagccaattactctttatagccacataaggactgaaggcaagtaggcccttccaacaagttgtattatgcgatcactggctttgcagggaatctcacgaatgtataaccttctgattgcctttttgattgaaagttccatctgagatcagggcagtgtaaccagtaataagatttcaaaaaaatcccatcactggcactgtcggaaaggctgagcatgactgaaatcctatcattgtcagtcaaaaagataaggtaacagcgggcatcactataaaagctctataaatgcacaacttaaacatgaatatcaacattaaaaagaatatatatatccttatacatatatttataaatatattcatatatataaatatgcacatatatacacaattcagttactggggataatttatagttttaatttttcatctcataatctcacgcactgccaacaaattgaaattgtggctctctgttttcatgaatctaaccttgaatttgaaagaagttgaattgagggtaaagggttttaaaagcagctttttatttgtgaacagaataatggctcataatacctgggattagaattaaatatgtcacgttgtgaggctgtacttagactttttaaatgtcattgtatttttttgtggacaaaataattgtagaatatactttgcaggaaatacttttctatattttttcaatttcaatactgttttatttgctataaaaagtgtctttgcactgttactcagccaaacagtgttgaatgtattatttgcccttgtaattattgcttcttatgataattgtagaagagcatgtctttatgatctatcatttaaaaatacatttattgtcattgtagttttagtcaacacaaatttatggattacatggtatactgttgctattgaagatattctagtcctagtattttgagcacagacctagcgttatggaggacataaaatttaaaaatttcctgacttgatggactatctgaggaaaaagaattttgtctgtcacatttattgagtatctatcagtacagaaattaagctacatggttgatacagaaagattaaatacagtagcattctcaaacttattttctttatttataaaatgtacctaatcaatctcataagaactaattgttgaattttttttttatctatggataaatactatttgagtctgggtttaagtttggttgatctgacactaaatccccttaactttcaactaaacagttatctctgtaattatgagacttttgatgataagaaatagaaactaagttatatatagtgctatggaagtactgaggaggaagtaagggaccccatatgggaagactcaagaagacgtcacggtgaaattttccaaaaagatgggaactcaagaatgggtgcaacagaaatcacagcttttccaaatactaaaagggaaaattataaaaagcaccaatggcacacttttggacattcagaaagatccagaaattaggtgcttataggaaactctaggtttgccaaattgtagtgttttatggataggaaaaatgaagttcagaaacgttataaggaattttcagggttaaattacacatcaaatatgtgagagaaacagaaattacatgctggtatttggggtcatctcctgagttgtaatgttgtaagtgtttttgtatgtattctcctccttcctttatgtgtggaagtttcatctaggtctcaaggttagtaggcatttgctggtgaaaatagtgcctttgggtactatttccccaacttgagttacctgccaccatctaattcacatcttgaatgcaagtattatttcttgcaagtatccctactaatagataatagatatttctattattatccacagattacagaagagggttgctaggaggaatatcacaagatgctgtctgaagagaaagactgtggaaaaccatggcttcaatgaactcagaggtcaggaccagaaaaggaaatgagaggtcaccaaagccaaatgttaatttcttgggatttcttctgtacatgcaaagaacttcaggccatcctatgattcctcaaaaataagaggaaaattttaacaattatgctctaagatggaccatgacaatttaggagtcattgggatcaccccccaaagccaaatgttaatttcttgggatttcttctgtacatgcaaagaacttcaggccatcctatgatccctcacaaataagaggaagattttaacaattatgctctaagatggaacatgacaatttaggagtcactgggatcaccccccccacctttccaacgttactctgctttaactacaaatatgtcgaatggttttctaatttttctttaacttaacctctaaagttcgagagctgtcatctttgtcaagtctgattgttgagtatgtgaatggatgtttttggctcaatgttagagccaaaatttataaataataattatttatacataatgatattgcaaataaactttaagaaagagctttaaacataaaaa

SEQ ID NO: 3662 - DNA, 3728 bp, Homo sapiens
  source 1..3728: mol_type = unassigned DNA
aacataacgccagccccagagctcaggtgagacctctagagagaaagctcgcaggtacctcatccgcatgctgttattatctgccagcccacttatccaggagctcggtcctcagcgggctgcgcgcaccgcgcggaagggcgcatcttcacctcgtggctctggcggcagagacgcgcggggcttgctcgggagcgaggagcgaaaagttgtgcgcccacttgggtagggggaaagagagcgatcgagccagcgcgggagagcgaagggggaaggcggggagggggcggggaggggggactgcttacatgaatttccaagtggtagacctgcctctgcgctctgcccaatgagatccgtcaggggaggcacccggctcacttttccacatcacttcacagttacatttggcaggcaggcgggctcgcacgccggagcgctcagcccagaattagtggatttatttggaatctccctgcctcctccaagctccgccgccgccgccggcttgtgcatagacggtagcgtcaagacaccagctgcactttgggttgcggacacccagagcccagcgcgcccgccctgcgtctccgcaccaagccctgtagctccgagaggcatgaacggaatccggaggcgcctgcctagcgagcgaggaccggtcggcgcttgccgccctcgggagctaaccccgagcacctccagccatttgtgaacctggaggcttgacattcgccagcgcagggccccacaagagaaatttcaatgaaaagaaaagccaatggattgtggtcttagaaaagctgcttagatgatgtctgtttcccgtgctatagacacgtggcagagctgtaagtaaatgctcggcactgcatgatgaattggatggctgcagaccggagacaaaaaaaataattgtctcattttcgtggtgatttgcttaactggtgggaccatgccagaacggctagcggaaatgctcttggatctctggactccattaataatattatggattactcttcccccttgcatttacatggctccgatgaatcagtctcaagttttaatgagtggatcccctttggaactaaacagtctgggtgaagaacagcgaattttgaaccgctccaaaagaggctgggtttggaatcaaatgtttgtcctggaagagttttctggacctgaaccgattcttgttggccggctacacacagacctggatcctgggagcaaaaaaatcaagtatatcctatcaggtgatggagctgggaccatatttcaaataaatgatgtaactggagatatccatgctataaaaagacttgaccgggaggaaaaggctgagtataccctaacagctcaagcagtggactgggagacaagcaaacctctggagcctccttctgaatttattattaaagttcaagacatcaatgacaatgcaccagagtttcttaatggaccctatcatgctactgtgccagaaatgtccattttgggtacatctgtcactaacgtcactgcgaccgacgctgatgacccagtttatggaaacagtgcaaagttggtttatagtatattggaagggcagccttatttttccattgagcctgaaacagctattataaaaactgcccttcccaacatggacagagaagccaaggaggagtacctggttgttatccaagccaaagatatgggtggacactctggtggcctgtctgggaccacgacacttacagtgactcttactgatgttaatgacaatcctccaaaatttgcacagagcctgtatcacttctcagtaccggaagatgtggttcttggcactgcaataggaagggtgaaggccaatgatcaggatattggtgaaaatgcacagtcatcatatgatatcatcgatggagatggaacagcactttttgaaatcacttctgatgcccaggcccaggatggcattataaggctaagaaaacctctggactttgagaccaaaaaatcctatacgctaaaggtagaggcagccaatgtccatattgacccacgcttcagtggcagggggccctttaaagacacggcgacagtcaaaatcgtggttgaagatgctgatgagcctccggtcttctcttcaccgacttacctacttgaagttcatgaaaatgctgctctaaactccgtgattgggcaagtgactgctcgtgaccctgatatcacttccagtcctataaggttttccatcgaccggcacactgacctggagaggcagttcaacattaatgcagacgatgggaagataacgctggcaacaccacttgacagagaattaagtgtatggcacaacataacaatcattgctactgaaattaggaaccacagtcagatatcacgagtacctgttgctattaaagtgctggatgtcaatgacaacgcccctgaattcgcatccgaatatgaggcatttttatgtgaaaatggaaaacccggccaagtcattcaaactgttagcgccatggacaaagatgatcccaaaaacggacattatttcttatacagtctccttccagaaatggtcaacaatccgaatttcaccatcaagaaaaatgaagataattccctcagtattttggcaaagcataatggattcaaccgccagaagcaagaagtctatcttttaccaatcataatcagtgatagtggaaatcctccactgagcagcactagcaccttgacaatcagggtctgtggctgcagcaatgacggtgtcgtccagtcttgcaatgtcgaagcttatgtccttccaattggactcagtatgggcgccttaattgccatattagcatgcatcattttgctgttagtcatcgtggtgctgtttgtaactctacggcggcataaaaatgaaccattaattatcaaagatgatgaagacgttcgagaaaacatcattcgctacgatgatgaaggaggaggggaggaggacacagaggcttttgacattgcaactttacaaaatccagatggaattaatggatttttaccccgtaaggatattaaaccagatttgcagtttatgccaagattacagaagagggttgctaggaggaatatcacaagatgctgtctgaagagaaagactgtggaaaaccatggcttcaatgaactcagaggtcaggaccagaaaaggaaatgagaggtcaccaaagccaaatgttaatttcttgggatttcttctgtacatgcaaagaacttcaggccatcctatgattcctcaaaaataagaggaaaattttaacaattatgctctaagatggaccatgacaatttaggagtcattgggatcaccccccaaagccaaatgttaatttcttgggatttcttctgtacatgcaaagaacttcaggccatcctatgatccctcacaaataagaggaagattttaacaattatgctctaagatggaacatgacaatttaggagtcactgggatcaccccccccacctttccaacgttactctgctttaactacaaatatgtcgaatggttttctaatttttctttaacttaacctctaaagttcgagagctgtcatctttgtcaagtctgattgttgagtatgtgaatggatgtttttggctcaatgttagagccaaaatttataaataataattatttatacataatgatattgcaaataaactttaagaaagagctttaaacataaaaa

SEQ ID NO: 3663 - DNA, 380 bp, Homo sapiens
  source 1..380: mol_type = unassigned DNA
gccaaagtatcagaccacaaaaagaatgtcactaagcttttaccgatggcaggagcctctgaaatcatcagaaatgctgacgtcaagttttatgtttcaggtcattcaaactgttagcgccatggacaaagatgatcccaaaaacggacattatttcttatacagtctccttccagaaatggtcaacaatccgaatttcaccatcaagaaaaatgaagataattccctcagtattttggcaaagcataatggattcaaccgccagaagcaagaagtctatcttttaccaatcataatcagtgatagtggaaatcctccactgagcagcactagcaccttgacaatcagggtctgtggctgcagcaatgacggtgtcgtcc

SEQ ID NO: 3664 - DNA, 778 bp, Homo sapiens
  source 1..778: mol_type = unassigned DNA
atgcccgtaaatactcaaattggaaagaaacctgtaattgcccagtggatatttcaaatacacttaactttgctatttcaagccacagacaccaaatggacacaaaggtcattcaaactgttagcgccatggacaaagatgatcccaaaaacggacattatttcttatacagtctccttccagaaatggtcaacaatccgaatttcaccatcaagaaaaatgaagggatgccgtaacaaataatcccaaactggaaagtgtaaaacaacagatgcttattctcttagagtttctggaggctggaaatctgaaatcaaggtgtgggcagggccatgctctcctcaaaaactctagaggagaatccattctctgcttaagtttcatagatcacttgatgactcctgggttttttaaagtgaatagcacagcccactctctgtccattttcactccaaaatgacaatcatgcagatatttacagaactctactgctagatggttacagtgcagaaagagcctgccaagtgatcttctgtattaaaatgttctaattcattttgtgtataattgtaaattgttgggtaaacattcagtttggtgttagtctaggaacttccacaggaatccaccatgatgttgattttttttttccaaagccaaagtggaccttgctccaatattttatggctagatataccacattactaaatattataatatttggtaatgagtcaacactccaaaaaaatggagattattgacatcaggtggcatgaca

SEQ ID NO: 3665 - DNA, 324 bp, Homo sapiens
  source 1..324: mol_type = unassigned DNA
ctcaaattggaaagaaacctgtaattgcccagtggatatttcaaatacacttaactttgctatttcaagccacagacaccaaatggacacaaaggtcattcaaactgttagcgccatggacaaagatgatcccaaaaacggacattatttcttatacagtctccttccagaaatggtcaacaatccgaatttcaccatcaagaaaaatgaagatcagaaatccatgagttttgcttcatagaccactacttacttggcacctgaataggaaatttgaggtctccagaaaactactcttcctcagcctgaacactgtaggtaaaa

SEQ ID NO: 3666 - DNA, 3986 bp, Homo sapiens
  source 1..3986: mol_type = unassigned DNA
ggagcgctcagcccagaattagtggatttatttggaatctccctgcctcctccaagctccgccgccgccgccggcttgtgcatagacggtagcgtcaagacaccagctgcactttgggttgcggacacccagagcccagcgcgcccgccctgcgtctccgcaccaagccctgtagctccgagaggcatgaacggaatccggaggcgcctgcctagcgagcgaggaccggtcggcgcttgccgccctcgggagctaaccccgagcacctccagccatttgtgaacctggaggcttgacattcgccagcgcagggccccacaagagaaatttcaatgaaaagaaaagccaatggattgtggtcttagaaaagctgcttagatgatgtctgtttcccgtgctatagacacgtggcagagctgtaagtaaatgctcggcactgcatgatgaattggatggctgcagaccggagacaaaaaaaataattgtctcattttcgtggtgatttgcttaactggtgggaccatgccagaacggctagcggaaatgctcttggatctctggactccattaataatattatggattactcttcccccttgcatttacatggctccgatgaatcagtctcaagttttaatgagtggatcccctttggaactaaacagtctgggtgaagaacagcgaattttgaaccgctccaaaagaggctgggtttggaatcaaatgtttgtcctggaagagttttctggacctgaaccgattcttgttggccggctacacacagacctggatcctgggagcaaaaaaatcaagtatatcctatcaggtgatggagctgggaccatatttcaaataaatgatgtaactggagatatccatgctataaaaagacttgaccgggaggaaaaggctgagtataccctaacagctcaagcagtggactgggagacaagcaaacctctggagcctccttctgaatttattattaaagttcaagacatcaatgacaatgcaccagagtttcttaatggaccctatcatgctactgtgccagaaatgtccattttgggtacatctgtcactaacgtcactgcgaccgacgctgatgacccagtttatggaaacagtgcaaagttggtttatagtatattggaagggcagccttatttttccattgagcctgaaacagctattataaaaactgcccttcccaacatggacagagaagccaaggaggagtacctggttgttatccaagccaaagatatgggtggacactctggtggcctgtctgggaccacgacacttacagtgactcttactgatgttaatgacaatcctccaaaatttgcacagagcctgtatcacttctcagtaccggaagatgtggttcttggcactgcaataggaagggtgaaggccaatgatcaggatattggtgaaaatgcacagtcatcatatgatatcatcgatggagatggaacagcactttttgaaatcacttctgatgcccaggcccaggatggcattataaggctaagaaaacctctggactttgagaccaaaaaatcctatacgctaaaggtagaggcagccaatgtccatattgacccacgcttcagtggcagggggccctttaaagacacggcgacagtcaaaatcgtggttgaagatgctgatgagcctccggtcttctcttcaccgacttacctacttgaagttcatgaaaatgctgctctaaactccgtgattgggcaagtgactgctcgtgaccctgatatcacttccagtcctataaggttttccatcgaccggcacactgacctggagaggcagttcaacattaatgcagacgatgggaagataacgctggcaacaccacttgacagagaattaagtgtatggcacaacataacaatcattgctactgaaattaggaaccacagtcagatatcacgagtacctgttgctattaaagtgctggatgtcaatgacaacgcccctgaattcgcatccgaatatgaggcatttttatgtgaaaatggaaaacccggccaagtaaatatctccatgttgttaatgctgaatatgtttgtatacaactgtctcatatttgactaacctgcattatattgtgcatttgcatcatttatgatctgcaaagtctcaggcaagaaacacatccaaatgggaacagagagggaattttttttctccatcagatgttatttctcttcctacttatgaccaaattggctcctaaagtggaacaacctgctgtgccacaaacccagagccaaatcactgtcttaaaatatcttgggatatggatgatagcaggagatgtcttagagtgacgggggctgaatttttactttcaaatgacaagaagcaaggtaaaacctcgtggagaggagacatttgtttcacagcaaacatatgaataccaaataatagtgaaacccaagaaggccagtggtttatagaaagttgtaggaagtgaatattgaaatctgtaaatatgtaaatatatttagataaacataagatgaacaacacgttttacatgtgtgtattagtagaacattttttgtgcctcatattgcatagatgggtcaatgaaaacagaaaaaaaagaaacataaagaaagtgagagagagggagaaggaaagggagagggagagggaatgggaatgggagtgggaggaagggagggagggagagagaaaaagagggaggaagaaagggaggaaaatagttaaacaagcaagatgaacagaaacaaatatctgctatactctgaatgtcaaaatggaaatagcctgtgtaaagttctgcaaaaccataaatgtaatagatttattttaacaaggtaccaaagtactgtatgtttaagaaatttatcatttttcaacttcctaatttatttctggatggtgacattttaatttaaataaacagcagctgacagtatgacactggagttgttaatccaactattcttgtgcctcatgtgggtgttaggaattaaacttactatttgctaagcagcttacctgacaagagtcagattttttccccctaaagaaaggactggcactgtagctgtatgctttattataaatgatcaatttgttaccctcctataaaacagtgggcatttctccgtagactactctcatgtatctggagaattagcattgtttccatctaccagaataagacacaccacaccacacacacacacacgcacacacacacacacgttaaagctaaaattctaataataaaactgattaacttttaaacatctagccatgttctcatcaaagcattcagctttagtagagatataggtttatttttataatattctaacattagcttaaatgtttcctaattttatcatgtggaattaccccctatcaatcacacgttttgagcatcttcatttgtgatcctttgagaagggagtgtgtatatgtttatatatacacatatcaatacatatcatttacctaaattggtagattgagttgtcagagagagtttgatcaaaatatggcaggttgtttcaaagatatggttgttgtgtggaccagatcattgctgagataatgtagccaaatcacagactggtaagctagactttttcaatcacatagagtctgtaaaatacttcagaatttaaataaaactccattgctcatgcaaaactcatcagataagttcaaggagtcaatgacattgatatttcaaaaactcaacattggcttcacttgcgttattgacaagcatgtttcttggatctctgggaatttgtaggtttgccctgtggattttgactgttttcaaagttctaatgatttctcagtcgttcttcttaacttcagaaaaaaaaatgcattgttttctcatctttcctatgcaaaaccaaaataaaaaattgattctttgttttatgatttttgcaaatcacaatgaa

SEQ ID NO: 3667 - DNA, 572 bp, Homo sapiens
  source 1..572: mol_type = unassigned DNA
taaaattttattatgactctgaagtgaaattttgatggcacaattcatgactgtgaatattttgtgaattccaagtgaaatgagcaaaacaaaacaataggagattagattcactgagcttatataataaacagacataaataaatgcccataaaatttacaggttgaatctgggggactggagagtgatcccattaaggctcacaaatgggtttaaatgcacataactttcatccatcagcattatactcatttgttcttgctgctgtggtcattagtgagaagcatttatctttgtcatttcttaacagcctctggactttgagaccaaaaaatcctatacgctaaaggtagaggcagccaatgtccatattgacccacgcttcagtggcagggggccctttaaagacacggcgacagtcaaaatcgtggttgaagatgctgatgagcctccggtcttctcttcaccgacttacctacttgaagttcatgaaaatgctgctctaaactccgtgattgggcaagtgactgctcgtgaccctgatatcacttccagtcctataaggttttcc

SEQ ID NO: 3668 - DNA, 1528 bp, Homo sapiens
  source 1..1528: mol_type = unassigned DNA
aaggctgggaaacggtaaaaaaacgtgctgccgccaacgctgatgccaacaggaaatttcaatgaaaagaaaagccaatggattgtggtcttagaaaagctgcttagatgatgtctgtttcccgtgctatagacacgtggcagagctgtaagtaaatgctcggcactgcatgatgaattggatggctgcagaccggagacaaaaaaaataattgtctcattttcgtggtgatttgcttaactggtgggaccatgccagaacggctagcggaaatgctcttggatctctggactccattaataatattatggattactcttcccccttgcatttacatggctccgatgaatcagtctcaagttttaatgagtggatcccctttggaactaaacagtctgggtgaagaacagcgaattttgaaccgctccaaaagaggctgggtttggaatcaaatgtttgtcctggaagagttttctggacctgaaccgattcttgttggccggctacacacagacctggatcctgggagcaaaaaaatcaagtatatcctatcaggtgatggagctgggaccatatttcaaataaatgatgtaactggagatatccatgctataaaaagacttgaccgggaggaaaaggctgagtataccctaacagctcaagcagtggactgggagacaagcaaacctctggagcctccttctgaatttattattaaagttcaagacatcaatgacaatgcaccagagtttcttaatggaccctatcatgctactgtgccagaaatgtccattttgggtacatctgtcactaacgtcactgcgaccgacgctgatgacccagtttatggaaacagtgcaaagttggtttatagtatattggaagggcagccttatttttccattgagcctgaaacagctattataaaaactgcccttcccaacatggacagagaagccaaggaggagtacctggttgttatccaagccaaagatatgggtggacactctggtggcctgtctgggaccacgacacttacagtgactcttactgatgttaatgacaatcctccaaaatttgcacagagcctgtatcacttctcagtaccggaagatgtggttcttggcactgcaataggaagggtgaaggccaatgatcaggatattggtgaaaatgcacagtcatcatatgatatcatcgatggagatggaacagcactttttgaaatcacttctgatgcccaggcccaggatggcattataaggctaagaaaacctctggactttgagaccaaaaaatcctatacgctaaaggtagaggcagccaatgtccatattgacccacgcttcagtggcagggggccctttaaagacacggcgacagtcaaaatcgtggttgaagatgctgatgagcctccggtcttctcttcaccgacttacctacttgaagttcatgaaaatgctgctctaaactccgtgattgggcaagtgactgctcgtgaccctgatatcacttccagtcctataag

SEQ ID NO: 3669 - DNA, 572 bp, Homo sapiens
  source 1..572: mol_type = unassigned DNA
ctcttggatctctggactccattaataatattatggattactcttcccccttgcatttacatggctccgatgaatcagtctcaagttttaatgagtggatcccctttggaactaaacagtctgggtgaagaacagcgaattttgaaccgctccaaaagaggctgggtttggaatcaaatgtttgtcctggaagagttttctggacctgaaccgattcttgttggccggctacacacagacctggatcctgggagcaaaaaaatcaagtatatcctatcaggtgatggagctgggaccatatttcaaataaatgatgtaactggagatatccatgctataaaaagacttgaccgggaggaaaaggctgagtataccctaacagctcaagcagtggactgggagacaagcaaacctctggagcctccttctgaatttattattaaagttcaagacatcaatgacaatgcaccagagtttcttaatggaccctatcatgctactgtgccagaaatgtccattttgggtatgtatgcttccaatttcacagatctattaaaagtcatctttagaat

SEQ ID NO: 3670 - DNA, 539 bp, Homo sapiens
  source 1..539: mol_type = unassigned DNA
agtttgatctcagactgctgtgctagcaaccagggagactccgtgggcgtaggaccctccgagccaggtgccagatataatctcgtggtgcaccgttttttaagcccgttggaaaagcgcagtattcgggtgggagtaacccgattttccaggtgccgtctgtcacccctttctttgactcggaaagggaactccctgaccccttgcgcttcccaagtgaggcaatgcctcgccctgcttcggctcgcgcatggtgcgcgcacccactgacctgcgcccactgtctggcactccctagtgagatgaaccgggtacctcagatggaaatgcagaaatcacccgtcttctgcgtcgctcacgctgggagctgtagaccggagctgttcctattcggccatcttggctcctccctgatcacctctccaggctacactcttgagtcgacactcatagttcgctacacacagacctggatcctgggagcaaaaaaatcaagtatatcctatcaggtgatggagctgggaccatatttcaaataa

SEQ ID NO: 3671 - DNA, 559 bp, Homo sapiens
  source 1..559: mol_type = unassigned DNA
gaatgcgctccatcacagaaccgcgacacacagcctctacatagcgtctgagttgcaggcaggggtctcacaatcaccctattctgtacgcaagaggcccttggaataaagaggaggaaatttcaatgaaaagaaaagccaatggattgtggtcttagaaaagctgcttagatgatgtctgtttcccgtgctatagacacgtggcagagctgtaagtaaatgctcggcactgcatgatgaattggatggctgcagaccggagacaaaaaaaataattgtctcattttcgtggtgatttgcttaactggtgggaccatgccagaacggctagcggaaatgctcttggatctctggactccattaataatattatggattactcttcccccttgcatttacatggctccgatgaatcagtctcaagttttaatgagtggatcccctttggaactaaacagtctgggtgaagaacagcgaattttgaaccgctccaaaagaggctgggtttggaatcaaatgtttgtcctggaagagttttctggacctgaaccgattcttg

SEQ ID NO: 3672 - DNA, 376 bp, Homo sapiens
  source 1..376: mol_type = unassigned DNA
acatttggcaggcaggcgggctcgcacgccggagcgctcagcccagaattagtggatttatttggaatctccctgcctcctccaagctccgccgccgccgccggcttgtgcatagacggtagcgtcaagacaccagctgcactttgggttgcggacacccagagcccagcgcgcccgccctgcgtctccgcaccaagccctgtagctccgagaggcatgaacggaatccggaggcgcctgcctagcgagcgaggaccggtcggcgcttgccgccctcgggagctaaccccgagcacctccagccatttgtgaacctggaggcttgacattcgccagcgcagggccccacaagaaaaattgtgatgcgaatctattt

SEQ ID NO: 3673 - DNA, 6781 bp, Homo sapiens
  source 1..6781: mol_type = unassigned DNA
cccgccgcggctgcagtcgccgctacccccattgtggtctctgccctccccgcgggcccagggcatgctccgtgcccctgcgcccggtctcggcggcggcaggcgacactccgcgccggcggagacatgaggcgctgccggtgggccgccctggccctggggctgctgcgcctctgcttggctcaggccaacttcgccccgcacttcttcgacaacggggtcggcagcaccaacggaaacatggctctgttcagcctcccagaggacacccctgtaggctctcacgtatacaccctgaatgggacagaccctgagggagaccccatctcctaccacatcagctttgaccccagcactagaagcgtcttttctgttgaccccacttttggaaacatcaccctggttgaagagctggacagagagagggaagatgagattgaagccatcatcagcatttctgatggcctgaatctggtggccgaaaaagtcgtgatcctggtgaccgatgccaatgatgaggcgcccaggttcatccaggagccttatgttgccctggttcccgaggacatacctgctgggagcatcatctttaaggtccatgcagtggacagggacacaggctctggagggagtgtcacctacttcctgcagaacctgcactccccatttgccgtggaccgccacagcggtgtgctgcgcctccaggctggggccactctggactacgagaggtcccggacccactacatcaccgtggtcgccaaggatggcggtgggaggcttcatggggctgatgtggtgttctcagccaccaccacggtcacggtcaatgtggaggatgttcaggacatggcccctgtcttcgtgggcacaccctactatggctatgtgtacgaggacacccttccgggctcggaggtactgaaggtggtcgccatggatggagaccggggcaaacccaatcgaattctctacagccttgtaaatgggaacgatggagcctttgaaattaatgagacatctggagccatctccatcactcagagcccggcccagctccagagagaggtgtatgagctgcatgtacaggtgactgaaatgagccctgcggggagcccagctgcccaggccaccgtcccagtcaccatcaggattgtggacctcaacaaccacccgccaacattctatggagagagcggaccccaaaacaggtttgagctgtccatgaatgagcacccaccccagggagagatcctgcggggcctcaagatcaccgtcaatgactccgaccagggagccaatgccaaattcaacttgcagctggtgggacccaggggcatcttccgagtggttccacagacagtcctgaatgaagcccaagtcacaatcattgtggagaactcagctgccattgactttgaaaagtccaaagtattaaccttcaagctcctggctgttgaagtgaacaccccagagaagttcagttccacagcggatgttgtgatccagctcctggacaccaatgacaatgtccccaagttcgactccctctactacgttgccaggattcctgagaacgccccagggggctccagcgtggtggctgtcacagctgtggatccagatacaggaccctggggcgaagtgaaatattccacctatgggactggggcagacctcttcctgatccacccatccactgggcttatctacacccagccctgggctagcctggacgctgaggccactgccaggtacaacttctatgtgaaggcagaggacatggaaggcaagtacagcgtagctgaggtgtttatcacactgctggatgtcaatgaccacccccctcagtttggaaagagcgttcagaagaagacgatggtgctagggaccccagtgaaaattgaggccatagacgaggatgcagaggaacccaacaacctggtggactattccatcacccatgcagagcccgccaacgtgttcgacatcaattcccacacgggggagatctggctcaagaattccatccgctccctggatgccctgcacaacatcacacctggaagggactgcctatggtccctagaggtgcaggccaaggaccggggctccccatccttcagcaccacagccttactcaagattgacatcacagatgctgagaccctctcccggagccccatggctgccttcctgatacagaccaaggacaaccccatgaaggccgtgggtgtgctggccggcaccatggccaccgtcgtggccatcactgtcctcatctccaccgccaccttctggcgcaacaagaagtctaacaaggtcctgccaatgcggcgggtgctccgcaagcggcccagccctgcgccccgcaccatccgcattgagtggctcaagtccaagagcaccaaagccgctaccaagttcatgctcaaagagaaacctcccaatgagaactgtaacaacaacagcccagaaagctctctgctcccgagagctccggctctccctccaccacccagcgtggcgcccagcactggcgcagcccagtggaccgtgcctactgtctctggctctctcactccgcagccgacccaacccccgccaaaacccaaaactatgggaagccccgtccagtcaactctgatctctgagctcaagcaaaagtttgagaagaagagtgtgcacaacaaggcttacttctagtgtatgccctatgaccccccatctttcctccgcccctgacccccaccaccctgctgctcggactatgctccccttcctctgctccttaaggtcactgacccctgttttgcacaatggtataatccccactgtcctcatctctaccgccaccttctggcgcaacaagaagttgcgctctgacagggctctagtcagggccttgggcaagacattgggctctaggatgcaattggcaaatacgtccccgttactcaaatccttggcactactacaatgccctccattcttcagggctgagaattgacgagaagccagctcacccatcccagacctcacagtccctcaggttctactgggatctcatcatcatccttagtcaagcagcagggccctggccacgtggagcaacactgactagaatctggatcctgacgcctgcagctgagagcaggagcaggaaaaggaggctcagcactgtctcaggctggaggtcagcgaacctcgtgggctgtaggaaagcaaatgtaggtaaggggagagcaaggatgcacagaaaacacactgactgtgggactgtgccaggatgcatttggaaagatagagcattctgtctgggcagagactgtggaccctggtatgcccacgtgggacagaggacacagaggtggaagattgatcttgccaagagtgagggcagatgtctccagccaggactgccctgagccgcaaaatgtcaaagctggagctatagaggtagccctaaaggcaactagaagagcatcagggctgctctctgaggagctgccccaccagccatccttgaagagacaattcagggcagttgatgaatatcagggctgagatgtggtgagacttccgtttttatccagctcttttgctcacatcgcgtaaccttgggaaagctgtttaaagtcgctgatcatcctcttcctcatctgtaaatgaagaaagtaggccctgtctacctcacatgcaggtctagggtgaggattgaagaaaatagtggtgatgagggctttaaccaagtgcaaagcggcatgaatgcaaagtatttttctgcagcccagttctgtgggtgcagctcttccagaaagtattaggagcctcacatctactctgccaagcgccccagcaggcactgtgctgggcttaggggctaccactggatgatggcattgccgtgactcacacacctctacttctgttcttccctcactccatccccgctaccgtcctggccagctaccgtcagagagaaccagagctccaagtctttaatttgccaagatgaagaaaatgagttctcaaggagggaatgctttgcttgaggccacacagcaggttggtagcaaagatcttgtctagccagggcagcccttatcagcttgtgacaaccttccccaggacagaagtcatacaaggcctctggggttaatacaaataggttgtgccctgctttaaggaacctgctatcaggaaatctacatgtgtgcacagagagagaaaagtagaacagttctttgcatttggctctacttactaacaacccctctagaatacattggtgatttcatttaaagagattgtatgcatttgtggctttcctgatttctgagtctgtgtttggaggtgttactgagatgtgccagtgtgcagaatccttgctggggtttctacagtccccaacgtgaacagtattaagcaagaggtggactcgagcaatccaggagcccagactgagcaaataagtactttccagcctgtgtttcaggagaggactgtgctggatcatgcttgccctccacagggaatacagcatccttacagcttgcatgcaatcaacctcttttgtaaatggaaaataaagtctgttacccaaaggccatgctgatcccctgctccctgctttcatttatgtttgctgacctgtggagaccagtctttctgacacacagtgaagctcaacttgcctcctggctgcttcagcaggtggatccattcttcgacccccagatgtgactctaaagaaggctgaaaatttttgtccaaattgccatgcagatatcttgaacagcaggacatttgcaggccttgtctactggacttttctcccaaacaggacaagcccaggcagggctgcatggagaggaatggaacctggagctagaattaattgcccactctcccaccctaccagtgcagcccggcaagggcaggaattgggaggcctagggtgggcatgaaagcttgggaagcactgtcgtctctcagacaggcgtcctaaagacctctaggctggaagcttgggcttgcaagtggatccgggaccgagggtggtctcttggacaaccccaggaacttggaccaaggcagagccaatcttgcaaactggccatggatggggaagtgcccggtagccagcatgagccacactaggaaagaggaggagggtgcagccaaacttaaggcaccggcaagtgttgtcagcactggaggagaccccgccagtggggtgaggccagccaagtccctgtgttacgaatggtgggccaaggggctgtctgctaggtcccagtaggacaggcagagctccaggctggcaccatggtaggcctccagggaaagagctgggaggcaggaatggcacactgggcaggcttgcccattcctggccctgagaatggagctgtagcctcatggacaataaatggatgtgacaccaaatactctgcagagtcattttcctcctgcggctgagctcagatcttccaatcacgtgaaataacaaagtcctttacagtttgacagccctaggtctgaattctggttctgccattaattgtgactttgggcaagaggtcaagtctctctgggcctcactttcctcattaacacagggtgcaaagtatggttgcagagaggatgaaaagatctaatatatgtaaagtgcctagcaccggctttgtatctacttacacaagctcagtagacacttgccgtgactgtggcccacatactagaacaccatgtcctgaaagagaggaccccctccatgcatcctcaccccccaggatgtttccacccacctgtaggtccagaagcttttacttcatgctagaaaaagagaagagagtggatccagaggggagtggaggacagggcagatgccacagcatctgtggcctgtgtagccggcagcctgcatttgggcgttgacattccaggggagttaggaacaatgagaggtctctaagaacttgtggcactctgtcctcaagcagctgtccctcagaatcctgctagaaaagtgtgatcagagctgggaaggagccaccatgctctgcttctctaaggatttcggtgattctatttttagggactgaaggcgttgagggaatccaaggccagtccacctgccaggggtgttggcatctgttgacaggcagtggcacatcctgacagtcttcaaggccttggccaccaagggatggagagggagaatggagaagatgccacatgaggaatgaggcaggagactggcatgtgccacatggaggaccccttaggaaactcacaaacaacctagggaggggttctctgaagggcctagtttccagaatgaggcggtcatggcttaagcgaccatcatttgatcaataaagcagagtagcaacaggctgatgttggggacatcggtttgatgttataaaatcgtgcacatgtaccccttttgaggcctgaatgaggttcggttatttattcatttctcaataatttactcagccattcctagggtgacaagtttggagtatatcttctgtgccaggctctcttctaggtgttaggtgtatgtctctaacaagatagaaggaaagaagaaaagaaaaagaacaacattcctctctttaattgctaatcgcctgggcctagggagtcttcattttaaaagcaagtagccctgcttacaaatgtctcctcaatcaaaggcatttgccttaaacttgtatggtctaaactctaaataaataagcttctcaagggcatgacaactata

SEQ ID NO: 3674 - DNA, 2694 bp, Homo sapiens
  source 1..2694: mol_type = unassigned DNA
gtcgccgctacccccattgtggtctctgccctccccgcgggcccagggcatgctccgtgcccctgcgcccggtctcggcggcggcaggcgacactccgcgccggcggagacatgaggcgctgccggtgggccgccctggccctggggctgctgcgcctctgcttggctcaggccaacttcgccccgcacttcttcgacaacggggtcggcagcaccaacggaaacatggctctgttcagcctcccagaggacacccctgtaggctctcacgtatacaccctgaatgggacagaccctgagggagaccccatctcctaccacatcagctttgaccccagcactagaagcgtcttttctgttgaccccacttttggaaacatcaccctggttgaagagctggacagagagagggaagatgagattgaagccatcatcagcatttctgatggcctgaatctggtggccgaaaaagtcgtgatcctggtgaccgatgccaatgatgaggcgcccaggttcatccaggagccttatgttgccctggttcccgaggacatacctgctgggagcatcatctttaaggtccatgcagtggacagggacacaggctctggagggagtgtcacctacttcctgcagaacctgcactccccatttgccgtggaccgccacagcggtgtgctgcgcctccaggctggggccactctggactacgagaggtcccggacccactacatcaccgtggtcgccaaggatggcggtgggaggcttcatggggctgatgtggtgttctcagccaccaccacggtcacggtcaatgtggaggatgttcaggacatggcccctgtcttcgtgggcacaccctactatggctatgtgtacgaggacacccttccgggctcggaggtactgaaggtggtcgccatggatggagaccggggcaaacccaatcgaattctctacagccttgtaaatgggaacgatggagcctttgaaattaatgagacatctggagccatctccatcactcagagcccggcccagctccagagagaggtgtatgagctgcatgtacaggtgactgaaatgagccctgcggggagcccagctgcccaggccaccgtcccagtcaccatcaggattgtggacctcaacaaccacccgccaacattctatggagagagcggaccccaaaacaggtttgagctgtccatgaatgagcacccaccccagggagagatcctgcggggcctcaagatcaccgtcaatgactccgaccagggagccaatgccaaattcaacttgcagctggtgggacccaggggcatcttccgagtggttccacagacagtcctgaatgaagcccaagtcacaatcattgtggagaactcagctgccattgactttgaaaagtccaaagtattaaccttcaagctcctggctgttgaagtgaacaccccagagaagttcagttccacagcggatgttgtgatccagctcctggacaccaatgacaatgtccccaagttcgactccctctactacgttgccaggattcctgagaacgccccagggggctccagcgtggtggctgtcacagctgtggatccagatacaggaccctggggcgaagtgaaatattccacctatgggactggggcagacctcttcctgatccacccatccactgggcttatctacacccagccctgggctagcctggacgctgaggccactgccaggtacaacttctatgtgaaggcagaggacatggaaggcaagtacagcgtagctgaggtgtttatcacactgctggatgtcaatgaccacccccctcagtttggaaagagcgttcagaagaagacgatggtgctagggaccccagtgaaaattgaggccatagacgaggatgcagaggaacccaacaacctggtggactattccatcacccatgcagagcccgccaacgtgttcgacatcaattcccacacgggggagatctggctcaagaattccatccgctccctggatgccctgcacaacatcacacctggaagggactgcctatggtccctagaggtgcaggccaaggaccggggctccccatccttcagcaccacagccttactcaagattgacatcacagatgctgaggtgagaagactaaggtacatgaaaaatagtaacttccctggtacaacaaagtcagtaagaaaaccaaaatttaagcccaagaaaccacattccagccagggtctgttcttgcatccccactgcgaaattgccttattcaatctgagtaatgtgaatctgtactctagagtttttcaaggggcagcccaagcatcttaaaaagtatcagattctcagaaatcctccctagaccattttccctctccctaaatttctatgtttacagaagcaactgaatacttccctacccaccaacatgctcctggctctcccctgcactgcttgctgctcttccacagcccttctctcatcctgacccctctgtctcatgtgcaccaccaagcttcttttgcttggcttgaaggtctgaacatccactctcaccttcatggtagcccaggctatttcatgatggtgacaccctcaagatccgtagaccactgtattagttcgttctcatgctgctaataaagatacccgagactgggtaatttatagaggaaa

SEQ ID NO: 3675 - DNA, 4537 bp, Homo sapiens
  source 1..4537: mol_type = unassigned DNA
catcaccgtggtcgccaaggatggcggtgggaggcttcatggggctgatgtggtgttctcagccaccaccacggtcacggtcaatgtggaggatgttcaggacatggcccctgtcttcgtgggcacaccctactatggctatgtgtacgaggacacccttccgggctcggaggtactgaaggtggtcgccatggatggagaccggggcaaacccaatcgaattctctacagccttgtaaatgggaacgatggagcctttgaaattaatgagacatctggagccatctccatcactcagagcccggcccagctccagagagaggtgtatgagctgcatgtacaggtgactgaaatgagccctgcggggagcccagctgcccaggccaccgtcccagtcaccatcaggattgtggacctcaacaaccacccgccaacattctatggagagagcggaccccaaaacaggtttgagctgtccatgaatgagcacccaccccagggagagatcctgcggggcctcaagatcaccgtcaatgactccgaccagggagccaatgccaaattcaacttgcagctggtgggacccaggggcatcttccgagtggttccacagacagtcctgaatgaagcccaagtcacaatcattgtggagaactcagctgccattgactttgaaaagtccaaagtattaaccttcaaggctgtggatccagatacaggaccctggggcgaagtgaaatattccacctatgggactggggcagacctcttcctgatccacccatccactgggcttatctacacccagccctgggctagcctggacgctgaggccactgccaggtacaacttctatgtgaaggcagaggacatggaaggcaagtacagcgtagctgaggtgtttatcacactgctggatgtcaatgaccacccccctcagtttggaaagagcgttcagaagaagacgatggtgctagggaccccagtgaaaattgaggccatagacgaggatgcagaggaacccaacaacctggtggactattccatcacccatgcagagcccgccaacgtgttcgacatcaattcccacacgggggagatctggctcaagaattccatccgctccctggatgccctgcacaacatcacacctggaagggactgcctatggtccctagaggtgcaggccaaggaccggggctccccatccttcagcaccacagccttactcaagattgacatcacagatgctgagaccctctcccggagccccatggctgccttcctgatacagaccaaggacaaccccatgaaggccgtgggtgtgctggccggcaccatggccaccgtcgtggccatcactgtcctcatctccaccgccaccttctggcgcaacaagaagtctaacaaggtcctgccaatgcggcgggtgctccgcaagcggcccagccctgcgccccgcaccatccgcattgagtggctcaagtccaagagcaccaaagccgctaccaagttcatgctcaaagagaaacctcccaatgagaactgtaacaacaacagcccagaaagctctctgctcccgagagctccggctctccctccaccacccagcgtggcgcccagcactggcgcagcccagtggaccgtgcctactgtctctggctctctcactccgcagccgacccaacccccgccaaaacccaaaactatgggaagccccgtccagtcaactctgatctctgagctcaagcaaaagtttgagaagaagagtgtgcacaacaaggcttacttctagtgtatgccctatgaccccccatctttcctccgcccctgacccccaccaccctgctgctcggactatgctccccttcctctgctccttaaggtcactgacccctgttttgcacaatggtataatccccactgtcctcatctctaccgccaccttctggcgcaacaagaagttgcgctctgacagggctctagtcagggccttgggcaagacattgggctctaggatgcaattggcaaatacgtccccgttactcaaatccttggcactactacaatgccctccattcttcagggctgagaattgacgagaagccagctcacccatcccagacctcacagtccctcaggttctactgggatctcatcatcatccttagtcaagcagcagggccctggccacgtggagcaacactgactagaatctggatcctgacgcctgcagctgagagcaggagcaggaaaaggaggctcagcactgtctcaggctggaggtcagcgaacctcgtgggctgtaggaaagcaaatgtaggtaaggggagagcaaggatgcacagaaaacacactgactgtgggactgtgccaggatgcatttggaaagatagagcattctgtctgggcagagactgtggaccctggtatgcccacgtgggacagaggacacagaggtggaagattgatcttgccaagagtgagggcagatgtctccagccaggactgccctgagccgcaaaatgtcaaagctggagctatagaggtagccctaaaggcaactagaagagcatcagggctgctctctgaggagctgccccaccagccatccttgaagagacaattcagggcagttgatgaatatcagggctgagatgtggtgagacttccgtttttatccagctcttttgctcacatcgcgtaaccttgggaaagctgtttaaagtcgctgatcatcctcttcctcatctgtaaatgaagaaagtaggccctgtctacctcacatgcaggtctagggtgaggattgaagaaaatagtggtgatgagggctttaaccaagtgcaaagcggcatgaatgcaaagtatttttctgcagcccagttctgtgggtgcagctcttccagaaagtattaggagcctcacatctactctgccaagcgccccagcaggcactgtgctgggcttaggggctaccactggatgatggcattgccgtgactcacacacctctacttctgttcttccctcactccatccccgctaccgtcctggccagctaccgtcagagagaaccagagctccaagtctttaatttgccaagatgaagaaaatgagttctcaaggagggaatgctttgcttgaggccacacagcaggttggtagcaaagatcttgtctagccagggcagcccttatcagcttgtgacaaccttccccaggacagaagtcatacaaggcctctggggttaatacaaataggttgtgccctgctttaaggaacctgctatcaggaaatctacatgtgtgcacagagagagaaaagtagaacagttctttgcatttggctctacttactaacaacccctctagaatacattggtgatttcatttaaagagattgtatgcatttgtggctttcctgatttctgagtctgtgtttggaggtgttactgagatgtgccagtgtgcagaatccttgctggggtttctacagtccccaacgtgaacagtattaagcaagaggtggactcgagcaatccaggagcccagactgagcaaataagtactttccagcctgtgtttcaggagaggactgtgctggatcatgcttgccctccacagggaatacagcatccttacagcttgcatgcaatcaacctcttttgtaaatggaaaataaagtctgttacccaaaggccatgctgatcccctgctccctgctttcatttatgtttgctgacctgtggagaccagtctttctgacacacagtgaagctcaacttgcctcctggctgcttcagcaggtggatccattcttcgacccccagatgtgactctaaagaaggctgaaaatttttgtccaaattgccatgcagatatcttgaacagcaggacatttgcaggccttgtctactggacttttctcccaaacaggacaagcccaggcagggctgcatggagaggaatggaacctggagctagaattaattgcccactctcccaccctaccagtgcagcccggcaagggcaggaattgggaggcctagggtgggcatgaaagcttgggaagcactgtcgtctctcagacaggcgtcctaaagacctctaggctggaagcttgggcttgcaagtggatccgggaccgagggtggtctcttggacaaccccaggaacttggaccaaggcagagccaatcttgcaaactggccatggatggggaagtgcccggtagccagcatgagccacactaggaaagaggaggagggtgcagccaaacttaaggcaccggcaagtgttgtcagcactggaggagaccccgccagtggggtgaggccagccaagtccctgtgttacgaatggtgggccaaggggctgtctgctaggtcccagtaggacaggcagagctccaggctggcaccatggtaggcctccagggaaagagctgggaggcaggaatggcacactgggcaggcttgcccattcctggccctgagaatggagctgtagcctcatggacaataaatggatgtgacacc

SEQ ID NO: 3676 - DNA, 587 bp, Homo sapiens
  source 1..587: mol_type = unassigned DNA
catggatggagaccggggcaaacccaatcgaattctctacagccttgtaaatgacttccctaggcaatgcaggacgatcctgtggcacgactcccctgcgcctccctgtggtcctgtgcagaacttcagggtgcatctcccttgacagggaacgatggagcctttgaaattaatgagacatctggagccatctccatcactcagagcccggcccagctccagagagaggtgtatgagctgcatgtacaggtgactgaaatgagccctgcggggagcccagctgcccaggccaccgtcccagtcaccatcaggattgtggacctcaacaaccacccgccaacattctatggagagagcggaccccaaaacaggtttgagctgtccatgaatgagcacccaccccagggagagatcctgcggggcctcaagatcaccgtcaatgactccgaccagggagccaatgccaaattcaacttgcagctggtgggacccaggggcatcttccgagtggttccacagacagtcctgaatgaagcccaagtcacaatcattgtggagaactcagctgccattgactttgaaaagtc

SEQ ID NO: 3677 - DNA, 700 bp, Homo sapiens
  source 1..700: mol_type = unassigned DNA
tggagaactcagctgccattgactttgaaaagtccaaagtattaaccttcaagctcctggctgttgaagtgaacaccccagagaagttcagttccacagcggatgttgtgatccagctcctggacaccaatgacaatgtccccaagttcgactccctctactacgttgccaggattcctgagaacgccccagggggctccagcgtggtggctgtcacagctgtggatccagatacaggaccctggggcgaagtgaaatattccacctatgggactggggcagacctcttcctgatccacccatccactgggcttatctacacccagccctgggctagcctggacgctgaggccactgccaggtacaacttctatgtgaaggcagaggacatggaaggcaagccatagacgaggatgcagaggaacccaacaacctggtggactattccatcacccatgcagagcccgccaacgtgttcgacatcaattcccacacgggggagatctggctcaagaattccatccgctccctggatgccctgcacaacatcacacctggaagggactgcctatggtccctagaggtgcaggccaaggaccggggctccccatccttcagcaccacagccttactcaagattgacatcacagatgctgagaccctctcccggagccccatggctgccttcctgatacagacc

SEQ ID NO: 3678 - DNA, 3757 bp, Homo sapiens
  source 1..3757: mol_type = unassigned DNA; mol_type = unassigned DNA
gataatggaatcggctagcccatgtgtaagacctacgtaaaccctggcttataggagagcatgcattctgttcctttcccaactcaatcctctcaaaataggatcaggaccatttcccatcaacccagcaagccccatatgacgtgctgatttagccagagtacacaaggattgtccccaaagcccagctctgtctgtctctccctgcgcacaggccatagacgaggatgcagaggaacccaacaacctggtggactattccatcacccatgcagagcccgccaacgtgttcgacatcaattcccacacgggggagatctggctcaagaattccatccgctccctggatgccctgcacaacatcacacctggaagggactgcctatggtccctagaggtgcaggccaaggaccggggctccccatccttcagcaccacagccttactcaagattgacatcacagatgctgagaccctctcccggagccccatggctgccttcctgatacagaccaaggacaaccccatgaaggccgtgggtgtgctggccggcaccatggccaccgtcgtggccatcactgtcctcatctccaccgccaccttctggcgcaacaagaagtctaacaaggtcctgccaatgcggcgggtgctccgcaagcggcccagccctgcgccccgcaccatccgcattgagtggctcaagtccaagagcaccaaagccgctaccaagttcatgctcaaagagaaacctcccaatgagaactgtaacaacaacagcccagaaagctctctgctcccgagagctccggctctccctccaccacccagcgtggcgcccagcactggcgcagcccagtggaccgtgcctactgtctctggctctctcactccgcagccgacccaacccccgccaaaacccaaaactatgggaagccccgtccagtcaactctgatctctgagctcaagcaaaagtttgagaagaagagtgtgcacaacaaggcttacttctagtgtatgccctatgaccccccatctttcctccgcccctgacccccaccaccctgctgctcggactatgctccccttcctctgctccttaaggtcactgacccctgttttgcacaatggtataatccccactgtcctcatctctaccgccaccttctggcgcaacaagaagttgcgctctgacagggctctagtcagggccttgggcaagacattgggctctaggatgcaattggcaaatacgtccccgttactcaaatccttggcactactacaatgccctccattcttcagggctgagaattgacgagaagccagctcacccatcccagacctcacagtccctcaggttctactgggatctcatcatcatccttagtcaagcagcagggccctggccacgtggagcaacactgactagaatctggatcctgacgcctgcagctgagagcaggagcaggaaaaggaggctcagcactgtctcaggctggaggtcagcgaacctcgtgggctgtaggaaagcaaatgtaggtaaggggagagcaaggatgcacagaaaacacactgactgtgggactgtgccaggatgcatttggaaagatagagcattctgtctgggcagagactgtggaccctggtatgcccacgtgggacagaggacacagaggtggaagattgatcttgccaagagtgagggcagatgtctccagccaggactgccctgagccgcaaaatgtcaaagctggagctatagaggtagccctaaaggcaactagaagagcatcagggctgctctctgaggagctgccccaccagccatccttgaagagacaattcagggcagttgatgaatatcagggctgagatgtggtgagacttccgtttttatccagctcttttgctcacatcgcgtaaccttgggaaagctgtttaaagtcgctgatcatcctcttcctcatctgtaaatgaagaaagtaggccctgtctacctcacatgcaggtctagggtgaggattgaagaaaatagtggtgatgagggctttaaccaagtgcaaagcggcatgaatgcaaagtatttttctgcagcccagttctgtgggtgcagctcttccagaaagtattaggagcctcacatctactctgccaagcgccccagcaggcactgtgctgggcttaggggctaccactggatgatggcattgccgtgactcacacacctctacttctgttcttccctcactccatccccgctaccgtcctggccagctaccgtcagagagaaccagagctccaagtctttaatttgccaagatgaagaaaatgagttctcaaggagggaatgctttgcttgaggccacacagcaggttggtagcaaagatcttgtctagccagggcagcccttatcagcttgtgacaaccttccccaggacagaagtcatacaaggcctctggggttaatacaaataggttgtgccctgctttaaggaacctgctatcaggaaatctacatgtgtgcacagagagagaaaagtagaacagttctttgcatttggctctacttactaacaacccctctagaatacattggtgatttcatttaaagagattgtatgcatttgtggctttcctgatttctgagtctgtgtttggaggtgttactgagatgtgccagtgtgcagaatccttgctggggtttctacagtccccaacgtgaacagtattaagcaagaggtggactcgagcaatccaggagcccagactgagcaaataagtactttccagcctgtgtttcaggagaggactgtgctggatcatgcttgccctccacagggaatacagcatccttacagcttgcatgcaatcaacctcttttgtaaatggaaaataaagtctgttacccaaaggccatgctgatcccctgctccctgctttcatttatgtttgctgacctgtggagaccagtctttctgacacacagtgaagctcaacttgcctcctggctgcttcagcaggtggatccattcttcgacccccagatgtgactctaaagaaggctgaaaatttttgtccaaattgccatgcagatatcttgaacagcaggacatttgcaggccttgtctactggacttttctcccaaacaggacaagcccaggcagggctgcatggagaggaatggaacctggagctagaattaattgcccactctcccaccctaccagtgcagcccggcaagggcaggaattgggaggcctagggtgggcatgaaagcttgggaagcactgtcgtctctcagacaggcgtcctaaagacctctaggctggaagcttgggcttgcaagtggatccgggaccgagggtggtctcttggacaaccccaggaacttggaccaaggcagagccaatcttgcaaactggccatggatggggaagtgcccggtagccagcatgagccacactaggaaagaggaggagggtgcagccaaacttaaggcaccggcaagtgttgtcagcactggaggagaccccgccagtggggtgaggccagccaagtccctgtgttacgaatggtgggccaaggggctgtctgctaggtcccagtaggacaggcagagctccaggctggcaccatggtaggcctccagggaaagagctgggaggcaggaatggcacactgggcaggcttgcccattcctggccctgagaatggagctgtagcctcatggacaataaatggatgtgacaccaaa

SEQ ID NO: 3679 - DNA, 503 bp, Homo sapiens
  source 1..503: mol_type = unassigned DNA; mol_type = unassigned DNA
catcacccatgcagagcccgccaacgtgttcgacatcaattcccacacgggggagatctggctcaagaattccatccgctccctggatgccctgcacaacatcacacctggaagggactgcctatggtccctagaggtgcaggccaaggaccggggctccccatccttcagcaccacagccttactcaagattgacatcacagatgctgaggtgagaagactaagaagcaactgaatacttccctacccaccaacatgctcctggctctcccctgcactgcttgctgctcttccacagcccttctctcatcctgacccctctgtctcatgtgcaccaccaagcttcttttgcttggcttgaaggtctgaacatccactctcaccttcatggtagcccaggctatttcatgatggtgacaccctcaagatccgtagaccactgtattagttcgttctcatgctgctaataaagatacccgagactgggtaatttatagaggaaa

SEQ ID NO: 3680 - DNA, 759 bp, Homo sapiens
  source 1..759: mol_type = unassigned DNA; mol_type = unassigned DNA
ccccgctgcaagttcttagattcctggaggatctgcagagtcaacattaggagtatccatccattcaccaaggccatcaggaatgtgctgaatgtgctgtaaagaagagttgtcaattgtgcacagaagataagaaatatatgatgaatagataattgaaaagagatcctccagaaagagcagaaggaagtttcttcaatgataccagtaacagcaattcaaagatgtgaatgggattaattcagggctgttgctcctgacagataagtcagtctacctgttgttgaatgacatgcagaaaagaaatttggtaagaagaaagtgatttgactttgaagaaagatgacaccacctttgatgagatatgtgtcacaaagatgtctacacggaactgccagggaatggactcagtgatcaaacccctggacacaattcctgaggataaaaaagtcagagttcagaggacacagagcacttttgacccatttgagaaaccagctaatcaagtaaagagggtgcattctgagaacaatgcttgcattaactttaagacctcctccactggcaaagagtcacctaaagttaggcggcactccagccccagctcgccaacaagtcccaaatttggaaaagctgactcatatgaaaagctggaaaaactaggggaaggatcttatgctacagtatacaaagggaaaagcaaggtaaatgggaagttggtagctctgaaggtgatcaggctgcaggaagaagaaggga

SEQ ID NO: 3681 - DNA, 175 bp, Homo sapiens
  source 1..175: mol_type = unassigned DNA; mol_type = unassigned DNA
ttcagggctgttgctcctgacagataagtcagtctacctgttgttgaatgacatgcagaaaagaaatttggtaagaagaaagtgatttgactttgaagaaagatgacaccacctttgatgagggtaaatgggaagttggtagctctgaaggtgatcaggctgcaggaagaagaag

SEQ ID NO: 3682 - DNA, 590 bp, Homo sapiens
  source 1..590: mol_type = unassigned DNA; mol_type = unassigned DNA
ttcagggctgttgctcctgacagataagtcagtctacctgttgttgaatgacatgcagaaaagaaatttggtaagaagaaagtgatttgactttgaagaaagatgacaccacctttgatgaggctgtggaagtgattctgattctctgccagggttgtgacgctgcagctttccatgaagtacttcacaagtagatatgtgtcacaaagatgtctacacggaactgccagggaatggactcagtgatcaaacccctggacacaattcctgaggataaaaaagtcagagttcagaggacacagagcacttttgacccatttgagaaaccagctaatcaagtaaagagggtgcattctgagaacaatgcttgcattaactttaagacctcctccactggcaaagagtcacctaaagttaggcggcactccagccccagctcgccaacaagtcccaaatttggaaaagctgactcatatgaaaagctggaaaaactaggggaaggatcttatgctacagtatacaaagggaaaagcaaggtaaatgggaagttggtagctctgaaggtgatcaggctgcaggaagaagaaggg

SEQ ID NO: 3683 - DNA, 565 bp, Homo sapiens
  source 1..565: mol_type = unassigned DNA; mol_type = unassigned DNA
ttcagggctgttgctcctgacagataagtcagtctacctgttgttgaatgacatgcagaaaagaaatttggtaagaagaaagtgatttgactttgaagaaagatgacaccacctttgatgagctttgatgattgccagaacaaagtgttggctctgcctggctctttgatatgtgtcacaaagatgtctacacggaactgccagggaatggactcagtgatcaaacccctggacacaattcctgaggataaaaaagtcagagttcagaggacacagagcacttttgacccatttgagaaaccagctaatcaagtaaagagggtgcattctgagaacaatgcttgcattaactttaagacctcctccactggcaaagagtcacctaaagttaggcggcactccagccccagctcgccaacaagtcccaaatttggaaaagctgactcatatgaaaagctggaaaaactaggggaaggatcttatgctacagtatacaaagggaaaagcaaggtaaatgggaagttggtagctctgaaggtgatcaggctgcaggaagaagaaggga

SEQ ID NO: 3684 - DNA, 620 bp, Homo sapiens
  source 1..620: mol_type = unassigned DNA; mol_type = unassigned DNA
ttcagggctgttgctcctgacagataagtcagtctacctgttgttgaatgacatgcagaaaagaaatttggtaagaagaaagtgatttgactttgaagaaagatgacaccacctttgatgagctttgatgattgccagaacaaagtgttggctctgcctggctctttgatcctgaggtgacttccttctaagtttttcctccaaagctaccaaataaaccctaatatgtgtcacaaagatgtctacacggaactgccagggaatggactcagtgatcaaacccctggacacaattcctgaggataaaaaagtcagagttcagaggacacagagcacttttgacccatttgagaaaccagctaatcaagtaaagagggtgcattctgagaacaatgcttgcattaactttaagacctcctccactggcaaagagtcacctaaagttaggcggcactccagccccagctcgccaacaagtcccaaatttggaaaagctgactcatatgaaaagctggaaaaactaggggaaggatcttatgctacagtatacaaagggaaaagcaaggtaaatgggaagttggtagctctgaaggtgatcaggctgcaggaagaagaaggga

SEQ ID NO: 3685 - DNA, 4995 bp, Homo sapiens
  source 1..4995: mol_type = unassigned DNA; mol_type = unassigned DNA
cgtcgcttcccggcccgccgaggaggtggtggaggaggaggcgccgctttccccgcggcgcgcgccctcgccgttgtctgagctgtgcctggaccagtttggggaagttgtcggggctccgcgtcgcccagatgtgtgacctcattgagccgcagccggccgagaagatcggcaagatgaagaagttgcggagaactttgtcggagagtttcagtcgcattgctttgaagaaagatgacaccacctttgatgagatatgtgtcacaaagatgtctacacggaactgccagggaatggactcagtgatcaaacccctggacacaattcctgaggataaaaaagtcagagttcagaggacacagagcacttttgacccatttgagaaaccagctaatcaagtaaagagggtgcattctgagaacaatgcttgcattaactttaagacctcctccactggcaaagagtcacctaaagttaggcggcactccagccccagctcgccaacaagtcccaaatttggaaaagctgactcatatgaaaagctggaaaaactaggggaaggatcttatgctacagtatacaaagggaaaagcaaggtaaatgggaagttggtagctctgaaggtgatcaggctgcaggaagaagaagggacacctttcacagctatcagggaagcttctcttttaaaaggactaaaacatgctaacatagtgctacttcatgacatcatccataccaaggagacgctgacacttgtgtttgaatatgtgcacactgatttatgtcagtacatggacaagcaccctggggggctgcatccagataatgtgaagttgtttttatttcagttgctgcgaggtctgtcttacatccaccagcgttatattttgcacagagacctgaaaccacagaaccttctgatcagtgacacgggggagttaaagctggcagatttcggtcttgcaagagcaaaatccgtccctagccacacatactccaacgaagtggttaccttgtggtacagacctccagatgtccttctaggctcaacagaatattccacctgccttgacatgtggggagtaggttgcatctttgttgaaatgatccaaggagttgctgcttttccaggaatgaaagacattcaggatcaacttgaacgaatatttctggttcttggaacaccaaatgaggacacatggcctggagttcattctttaccacattttaagccagaacgctttaccctgtacagctctaaaaaccttagacaagcatggaataagctcagctatgtgaaccatgcagaggacctggcctccaagctcctacaatgttccccaaagaacagactgtcggcacaggctgccttgagccacgagtattttagtgacctgccgccacggctatgggaactcaccgacatgtcttctatttttactgtcccaaatgtgagattgcaaccagaagctggagaaagcatgcgggcctttgggaaaaacaatagttatggcaaaagtctatcaaacagcaagcactgacaagcagcacattctcaagagcacacaggattaagttgtcatcattctgggaagaaaaaaaaaacattaatgaagaggccaataatatgaagggaatcatggatcagttttctttcgctccctgtggtggatttcacttacaagaaaattgaagctggcaagaccctgttttctctgcaatttatttaaaaccttgcacgcatttggataccttgtgatttccaagaactacgtgaagattaagctttgcttactgatacatggcatgtattcttttcagtcttttgtgtttgattttgtttgatttccctctgcagcacagcgtctctgtaaaggtttttatgctttcaccagccatgtcttaaatacattaagacaacacatttggtgttcacacttcttcagtaatgtctgaacttgaaagccacagagtggcataaaacaatgtgtgttttctttgagagcagtgcacattttgcaaccactaggaaggaaattttctgctaaagcaaacccctgttctctgacttgacaacttggccccggactgtggggccccacctgttgcttaccttttgaggtaattttgcaaatgtggtttttttacttggaaataactgcacatttatatataggatattggactctgcttagcattttcaagccacatagcatgactgttttttgaataggttggaattgaaaaaacaattatcaaacgttaagaacaaagacagggataaattgcttacatttcaacctctggagattgaggtaactttttgtgtctgggtcttgtcaacatctaatttttttccatccattctgttacactttgtattttctaactggagaaaagagtgaggaacagaatgttttaaatctggtgcaaaagaactatatctgctggatgagccttgaaagcagtcttggcctgttagggcttacaaagtaaattacaaagtgatccagttcaaagtttgcttagttacaacaaagcacctttaaaaaaaatacattttaaaaaaacattccaagccaattggaagacatcattgggttcttactttaagacatctcctggaataactgttcaaatgcaggttttagaaacaatgcaggaatcttgctttaaagatgaaaaagggaatgggccagcttcccttactcaaggagttgagggaccttggaggatgaaggcgagtatgtgacactggagaaaagtggaccaggcatgtcttttgctttgatctggagggagggctgcctgatgcaggccggctcccagtggggcaggcctcgctgcagaatgcccagtagtactgcggccaaggggacagttaggagacttcatctaaagcatgaaacctagctcctctacacacaaattcctatggaaatacctttgtgtacagtgtcttacattttcctattagtcagaaagaaggagagaatgagtgagtgcttgaaatgtgtcatactgttttaggatcaagactaggaattaggagccaggttgacaaggactttttctgagagttgggtgagggtaaagcttttctataatcaagctcaatacaccaaggaaactggatccagaattcctaaactttaaaatggtactgtctgcggagtggagtatggatggttatgtcaaagtcatagttcatcctatccagatgtagcattcatggtaaacttttaagtgctaagcaaggaattatttactgattggttttaaagagagcagaaaacacccaagtgtagaatgtctactgtttgctacctagaaatcttttccattcctctttcatacattccaacccactggaagtctttagaggtattttgatttaaagtatacttaaattaggatttcttaaagaaaacatagggagaaaactttacatgcaattaaaaatggactttcctgtgatttgtttttaatcattcatttggagaagaggcatgacctttgtatttcactaagtttaaagcaagagcaactgatgattaaatgttgctttttaataaggtttttaacttgaaaatttgaaaatatttaatgttgaaagacttcaattagggctattagagttatatctccctgtcgtaggcagcttcttcggagaagtgaaatataacattactcagtggacggagaaatctgttttgttacagagacatgcctctcagaaggtcaggaggttttgagtacctatccttgccacccatacaggaaatccaaagtttggtgtctctctctctctgtctctttctttctctttctccccccaaacccctctcactccctccctccctctctccttcccctatttgcaatcatattctccctctgcttcttttctcttctgccctccttgtgggcagtcatgaaaatcaattcagactgtgttgattagcagatttattattctattgagaaagcactggaatgttttgtgagattatttttatatgaaggaatagcctgaactcaaacagatggtaagaatagtacaaacaccttagcacatcactgcacacacagtattctgaaaggagatttgacacttaattcccattttcttaaaataacagttttgttgacttaaaaatatgagatacataggatgtgaaaaaaaatgtttgcagtactcagcaaaaaatagggtacataaagcagggtggctgtccatccactgattctggggtgagaagcgatttctacctcgcaagagtgactagaaagtttctaggagcacctccaggcttgcaaagaaagtgaggcctcttggtatcctttcctcagtgtgtatatgacagccagtataatcaataccctaggttatgcgtctatatgatactcatctgtgaatattattggttttgtaatctttgttatataagaggatgtttaggctgtatatactggggtagattattgcctgccccttatacataggaatatgctgcataattgcgcataacttccatctcccttactggcttgtaggcagaggaaactgtatatgttactgccttgtacttttctcatacaccaaaaacacaccaaaaaaatcaataaaataagcaatcttctattctcattccttttcccacagcagcatattttagaggcacatacaaaacctacattctctagttgggagtggatttttaaagttttccttttatcttttatttttttttgtatgatgcactgagatgtgtactttctaacaggggattggtacctaagaaatgtggtagcattattcagaaaactattatactttcaaatgacacatagtaaggagaatggaataatacatgttgcatatttgttaccagttgtaatttgtctgtattatgaaagatgtaatggtttgtcagctgtcactgttgttttcttgtaacatgatatggaataaagtatagcagaatctccgta

SEQ ID NO: 3686 - DNA, 580 bp, Homo sapiens
  source 1..580: mol_type = unassigned DNA; mol_type = unassigned DNA
attttagcagcttttgcagcatgcatgatggtggctgaaacttggccttctataggatcccagattattatttaatggggttgtcactcaggacacttactggctttctccagtgctcttaaaaaattgaattgagcatgatgaggtgcatccccttgattaaatgtttttcctcctatgcaatcaccattagctgtttggctcccattctgtattcttctgaagcagccctgcattgcaaatcaatatctttctgaaaagacagtgtgttgtgaattgccttgacagcatatgcacggttactttggctgcaatgctgctgcagagcccggttactctgccttcgtgggaactccacagtacggccgtaccatttcagcttgctagtgcagaaagatgtgaattcagttgctgtatgagcctggcctggtgcaaacacattgctagagacatgttaaagagttccaggtgaatcaagcctgagggagacaacagcaaaacgatatgtgtcacaaagatgtctacacggaactgccagggaatggactcagtgatcaaacccctggacacaattcctgag

SEQ ID NO: 3687 - DNA, 563 bp, Homo sapiens
  source 1..563: mol_type = unassigned DNA; mol_type = unassigned DNA
gcagcatgcatgatggtggctgaaacttggccttctataggatcccagattattatttaatggggttgtcactcaggacacttactggctttctccagtgctcttaaaaaattgaattgagcatgatgagtacggccgtaccatttcagcttgctagtgcagaaagatgtgaattcagttgctgtatgagcctggcctggtgcaaacacattgctagagacatgttaaagagttccaggtgaatcaagcctgagggagacaacagcaaaacgatatgtgtcacaaagatgtctacacggaactgccagggaatggactcagtgatcaaacccctggacacaattcctgaggataaaaaagtcagagttcagaggacacagagcacttttgacccatttgagaaaccagctaatcaagtaaagagggtgcattctgagaacaatgcttgcattaactttaagacctcctccactggcaaagagtcacctaaagttaggcggcactccagccccagctcgccaacaagtcccaaatttggaaaagctgactcatatgaaaagctg

SEQ ID NO: 3688 - DNA, 4953 bp, Homo sapiens
  source 1..4953: mol_type = unassigned DNA; mol_type = unassigned DNA
gcatccccttgattaaatgtttttcctcctatgcaatcaccattagctgtttggctcccattctgtattcttctgaagcagccctgcattgcaaatcaatatctttctgaaaagacagtgtgttgtgaattgccttgacagcatatgcacggttactttggctgcaatgctgctgcagagcccggttactctgccttcgtgggaactccacagatatgtgtcacaaagatgtctacacggaactgccagggaatggactcagtgatcaaacccctggacacaattcctgaggataaaaaagtcagagttcagaggacacagagcacttttgacccatttgagaaaccagctaatcaagtaaagagggtgcattctgagaacaatgcttgcattaactttaagacctcctccactggcaaagagtcacctaaagttaggcggcactccagccccagctcgccaacaagtcccaaatttggaaaagctgactcatatgaaaagctggaaaaactaggggaaggatcttatgctacagtatacaaagggaaaagcaaggtaaatgggaagttggtagctctgaaggtgatcaggctgcaggaagaagaagggacacctttcacagctatcagggaagcttctcttttaaaaggactaaaacatgctaacatagtgctacttcatgacatcatccataccaaggagacgctgacacttgtgtttgaatatgtgcacactgatttatgtcagtacatggacaagcaccctggggggctgcatccagataatgtgaagttgtttttatttcagttgctgcgaggtctgtcttacatccaccagcgttatattttgcacagagacctgaaaccacagaaccttctgatcagtgacacgggggagttaaagctggcagatttcggtcttgcaagagcaaaatccgtccctagccacacatactccaacgaagtggttaccttgtggtacagacctccagatgtccttctaggctcaacagaatattccacctgccttgacatgtggggagtaggttgcatctttgttgaaatgatccaaggagttgctgcttttccaggaatgaaagacattcaggatcaacttgaacgaatatttctggttcttggaacaccaaatgaggacacatggcctggagttcattctttaccacattttaagccagaacgctttaccctgtacagctctaaaaaccttagacaagcatggaataagctcagctatgtgaaccatgcagaggacctggcctccaagctcctacaatgttccccaaagaacagactgtcggcacaggctgccttgagccacgagtattttagtgacctgccgccacggctatgggaactcaccgacatgtcttctatttttactgtcccaaatgtgagattgcaaccagaagctggagaaagcatgcgggcctttgggaaaaacaatagttatggcaaaagtctatcaaacagcaagcactgacaagcagcacattctcaagagcacacaggattaagttgtcatcattctgggaagaaaaaaaaaacattaatgaagaggccaataatatgaagggaatcatggatcagttttctttcgctccctgtggtggatttcacttacaagaaaattgaagctggcaagaccctgttttctctgcaatttatttaaaaccttgcacgcatttggataccttgtgatttccaagaactacgtgaagattaagctttgcttactgatacatggcatgtattcttttcagtcttttgtgtttgattttgtttgatttccctctgcagcacagcgtctctgtaaaggtttttatgctttcaccagccatgtcttaaatacattaagacaacacatttggtgttcacacttcttcagtaatgtctgaacttgaaagccacagagtggcataaaacaatgtgtgttttctttgagagcagtgcacattttgcaaccactaggaaggaaattttctgctaaagcaaacccctgttctctgacttgacaacttggccccggactgtggggccccacctgttgcttaccttttgaggtaattttgcaaatgtggtttttttacttggaaataactgcacatttatatataggatattggactctgcttagcattttcaagccacatagcatgactgttttttgaataggttggaattgaaaaaacaattatcaaacgttaagaacaaagacagggataaattgcttacatttcaacctctggagattgaggtaactttttgtgtctgggtcttgtcaacatctaatttttttccatccattctgttacactttgtattttctaactggagaaaagagtgaggaacagaatgttttaaatctggtgcaaaagaactatatctgctggatgagccttgaaagcagtcttggcctgttagggcttacaaagtaaattacaaagtgatccagttcaaagtttgcttagttacaacaaagcacctttaaaaaaaatacattttaaaaaaacattccaagccaattggaagacatcattgggttcttactttaagacatctcctggaataactgttcaaatgcaggttttagaaacaatgcaggaatcttgctttaaagatgaaaaagggaatgggccagcttcccttactcaaggagttgagggaccttggaggatgaaggcgagtatgtgacactggagaaaagtggaccaggcatgtcttttgctttgatctggagggagggctgcctgatgcaggccggctcccagtggggcaggcctcgctgcagaatgcccagtagtactgcggccaaggggacagttaggagacttcatctaaagcatgaaacctagctcctctacacacaaattcctatggaaatacctttgtgtacagtgtcttacattttcctattagtcagaaagaaggagagaatgagtgagtgcttgaaatgtgtcatactgttttaggatcaagactaggaattaggagccaggttgacaaggactttttctgagagttgggtgagggtaaagcttttctataatcaagctcaatacaccaaggaaactggatccagaattcctaaactttaaaatggtactgtctgcggagtggagtatggatggttatgtcaaagtcatagttcatcctatccagatgtagcattcatggtaaacttttaagtgctaagcaaggaattatttactgattggttttaaagagagcagaaaacacccaagtgtagaatgtctactgtttgctacctagaaatcttttccattcctctttcatacattccaacccactggaagtctttagaggtattttgatttaaagtatacttaaattaggatttcttaaagaaaacatagggagaaaactttacatgcaattaaaaatggactttcctgtgatttgtttttaatcattcatttggagaagaggcatgacctttgtatttcactaagtttaaagcaagagcaactgatgattaaatgttgctttttaataaggtttttaacttgaaaatttgaaaatatttaatgttgaaagacttcaattagggctattagagttatatctccctgtcgtaggcagcttcttcggagaagtgaaatataacattactcagtggacggagaaatctgttttgttacagagacatgcctctcagaaggtcaggaggttttgagtacctatccttgccacccatacaggaaatccaaagtttggtgtctctctctctctgtctctttctttctctttctccccccaaacccctctcactccctccctccctctctccttcccctatttgcaatcatattctccctctgcttcttttctcttctgccctccttgtgggcagtcatgaaaatcaattcagactgtgttgattagcagatttattattctattgagaaagcactggaatgttttgtgagattatttttatatgaaggaatagcctgaactcaaacagatggtaagaatagtacaaacaccttagcacatcactgcacacacagtattctgaaaggagatttgacacttaattcccattttcttaaaataacagttttgttgacttaaaaatatgagatacataggatgtgaaaaaaaatgtttgcagtactcagcaaaaaatagggtacataaagcagggtggctgtccatccactgattctggggtgagaagcgatttctacctcgcaagagtgactagaaagtttctaggagcacctccaggcttgcaaagaaagtgaggcctcttggtatcctttcctcagtgtgtatatgacagccagtataatcaataccctaggttatgcgtctatatgatactcatctgtgaatattattggttttgtaatctttgttatataagaggatgtttaggctgtatatactggggtagattattgcctgccccttatacataggaatatgctgcataattgcgcataacttccatctcccttactggcttgtaggcagaggaaactgtatatgttactgccttgtacttttctcatacaccaaaaacacaccaaaaaaatcaataaaataagcaatcttctattctcattccttttcccacagcagcatattttagaggcacatacaaaacctacattctctagttgggagtggatttttaaagttttccttttatcttttatttttttttgtatgatgcactgagatgtgtactttctaacaggggattggtacctaagaaatgtggtagcattattcagaaaactattatactttcaaatgacacatagtaaggagaatggaataatacatgttgcatatttgttaccagttgtaatttgtctgtattatgaaagatgtaatggtttgtcagctgtcactgttgttttcttgtaacatgatatggaataaagtatagcagaatctccgt

SEQ ID NO: 3689 - DNA, 5163 bp, Homo sapiens
  source 1..5163: mol_type = unassigned DNA; mol_type = unassigned DNA
cttgacagcatatgcacggttactttggctgcaatgctgctgcagagcccggttactctgccttcgtgggaactccacaggcaagtccatcgtgtttggaaaaaaaaattagattttttggagaaaataattgagctgttaaagctattgatactgaatgttagcatgtcctttgagttcttctcaacagtttttggtcttattccactgagattagcttctcttaggggatttctgggcttttttttttttgcttgcttatgcatccccctctcttggttgtagtacggccgtaccatttcagcttgctagtgcagaaagatgtgaattcagttgctgtatgagcctggcctggtgcaaacacattgctagagacatgttaaagagttccaggtgaatcaagcctgagggagacaacagcaaaacgatatgtgtcacaaagatgtctacacggaactgccagggaatggactcagtgatcaaacccctggacacaattcctgaggataaaaaagtcagagttcagaggacacagagcacttttgacccatttgagaaaccagctaatcaagtaaagagggtgcattctgagaacaatgcttgcattaactttaagacctcctccactggcaaagagtcacctaaagttaggcggcactccagccccagctcgccaacaagtcccaaatttggaaaagctgactcatatgaaaagctggaaaaactaggggaaggatcttatgctacagtatacaaagggaaaagcaaggtaaatgggaagttggtagctctgaaggtgatcaggctgcaggaagaagaagggacacctttcacagctatcagggaagcttctcttttaaaaggactaaaacatgctaacatagtgctacttcatgacatcatccataccaaggagacgctgacacttgtgtttgaatatgtgcacactgatttatgtcagtacatggacaagcaccctggggggctgcatccagataatgtgaagttgtttttatttcagttgctgcgaggtctgtcttacatccaccagcgttatattttgcacagagacctgaaaccacagaaccttctgatcagtgacacgggggagttaaagctggcagatttcggtcttgcaagagcaaaatccgtccctagccacacatactccaacgaagtggttaccttgtggtacagacctccagatgtccttctaggctcaacagaatattccacctgccttgacatgtggggagtaggttgcatctttgttgaaatgatccaaggagttgctgcttttccaggaatgaaagacattcaggatcaacttgaacgaatatttctggttcttggaacaccaaatgaggacacatggcctggagttcattctttaccacattttaagccagaacgctttaccctgtacagctctaaaaaccttagacaagcatggaataagctcagctatgtgaaccatgcagaggacctggcctccaagctcctacaatgttccccaaagaacagactgtcggcacaggctgccttgagccacgagtattttagtgacctgccgccacggctatgggaactcaccgacatgtcttctatttttactgtcccaaatgtgagattgcaaccagaagctggagaaagcatgcgggcctttgggaaaaacaatagttatggcaaaagtctatcaaacagcaagcactgacaagcagcacattctcaagagcacacaggattaagttgtcatcattctgggaagaaaaaaaaaacattaatgaagaggccaataatatgaagggaatcatggatcagttttctttcgctccctgtggtggatttcacttacaagaaaattgaagctggcaagaccctgttttctctgcaatttatttaaaaccttgcacgcatttggataccttgtgatttccaagaactacgtgaagattaagctttgcttactgatacatggcatgtattcttttcagtcttttgtgtttgattttgtttgatttccctctgcagcacagcgtctctgtaaaggtttttatgctttcaccagccatgtcttaaatacattaagacaacacatttggtgttcacacttcttcagtaatgtctgaacttgaaagccacagagtggcataaaacaatgtgtgttttctttgagagcagtgcacattttgcaaccactaggaaggaaattttctgctaaagcaaacccctgttctctgacttgacaacttggccccggactgtggggccccacctgttgcttaccttttgaggtaattttgcaaatgtggtttttttacttggaaataactgcacatttatatataggatattggactctgcttagcattttcaagccacatagcatgactgttttttgaataggttggaattgaaaaaacaattatcaaacgttaagaacaaagacagggataaattgcttacatttcaacctctggagattgaggtaactttttgtgtctgggtcttgtcaacatctaatttttttccatccattctgttacactttgtattttctaactggagaaaagagtgaggaacagaatgttttaaatctggtgcaaaagaactatatctgctggatgagccttgaaagcagtcttggcctgttagggcttacaaagtaaattacaaagtgatccagttcaaagtttgcttagttacaacaaagcacctttaaaaaaaatacattttaaaaaaacattccaagccaattggaagacatcattgggttcttactttaagacatctcctggaataactgttcaaatgcaggttttagaaacaatgcaggaatcttgctttaaagatgaaaaagggaatgggccagcttcccttactcaaggagttgagggaccttggaggatgaaggcgagtatgtgacactggagaaaagtggaccaggcatgtcttttgctttgatctggagggagggctgcctgatgcaggccggctcccagtggggcaggcctcgctgcagaatgcccagtagtactgcggccaaggggacagttaggagacttcatctaaagcatgaaacctagctcctctacacacaaattcctatggaaatacctttgtgtacagtgtcttacattttcctattagtcagaaagaaggagagaatgagtgagtgcttgaaatgtgtcatactgttttaggatcaagactaggaattaggagccaggttgacaaggactttttctgagagttgggtgagggtaaagcttttctataatcaagctcaatacaccaaggaaactggatccagaattcctaaactttaaaatggtactgtctgcggagtggagtatggatggttatgtcaaagtcatagttcatcctatccagatgtagcattcatggtaaacttttaagtgctaagcaaggaattatttactgattggttttaaagagagcagaaaacacccaagtgtagaatgtctactgtttgctacctagaaatcttttccattcctctttcatacattccaacccactggaagtctttagaggtattttgatttaaagtatacttaaattaggatttcttaaagaaaacatagggagaaaactttacatgcaattaaaaatggactttcctgtgatttgtttttaatcattcatttggagaagaggcatgacctttgtatttcactaagtttaaagcaagagcaactgatgattaaatgttgctttttaataaggtttttaacttgaaaatttgaaaatatttaatgttgaaagacttcaattagggctattagagttatatctccctgtcgtaggcagcttcttcggagaagtgaaatataacattactcagtggacggagaaatctgttttgttacagagacatgcctctcagaaggtcaggaggttttgagtacctatccttgccacccatacaggaaatccaaagtttggtgtctctctctctctgtctctttctttctctttctccccccaaacccctctcactccctccctccctctctccttcccctatttgcaatcatattctccctctgcttcttttctcttctgccctccttgtgggcagtcatgaaaatcaattcagactgtgttgattagcagatttattattctattgagaaagcactggaatgttttgtgagattatttttatatgaaggaatagcctgaactcaaacagatggtaagaatagtacaaacaccttagcacatcactgcacacacagtattctgaaaggagatttgacacttaattcccattttcttaaaataacagttttgttgacttaaaaatatgagatacataggatgtgaaaaaaaatgtttgcagtactcagcaaaaaatagggtacataaagcagggtggctgtccatccactgattctggggtgagaagcgatttctacctcgcaagagtgactagaaagtttctaggagcacctccaggcttgcaaagaaagtgaggcctcttggtatcctttcctcagtgtgtatatgacagccagtataatcaataccctaggttatgcgtctatatgatactcatctgtgaatattattggttttgtaatctttgttatataagaggatgtttaggctgtatatactggggtagattattgcctgccccttatacataggaatatgctgcataattgcgcataacttccatctcccttactggcttgtaggcagaggaaactgtatatgttactgccttgtacttttctcatacaccaaaaacacaccaaaaaaatcaataaaataagcaatcttctattctcattccttttcccacagcagcatattttagaggcacatacaaaacctacattctctagttgggagtggatttttaaagttttccttttatcttttatttttttttgtatgatgcactgagatgtgtactttctaacaggggattggtacctaagaaatgtggtagcattattcagaaaactattatactttcaaatgacacatagtaaggagaatggaataatacatgttgcatatttgttaccagttgtaatttgtctgtattatgaaagatgtaatggtttgtcagctgtcactgttgttttcttgtaacatgatatggaataaagtatagcagaatct

SEQ ID NO: 3690 - DNA, 801 bp, Homo sapiens
  source 1..801: mol_type = unassigned DNA; mol_type = unassigned DNA
agttgctgtatgagcctggcctggtgcaaacacattgctagagacatgttaaagagttccaggtgaatcaagcctgagggagacaacagcaaaacgatatgtgtcacaaagatgtctacacggaactgccagggaatggactcagtgatcaaacccctggacacaattcctgaggataaaaaagtcagagttcagaggacacagagcacttttgacccatttgagaaaccagctaatcaagtaaagagggtgcattctgagaacaatgcttgcattaactttaagacctcctccactggcaaagagtcacctaaagttaggcggcactccagccccagctcgggtaaatgggaagttggtagctctgaaggtgatcaggctgcaggaagaagaagggacacctttcacagctatcagggaagcttctcttttaaaaggactaaaacatgctaacatagtgctacttcatgacatcatccataccaaggagacgctgacacttgtgtttgaatatgtgcacactgatttatgtcagtacatggacaagcaccctggggggctgcatccagataatgtgaagttgtttttatttcagttgctgcgaggtctgtcttacatccaccagcgttatattttgcacagagacctgaaaccacagaaccttctgatcagtgacacgggggagttaaagctggcagatttcggtcttgcaagagcaaaatccgtccctagccacacatactccaacgaagtggttaccttgtggtacagacctccagatgtccttctaggctcaacaga

SEQ ID NO: 3691 - DNA, 446 bp, Homo sapiens
  source 1..446: mol_type = unassigned DNA; mol_type = unassigned DNA
ggcatgtttagtgatattaaagttgcagtgaagagttctgaatttaatttcttcttttctcagatatgtgtcacaaagatgtctacacggaactgccagggaatggactcagtgatcaaacccctggacacaattcctgaggataaaaaagtcagagttcagaggacacagagcacttttgacccatttgagaaaccagctaatcaagtaaagagggtgcattctgagaacaatgcttgcattaactttaagacctcctccactggcaaagagtcacctaaagttaggcggcactccagccccagctcgccaacaagtcccaaatttggaaaagctgactcatatgaaaagctggaaaaactaggggaaggatcttatgctacagtatacaaagggaaaagcaaggtaaatgggaagttggtagctctgaaggtgatcaggctgca

SEQ ID NO: 3692 - DNA, 545 bp, Homo sapiens
  source 1..545: mol_type = unassigned DNA; mol_type = unassigned DNA
attatgtgctgtgcagccttggacaagttacttaacaaaattgagcatctgtttccttaaaatatccttaaacagggtagagagataatatactttgccatttttgatctatggggctattgtaatgatctggtggatttatgaaattgtcaagtgcaacaaacttctcttttaaaaggactaaaacatgctaacatagtgctacttcatgacatcatccataccaaggagacgctgacacttgtgtttgaatatgtgcacactgatttatgtcagtacatggacaagcaccctggggggctgcatccagataatgtgaagttgtttttatttcagttgctgcgaggtctgtcttacatccaccagcgttatattttgcacagagacctgaaaccacagaaccttctgatcagtgacacgggggagttaaagctggcagatttcggtcttgcaagagcaaaatccgtccctagccacacatactccaacgaagtggttaccttgtggtacagacctccagatgtccttctaggctcaacagaata

SEQ ID NO: 3693 - DNA, 436 bp, Homo sapiens
  source 1..436: mol_type = unassigned DNA; mol_type = unassigned DNA
gaatattccacctgccttgacatgtgtgccatcactccataatccaaccagcttcaacttttctagccctttcaggcgttaagcatccttcctaaccctacactctgaggtaagcatgtcctctcatgctcaaggaactgtgtaaaatggaatacgttataattactgtgtttataccatatagatctactaaacagaaagttgatagaagttttcccaaaattaacaacagtcctaaaagtttaccgaccttacgaacaatgagaagtgaagcagagaaaaaaattctaaactattagacatacccccaaaccaatgttcatcgtcatgctagaggaaagtctaaattatctctacattctcgttacagaaaatgttactgtagaattgtcataagaagacttaattgaagattatacagccaaattatagaaat

SEQ ID NO: 3694 - DNA, 4787 bp, Homo sapiens
  source 1..4787: mol_type = unassigned DNA; mol_type = unassigned DNA
tacggccgtaccatttcagcttgctagtgcagaaagatgtgaattcagttgctgtatgagcctggcctggtgcaaacacattgctagagacatgttaaagagttccaggtgaatcaagcctgagggagacaacagcaaaacgatatgtgtcacaaagatgtctacacggaactgccagggaatggactcagtgatcaaacccctggacacaattcctgaggataaaaaagtcagagttcagaggacacagagcacttttgacccatttgagaaaccagctaatcaagtaaagagggtgcattctgagaacaatgcttgcattaactttaagacctcctccactggcaaagagtcacctaaagttaggcggcactccagccccagctcgggtaaatgggaagttggtagctctgaaggtgatcaggctgcaggaagaagaagggacacctttcacagctatcagggaagcttctcttttaaaaggactaaaacatgctaacatagtgctacttcatgacatcatccataccaaggagacgctgacacttgtgtttgaatatgtgcacactgatttatgtcagtacatggacaagcaccctggggggctgcatccagataatgtgaagttgtttttatttcagttgctgcgaggtctgtcttacatccaccagcgttatattttgcacagagacctgaaaccacagaaccttctgatcagtgacacgggggagttaaagctggcagatttcggtcttgcaagagcaaaatccgtccctagccacacatactccaacgaagtggttaccttgtggtacagacctccagatgtccttctaggctcaacagaatattccacctgccttgacatgtggggagtaggttgcatctttgttgaaatgatccaaggagttgctgcttttccaggaatgaaagacattcaggatcaacttgaacgaatatttctggttcttggaacaccaaatgaggacacatggcctggagttcattctttaccacattttaagccagaacgctttaccctgtacagctctaaaaaccttagacaagcatggaataagctcagctatgtgaaccatgcagaggacctggcctccaagctcctacaatgttccccaaagaacagactgtcggcacaggctgccttgagccacgagtattttagtgacctgccgccacggctatgggaactcaccgacatgtcttctatttttactgtcccaaatgtgagattgcaaccagaagctggagaaagcatgcgggcctttgggaaaaacaatagttatggcaaaagtctatcaaacagcaagcactgacaagcagcacattctcaagagcacacaggattaagttgtcatcattctgggaagaaaaaaaaaacattaatgaagaggccaataatatgaagggaatcatggatcagttttctttcgctccctgtggtggatttcacttacaagaaaattgaagctggcaagaccctgttttctctgcaatttatttaaaaccttgcacgcatttggataccttgtgatttccaagaactacgtgaagattaagctttgcttactgatacatggcatgtattcttttcagtcttttgtgtttgattttgtttgatttccctctgcagcacagcgtctctgtaaaggtttttatgctttcaccagccatgtcttaaatacattaagacaacacatttggtgttcacacttcttcagtaatgtctgaacttgaaagccacagagtggcataaaacaatgtgtgttttctttgagagcagtgcacattttgcaaccactaggaaggaaattttctgctaaagcaaacccctgttctctgacttgacaacttggccccggactgtggggccccacctgttgcttaccttttgaggtaattttgcaaatgtggtttttttacttggaaataactgcacatttatatataggatattggactctgcttagcattttcaagccacatagcatgactgttttttgaataggttggaattgaaaaaacaattatcaaacgttaagaacaaagacagggataaattgcttacatttcaacctctggagattgaggtaactttttgtgtctgggtcttgtcaacatctaatttttttccatccattctgttacactttgtattttctaactggagaaaagagtgaggaacagaatgttttaaatctggtgcaaaagaactatatctgctggatgagccttgaaagcagtcttggcctgttagggcttacaaagtaaattacaaagtgatccagttcaaagtttgcttagttacaacaaagcacctttaaaaaaaatacattttaaaaaaacattccaagccaattggaagacatcattgggttcttactttaagacatctcctggaataactgttcaaatgcaggttttagaaacaatgcaggaatcttgctttaaagatgaaaaagggaatgggccagcttcccttactcaaggagttgagggaccttggaggatgaaggcgagtatgtgacactggagaaaagtggaccaggcatgtcttttgctttgatctggagggagggctgcctgatgcaggccggctcccagtggggcaggcctcgctgcagaatgcccagtagtactgcggccaaggggacagttaggagacttcatctaaagcatgaaacctagctcctctacacacaaattcctatggaaatacctttgtgtacagtgtcttacattttcctattagtcagaaagaaggagagaatgagtgagtgcttgaaatgtgtcatactgttttaggatcaagactaggaattaggagccaggttgacaaggactttttctgagagttgggtgagggtaaagcttttctataatcaagctcaatacaccaaggaaactggatccagaattcctaaactttaaaatggtactgtctgcggagtggagtatggatggttatgtcaaagtcatagttcatcctatccagatgtagcattcatggtaaacttttaagtgctaagcaaggaattatttactgattggttttaaagagagcagaaaacacccaagtgtagaatgtctactgtttgctacctagaaatcttttccattcctctttcatacattccaacccactggaagtctttagaggtattttgatttaaagtatacttaaattaggatttcttaaagaaaacatagggagaaaactttacatgcaattaaaaatggactttcctgtgatttgtttttaatcattcatttggagaagaggcatgacctttgtatttcactaagtttaaagcaagagcaactgatgattaaatgttgctttttaataaggtttttaacttgaaaatttgaaaatatttaatgttgaaagacttcaattagggctattagagttatatctccctgtcgtaggcagcttcttcggagaagtgaaatataacattactcagtggacggagaaatctgttttgttacagagacatgcctctcagaaggtcaggaggttttgagtacctatccttgccacccatacaggaaatccaaagtttggtgtctctctctctctgtctctttctttctctttctccccccaaacccctctcactccctccctccctctctccttcccctatttgcaatcatattctccctctgcttcttttctcttctgccctccttgtgggcagtcatgaaaatcaattcagactgtgttgattagcagatttattattctattgagaaagcactggaatgttttgtgagattatttttatatgaaggaatagcctgaactcaaacagatggtaagaatagtacaaacaccttagcacatcactgcacacacagtattctgaaaggagatttgacacttaattcccattttcttaaaataacagttttgttgacttaaaaatatgagatacataggatgtgaaaaaaaatgtttgcagtactcagcaaaaaatagggtacataaagcagggtggctgtccatccactgattctggggtgagaagcgatttctacctcgcaagagtgactagaaagtttctaggagcacctccaggcttgcaaagaaagtgaggcctcttggtatcctttcctcagtgtgtatatgacagccagtataatcaataccctaggttatgcgtctatatgatactcatctgtgaatattattggttttgtaatctttgttatataagaggatgtttaggctgtatatactggggtagattattgcctgccccttatacataggaatatgctgcataattgcgcataacttccatctcccttactggcttgtaggcagaggaaactgtatatgttactgccttgtacttttctcatacaccaaaaacacaccaaaaaaatcaataaaataagcaatcttctattctcattccttttcccacagcagcatattttagaggcacatacaaaacctacattctctagttgggagtggatttttaaagttttccttttatcttttatttttttttgtatgatgcactgagatgtgtactttctaacaggggattggtacctaagaaatgtggtagcattattcagaaaactattatactttcaaatgacacatagtaaggagaatggaataatacatgttgcatatttgttaccagttgtaatttgtctgtattatgaaagatgtaatggtttgtcagctgtcactgttgttttcttgtaacatgatatggaataaagtatagcagaatctccgt

SEQ ID NO: 3695 - DNA, 1437 bp, Homo sapiens
  source 1..1437: mol_type = unassigned DNA; mol_type = unassigned DNA
agataaggcccagactgaacactgggtccactcaaattaggaagttgagcaggggaggaggaatcagcaaagatggttgcagaggagtccccagagaggcaggaggaaaaccaaggaagtgcccacttcacagaatcaaggaggctttcaaaaagggtggcatgattatggtgttaaatgccaccaaagagtaaagcaaggatcttgctctgtcacccagtctgaagtgctgtggcacaaccatggctctatgcagccttgacctcctgaactcaagcaattgtcctacctcagccttcccagttgctaggaccacagctgcctcgttttcagttgtgcacatctgaatgcaagcaatccctgtctgatgtggagtttcttgcactgataaggaaaaactgctgaagttgtgaggctgctccaggcagagccatcatctaacagacctaaaagaagcatcatgttccatgacttcatttcaccccaggggacttcaagctgcccgtgcccagaagttcaagagtaaaaggccacggagtaacagtgattgttttcaggaagaggatctgaggcagggttttcagtggagcagaggaagagcctcccttttggggcagcctcatcttacttgaacttggagaagctgggtgaaggctcttatgcgacagtttacaaggggattagcagaataaatggacaactagtggctttaaaagtcatcagcatgaatgcagaggaaggagtcccatttacagctatccgagaagcttctctcctgaagggtttgaaacatgccaatattgtgctcctgcatgacataatccacaccaaagagacactgacattcgtttttgaatacatgcacacagacctggcccagtatatgtctcagcatccaggagggcttcatcctcataatgtcagacttttcatgtttcaacttttgcggggcctggcgtacatccaccaccaacacgttcttcacagggacctgaaacctcagaacttactcatcagtcacctgggagagctcaaactggctgattttggtcttgcccgggccaagtccattcccagccagacatactcttcagaagtcgtgaccctctggtaccggccccctgatgctttgctgggagccactgaatattcctctgagctggacatatggggtgcaggctgcatctttattgaaatgttccagggtcaacctttgtttcctggggtttccaacatccttgaacagctggagaaaatctgggaggtgctgggagtccctacagaggatacttggccgggagtctccaagctacctaactacaatccagaatggttcccactgcctacgcctcgaagccttcatgttgtctggaacaggaggaagagacttcacttgcccgctttgccctggtgaccacctctaccggcgaaggagaa

SEQ ID NO: 3696 - DNA, 1780 bp, Homo sapiens
  source 1..1780: mol_type = unassigned DNA; mol_type = unassigned DNA
agataaggcccagactgaacactgggtccactcaaattaggaagttgagcaggggaggaggaatcagcaaagatggttgcagaggagtccccagagaggcaggaggaaaaccaaggaagtgcccacttcacagaatcaaggaggctttcaaaaagggtggcatgattatggtgttaaatgccaccaaagagtaaagcaagctgcctcgttttcagttgtgcacatctgaatgcaagcaatccctgtctgatgtggagtttcttgcactgataaggaaaaactgctgaagttgtgaggctgctccaggcagagccatcatctaacagacctaaaagaagcatcatgttccatgacttcatttcaccccaggggacttcaagctgcccgtgcccagaagttcaagagtaaaaggccacggagtaacagtgattgttttcaggaagaggatctgaggcagggttttcagtggaggaagagcctcccttttggggcagcctcatcttacttgaacttggagaagctgggtgaaggctcttatgcgacagtttacaaggggattagcagaataaatggacaactagtggctttaaaagtcatcagcatgaatgcagaggaaggagtcccatttacagctatccgagaagcttctctcctgaagggtttgaaacatgccaatattgtgctcctgcatgacataatccacaccaaagagacactgacattcgtttttgaatacatgcacacagacctggcccagtatatgtctcagcatccaggagggcttcatcctcataatgtcagacttttcatgtttcaacttttgcggggcctggcgtacatccaccaccaacacgttcttcacagggacctgaaacctcagaacttactcatcagtcacctgggagagctcaaactggctgattttggtcttgcccgggccaagtccattcccagccagacatactcttcagaagtcgtgaccctctggtaccggccccctgatgctttgctgggagccactgaatattcctctgagctggacatatggggtgcaggctgcatctttattgaaatgttccagggtcaacctttgtttcctggggtttccaacatccttgaacagctggagaaaatctgggaggtgctgggagtccctacagaggatacttggccgggagtctccaagctacctaactacaatccagaatggttcccactgcctacgcctcgaagccttcatgttgtctggaacaggctgggcagggttcctgaagctgaagacctggcctcccagatgctaaaaggctttcccagagaccgcgtctccgcccaggaagcacttgttcatgattatttcagcgccctgccatctcagctgtaccagcttcctgatgaggagtctttgtttacagtttcaggagtgaggctaaagccagaaatgtgtgaccttttggcctcctaccagaaaggtcaccacccagcccagtttagcaaatgctggtgaaaagaaagggcgagatcaccaaggttcttccagggctgtatttctgcagtttcggttttcatttgcttcagcttactaagaagcttcaaatctaactccatactgaacaaggggctttatgtcctcacctatgacctggaatagtttaaatatggtgttcaaggcaatagtacataatagtggaagaaaattcagtggaaggttattgctattgtcatttgcatagaatttaagtgattgatttaaaaaaactggacataaactaagtctaagaag

SEQ ID NO: 3697 - DNA, 544 bp, Homo sapiens
  source 1..544: mol_type = unassigned DNA; mol_type = unassigned DNA
agactgaacactgggtccactcaaattaggaagttgagcaggggaggaggaatcagcaaagatggttgcagaggagtccccagagaggcaggaggaaaaccaaggaagtgcccacttcacagaatcaaggaggctttcaaaaagggtggcatgattatggtgttaaatgccaccaaagagtaaagcaagctgcctcgttttcagttgtgcacatctgaatgcaagcaatccctgtctgatgtggagtttcttgcactgataaggaaaaactgctgaagttgtgaggctgctccaggcagagccatcatctaacagacctaaaagaagcatcatgttccatgacttcatttcaccccaggggacttcaagctgcccgtgcccagaagttcaagagtaaaaggccacggagtaacagtgattgttttcaggaagaggatctgaggcagggttttcagtggagcagaggaagagcctcccttttggggcagcctcatcttacttgaacttggagaagctgggtgaaggctcttatgcgacagtttac

SEQ ID NO: 3698 - DNA, 1635 bp, Homo sapiens
  source 1..1635: mol_type = unassigned DNA; mol_type = unassigned DNA
tgtggccagaacaagaaccttaactgtgccaaattttattctattcaataacagctgcctcgttttcagttgtgcacatctgaatgcaagcaatccctgtctgatgtggagtttcttgcactgataaggaaaaactgctgaagttgtgaggctgctccaggcagagccatcatctaacagacctaaaagaagcatcatgttccatgacttcatttcaccccaggggacttcaagctgcccgtgcccagaagttcaagagtaaaaggccacggagtaacagtgattgttttcaggaagaggatctgaggcagggttttcagtggaggaagagcctcccttttggggcagcctcatcttacttgaacttggagaagctgggtgaaggctcttatgcgacagtttacaaggggattagcagaataaatggacaactagtggctttaaaagtcatcagcatgaatgcagaggaaggagtcccatttacagctatccgagaagcttctctcctgaagggtttgaaacatgccaatattgtgctcctgcatgacataatccacaccaaagagacactgacattcgtttttgaatacatgcacacagacctggcccagtatatgtctcagcatccaggagggcttcatcctcataatgtcagacttttcatgtttcaacttttgcggggcctggcgtacatccaccaccaacacgttcttcacagggacctgaaacctcagaacttactcatcagtcacctgggagagctcaaactggctgattttggtcttgcccgggccaagtccattcccagccagacatactcttcagaagtcgtgaccctctggtaccggccccctgatgctttgctgggagccactgaatattcctctgagctggacatatggggtgcaggctgcatctttattgaaatgttccagggtcaacctttgtttcctggggtttccaacatccttgaacagctggagaaaatctgggaggtgctgggagtccctacagaggatacttggccgggagtctccaagctacctaactacaatccagaatggttcccactgcctacgcctcgaagccttcatgttgtctggaacaggctgggcagggttcctgaagctgaagacctggcctcccagatgctaaaaggctttcccagagaccgcgtctccgcccaggaagcacttgttcatgattatttcagcgccctgccatctcagctgtaccagcttcctgatgaggagtctttgtttacagtttcaggagtgaggctaaagccagaaatgtgtgaccttttggcctcctaccagaaaggtcaccacccagcccagtttagcaaatgctggtgaaaagaaagggcgagatcaccaaggttcttccagggctgtatttctgcagtttcggttttcatttgcttcagcttactaagaagcttcaaatctaactccatactgaacaaggggctttatgtcctcacctatgacctggaatagtttaaatatggtgttcaaggcaatagtacataatagtggaagaaaattcagtggaaggttattgctattgtcatttgcatagaatttaagtgattgatttaaaaaaactggacataaactaagtctaagaaga

SEQ ID NO: 3699 - DNA, 1828 bp, Homo sapiens
  source 1..1828: mol_type = unassigned DNA; mol_type = unassigned DNA
ctctggcaaaaagggagagaacaaggataggagaggcagtgggggaaaggttcaagtgcgggttttctccttgaacctacaagattatgggtcaagagctgtgtgcaaagactgtacagcctggatgcagctgctaccattgttcagagggaggcgaggcacacagctgtcggaggagtcagcctgagaccacggaggctgcgttcaagctaacagacctaaaagaagcatcatgttccatgacttcatttcaccccaggggacttcaagctgcccgtgcccagaagttcaagagtaaaaggccacggagtaacagtgattgttttcaggaagaggatctgaggcagggttttcagtggaggaagagcctcccttttggggcagcctcatcttacttgaacttggagaagctgggtgaaggctcttatgcgacagtttacaaggggattagcagaataaatggacaactagtggctttaaaagtcatcagcatgaatgcagaggaaggagtcccatttacagctatccgagaagcttctctcctgaagggtttgaaacatgccaatattgtgctcctgcatgacataatccacaccaaagagacactgacattcgtttttgaatacatgcttttcatgtttcaacttttgcggggcctggcgtacatccaccaccaacacgttcttcacagggacctgaaacctcagaacttactcatcagtcacctgggagagctcaaactggctgattttggtcttgcccgggccaagtccattcccagccagacatactcttcagaagtcgtgaccctctggtaccggccccctgatgctttgctgggagccactgaatattcctctgagctggacatatggggtgcaggctgcatctttattgaaatgttccagggtcaacctttgtttcctggggtttccaacatccttgaacagctggagaaaatctgggaggtgctgggagtccctacagaggatacttggccgggagtctccaagctacctaactacaatccaggtggaagcaagaaacagcatggatggcatactgacatcggacagcatcgtactgcagcaatgcagccttgttctaggaatgtctcattttgaccttaaatccagtgtgagagcttcactgcgtctgaaaccactatgagacagaagatgattaaaatgatccttgtccccactgggatgataaagagctattctgctttgggctcaatgagttctgagcaagtctctgtgtttgctgtgagcacaagctaaggtctgcatctgggtcggcatcagcttggttgtatgagctattagccaagggagttattcagtgggttgaactaaggggaaagatattgataaaagaggctttaactgcaggcatcaattcatatggaactgtaagtccaagctcccccttttactatctggggtaacttgaggaagttacttatttcctagttctgtaatctgcaaaatgggagaaatcctatcattgtaaaagtgtttcctatgtgccagacacagaacatacacaattgctaatcctattactgcctgccaagatcgatgctgggtggagtagcccgattctacagatgaggaaacagaggctttctcctaggctcacagagaggtgtatacttattggaaatggctgaaatctgcatccaaaccttgttctcctttcattaatcatgttgtatccctctgtctcattttgcaggatgagtctgaaaaataaattatattgaattgcatctgctatagtgcctaacttttagtaggtactcaataaaagttcccattcagtt

SEQ ID NO: 3700 - DNA, 3659 bp, Homo sapiens
  source 1..3659: mol_type = unassigned DNA; mol_type = unassigned DNA
ctctggcaaaaagggagagaacaaggataggagaggcagtgggggaaaggttcaagtgcgggttttctccttgaacctacaagattatgggtcaagagctgtgtgcaaagactgtacagcctggatgcagctgctaccattgttcagagggaggcgaggcacacagctgtcggaggagtcagcctgagaccacggaggctgcgttcaagctaacagacctaaaagaagcatcatgttccatgacttcatttcaccccaggggacttcaagctgcccgtgcccagaagttcaagagtaaaaggccacggagtaacagtgattgttttcaggaagaggatctgaggcagggttttcagtggaggaagagcctcccttttggggcagcctcatcttacttgaacttggagaagctgggtgaaggctcttatgcgacagtttacaaggggattagcagaataaatggacaactagtggctttaaaagtcatcagcatgaatgcagaggaaggagtcccatttacagctatccgagaagcttctctcctgaagggtttgaaacatgccaatattgtgctcctgcatgacataatccacaccaaagagacactgacattcgtttttgaatacatgcacacagacctggcccagtatatgtctcagcatccaggagggcttcatcctcataatgtcagacttttcatgtttcaacttttgcggggcctggcgtacatccaccaccaacacgttcttcacagggacctgaaacctcagaacttactcatcagtcacctgggagagctcaaactggctgattttggtcttgcccgggccaagtccattcccagccagacatactcttcagaagtcgtgaccctctggtaccggccccctgatgctttgctgggagccactgaatattcctctgagctggacatatggggtgcaggctgcatctttattgaaatgttccagggtcaacctttgtttcctggggtttccaacatccttgaacagctggagaaaatctgggaggtgctgggagtccctacagaggatacttggccgggagtctccaagctacctaactacaatccagaatggttcccactgcctacgcctcgaagccttcatgttgtctggaacaggctgggcagggttcctgaagctgaagacctggcctcccagatgctaaaaggctttcccagagaccgcgtctccgcccaggaagcacttgttcatgattatttcagcgccctgccatctcagctgtaccagcttcctgatgtttcaggagtgaggctaaagccagaaatgtgtgaccttttggcctcctaccagaaaggtcaccacccagcccagtttagcaaatgctggtgaaaagaaagggcgagatcaccaaggttcttccagggctgtatttctgcagtttcggttttcatttgcttcagcttactaagaagcttcaaatctaactccatactgaacaaggggctttatgtcctcacctatgacctggaatagtttaaatatggtgttcaaggcaatagtacataatagtggaagaaaattcagtggaaggttattgctattgtcatttgcatagaatttaagtgattgatttaaaaaaactggacataaactaagtctaagaagagggcttctgaataacttcattcattttggcatttgttaagagattcctgggctagaaggttgatttcccaaaaagacagataagagactgacaatttaaaagaatctggagacagagctggtgcttacagagacctgccactcctgtgttcacttacaatttctcccaacaaaaggatttctgtggcaaggagaaaactagcctaaagtttagaaaaagatggtttcttggataacattgttaacaaaaggacttcctgaggactatttattattattttgtagggggcacttcctccttcactaaactggattatcagaacgtattaccacccaacccatattttagaagtttggatttggctgctgattagaaatgaatttcaggctatctcctcctactgaatcttaattgtctgtgatgatggcaacagtgatggggaatctaagcgctggtttgatggtggagatattgaataagtagttgggagcagagttccaaagatgtaatttaagccctgttgcaccaccacacacacacacacacacacacacacacacacacacacacccctcaagtaaaatgagagatctgtcttagctaacacgtgtgccgttttatacaatgactccttctaaaagcagccagggaaactcaaatcgcttctgtccagggatcatctcaggaaatgtagcagcctagaaaccagagacctctgtatatcctttggaagagcaaggaggaactaattaagagataattaaaaaatagtaactatcccccaatgtctgagatggaaaaaggaaaaagacacatgggtagcccaaatcaacctgcctgagtaagtatctgattttagtaaggcatttgacaaagactgtccagctatacctgaaagatgaaacagtgtaggctgggtgatggagcagatatatgtactcaaatcatggtgtttatttaacccagagaaaggccagccgtggtgtgctacaaggttcagtcttgagtcctattctggtcaaatatttttattaattactcgaataaatcagagtacatggacaactttatacaactccttgaagtaagtactattattattaatttatgacttccatttcacaaaagaggagactgaggctcagtgaagttaggtaactccttcatagtagcatgccagagtgaagatgcaaacctcagacctggttctccaatgttcctgacacctatcgaatttagagaatacacaactcttgcagaggcagctgctatttagtattggatcatgattcaaaagacaccttgctagaagccaatgaacagcaggccaaaacaacacttacttgcatcaaatttcatctgacttaaattcttacactttgggctacaacttaaaaaaggctatgacttagtggaaattggcacttttaagtacaatatgaattaatagtataatttcgctgtcccccagagataatgctagtaccaatcgaaagctcagggatgctactgttgacgcatcagcaagagttcttgagcagttttacctgtccatcaatacaaagagttcccacaacagtagtgggattcctctgcctctctgaagatatgagagctataggagggattcccatgttggaggttagaagagctgacctccaatgtcccgtctaattccaagattctccaataatgactttggaacagctgtgtacagattatacttggaattatgcttagatactattgctgcaggaatgaatagacaaattttgttattaaaaaattgattttattaagtggaagttgacagaattatcctctttataatggaggaacattatgcttatgcatatgcatataccttatgcatatgattatgcttgtgcttccttctttaatggatttacctattcaaaagcttaataaatgttataagactctaaaacatttaaatctttcatttctcaattttatcaaataaacattcctggaatttgtgcata

SEQ ID NO: 3701 - DNA, 2240 bp, Homo sapiens
  source 1..2240: mol_type = unassigned DNA; mol_type = unassigned DNA
gggaaaggttcaagtgcgggttttctccttgaacctacaagattatgggtcaagagctgtgtgcaaagactgtacagcctggatgcagctgctaccattgttcagagggaggcgaggcacacagctgtcggaggagtcagcctgagaccacggaggctgcgttcaagctaacagacctaaaagaagcatcatgttccatgacttcatttcaccccaggggacttcaagctgcccgtgcccagaagttcaagagtaaaaggccacggagtaacagtgattgttttcaggaagaggatctgaggcagggttttcagtggaggaagagcctcccttttggggcagcctcatcttacttgaacttggagaagctgggtgaaggctcttatgcgacagtttacaaggggattagcagaataaatggacaactagtggctttaaaagtcatcagcatgaatgcagaggaaggagtcccatttacagctatccgagaagcttctctcctgaagggtttgaaacatgccaatattgtgctcctgcatgacataatccacaccaaagagacactgacattcgtttttgaatacatgcacacagacctggcccagtatatgtctcagcatccaggagggcttcatcctcataatgtcagacttttcatgtttcaacttttgcggggcctggcgtacatccaccaccaacacgttcttcacagggacctgaaacctcagaacttactcatcagtcacctgggagagctcaaactggctgattttggtcttgcccgggccaagtccattcccagccagacatactcttcagaagtcgtgaccctctggtaccggccccctgatgctttgctgggagccactgaatattcctctgagctggacatatggggtgcaggctgcatctttattgaaatgttccagggtcaacctttgtttcctggggtttccaacatccttgaacagctggagaaaatctgggaggtgctgggagtccctacagaggatacttggccgggagtctccaagctacctaactacaatccagaatggttcccactgcctacgcctcgaagccttcatgttgtctggaacaggctgggcagggttcctgaagctgaagacctggcctcccagatgctaaaaggctttcccagagaccgcgtctccgcccaggaagcacttgttcatgattatttcagcgccctgccatctcagctgtaccagcttcctgatgagtgaagcagctgcgataattatgctgtcagcctcgggaagctaatgaggagtcaccagagtggaaggttttgcatttgtgagattgctgaaggagagccgcgctgcagcttttttcgttttttatttccctttctttctttcttcctcctttttctttttctatgagttgggaaggagagtctggcagtccacagccaaattggaatccttttgattaaccggttgccttcccagcatgttctgccagatagtgtctctctctctctccctccctccctgcttttgaggagctgctgcttttgaggggcaaggaagccggagggaaatcccagcttttcatgccactgtccccaaggcaagaggatacttctccccgagagaagttccccaaatggtttggatttgagttgatttgagaataattggtaaagtatacgcactgtttattttagccatttaactgtctatgctatgacaagatctaatagaaagtagaatacaaaattgcatattataatatccgtgtgaaaatgtcttatgcatatcaacaaatggtatgatggctcccctttccagcctatttggaatatgcgattccaaatacaagacaacgagaccccagattacccacagcatttaagggcagaagtttaggccaggcgaggcagagctggcaagtttatttcttccctttgggtgtgagcagcttccagcaaacagtattatttaaggcattttatgcttttggtgcagtaataacagaaggctctctttttgttaaattgtgagatattttgagcaccccagatttatgcaaattgtgaacctgggaaaagcaatgcccaagtggaaaggggccctgagtaaattttgcggatgtgctttggtgacaatgtggctgctgcctcttgctatttttctcagatatctgtgctaatacttgtaacaatggctaccatttattaaaaacatattgtgtatcataaactaacacaa

SEQ ID NO: 3702 - DNA, 570 bp, Homo sapiens
  source 1..570: mol_type = unassigned DNA; mol_type = unassigned DNA
atacatctgacgcttccctgttcttccctgatttgtcctgcatgtctccatacctcttccatccacctcatctccccacctcacctttctttttctttgtttggctttatataggtgctgggagtccctacagaggatacttggccgggagtctccaagctacctaactacaatccagaatggttcccactgcctacgcctcgaagccttcatgttgtctggaacaggctgggcagggttcctgaagctgaagacctggcctcccagatgctaaaaggctttcccagagaccgcgtctccgcccaggaagcacttgttcatgattatttcagcgccctgccatctcagctgtaccagcttcctgatgaggagtctttgtttacagtttcaggagtgaggctaaagccagaaatgtgtgaccttttggcctcctaccagaaaggtcaccacccagcccagtttagcaaatgctggtgaaaagaaagggcgagatcaccaaggttcttccagggctgtatttctgcagtttcggttttcatttgcttcagcttactaagaagcttcaaatct

SEQ ID NO: 3703 - DNA, 514 bp, Homo sapiens
  source 1..514: mol_type = unassigned DNA; mol_type = unassigned DNA
atttgtcctgcatgtctccatacctcttccatccacctcatctccccacctcacctttctttttctttgtttggctttatataggtgctgggagtccctacagaggatacttggccgggagtctccaagctacctaactacaatccaggctgggcagggttcctgaagctgaagacctggcctcccagatgctaaaaggctttcccagagaccgcgtctccgcccaggaagcacttgttcatgattatttcagcgccctgccatctcagctgtaccagcttcctgatgaggagtctttgtttacagtttcaggagtgaggctaaagccagaaatgtgtgaccttttggcctcctaccagaaaggtcaccacccagcccagtttagcaaatgctggtgaaaagaaagggcgagatcaccaaggttcttccagggctgtatttctgcagtttcggttttcatttgcttcagcttactaagaagcttcaaatctaactccatactgaacaaggggct

SEQ ID NO: 3704 - DNA, 562 bp, Homo sapiens
  source 1..562: mol_type = unassigned DNA; mol_type = unassigned DNA
aaggatccgcctctttccttctttctcagcctgggttccaccccgggaggcccgctgtatgagatggagggcgggctaaaggcgggacgagactcgattgagcgcaattatgaccaatcaccttgcggaatattcggcctatagcgaaggaggagctcagaacaaaaaggagaccccacccccgccgacgtcccgtttgccaccatggggatgtaccaagtgagaccgagtagggggaacgagtggtgattgacgcgccaggttactggccactgctcacctaggcgctagcaaacttctgccaagatcggaactgagtactaaacagcctccacagttctccctggtgccgtctccggcttggcgccgcatcctcctctgggctcgcgatggccgcgtcccctcccgctgcggacgggtcctttggtacatgcagtccgagtcactattccaggtcctcaggatatagccgtgacctaaacacagaaatctaccctggcggagctgatcttctagttgtggcggtgaggagatagacagtaaagactaaagaaaccaataa

SEQ ID NO: 3705 - DNA, 520 bp, Homo sapiens
  source 1..520: mol_type = unassigned DNA; mol_type = unassigned DNA
aggagaccccacccccgccgacggtgaaaacctatgaaacctgggcggaggcgtgcggagtcgggtagagagcgaaatcacgcctcttcagtcagccacgccctttattcttgctcggcctcgccacagagagcaaatcagattggctgggcgacaacctcaaagggcggggctgcacacgttcactacgggaatgagtcccgtttgccaccatggggatgtaccaagtgagaccgagtagggggaacgagtggtgattgacgcgccaggttactggccactgctcacctaggcgctagcaaacttctgccaagatcggaactgagtactaaacagcctccacagttctccctggtgccgtctccggcttggcgccgcatcctcctctgggctcgcgatggccgcgtcccctcccgctgcggacgggtcctttggtacatgcagtccgagtcactattccaggtcctcaggatatagccgtgacctaaacacagaaatctaccctggcggagctgatctt

SEQ ID NO: 3706 - DNA, 3158 bp, Homo sapiens
  source 1..3158: mol_type = unassigned DNA; mol_type = unassigned DNA
ggagggggcagttgggcggggataggccgtcctagctaaggtggtaaaggccaataactcttcaggctgcctctcctcgaaaagtcatcttctcgcgaacctttaaaatgccttcctccccaagcacctcaagggactagaactgagtgcttcatttgtcttttttcctccttgcaaaagtcccgtttgccaccatggggatgtaccaagtgagaccgagtagggggaacgagtggtgattgacgcgccaggttactggccactgctcacctaggcgctagcaaacttctgccaagatcggaactgagtactaaacagcctccacagttctccctggtgccgtctccggcttggcgccgcatcctcctctgggctcgcgatggccgcgtcccctcccgctgcggacgggtcctttggtacatgcagtccgagatcgccatggatcggatgaagaagatcaaacggcagctgtcaatgacactccgaggtggccgaggcatagacaagaccaatggtgcccctgagcagataggcctggatgagagtggtggtggtggcggcagtgaccctggagaggcccccacacgtgctgctcctggggaacttcgttctgcacggggcccactcagctctgcaccagagattgtgcacgaggacttgaagatggggtctgatggggagagtgaccaggcttcagccacgtcctcggatgaggtgcagtctccagtgagagtgcgtatgcgcaaccatcccccacgcaagatctccactgaggacatcaacaagcgcctatcactaccagctgacatccggctgcctgagggctacctggagaagctgaccctcaatagccccatctttgacaagcccctcagccgccgcctccgtcgtgtcagcctatctgagattggctttgggaaactggagacctacattaagctggacaaactgggcgagggtacctatgccaccgtctacaaaggcaaaagcaagctcacagacaaccttgtggcactcaaggagatcagactggaacatgaagagggggcaccctgcaccgccatccgggaagtgtccctgctcaaggacctcaaacacgccaacatcgttacgctacatgacattatccacacggagaagtccctcacccttgtctttgagtacctggacaaggacctgaagcagtacctggatgactgtgggaacatcatcaacatgcacaacgtgaaactgttcctgttccagctgctccgtggcctggcctactgccaccggcagaaggtgctacaccgagacctcaagccccagaacctgctcatcaacgagaggggagagctcaagctggctgactttggcctggcccgagccaagtcaatcccaacaaagacatactccaatgaggtggtgacactgtggtaccggccccctgacatcctgcttgggtccacggactactccactcagattgacatgtggggtgtgggctgcatcttctatgagatggccacaggccgtcccctctttccgggctccacggtggaggaacagctacacttcatcttccgtatcttaggaaccccaactgaggagacgtggccaggcatcctgtccaacgaggagttcaagacatacaactaccccaagtaccgagccgaggcccttttgagccacgcaccccgacttgatagcgacggggccgacctcctcaccaagctgttgcagtttgagggtcgaaatcggatctccgcagaggatgccatgaaacatccattcttcctcagtctgggggagcggatccacaaacttcctgacactacttccatatttgcactaaaggagattcagctacaaaaggaggccagccttcggtcttcgtcgatgcctgactcaggcaggccagctttccgcgtggtggacaccgagttctaagccacagaccgaggccccagcaggcagcggctggagggatgccacacccctcacagggcagcccccaactacatcttccctgcttactctctgcctacctgcctgagccatgttcacctgcccacttgtcccctgctgcctgcccaaacaccccaccattggcctgtcaacccacccattggcctgtctgctgggtgctaacaaagctctcatcactccttcacttggtctgtctgtctctgtcttggtagttgccggtggacagcatggccgtgccagcctcccacactgaggccaggtctaccccccatcataccagcccccaggaccactaccccacggccagccaggggtccagagctagcccaggctggggatctcgactcagacaagatggtgacaatgccttgagtctgaggcatcctctgcctgctttcctgcctgccccacctgcctcatattgtgtgggcctttttttgtttgtttcattcattgtttttttttttttaattattttaaatgagatttttgttttttttaaatgcaatatctctgtatacagactggctgggccccaccccctgcgtgtggccctcccacagtattttgtgcaatgaagccctgctcccagcctttcagagacagggacacagcccctatttggaaccctgatcatcaccagaccctgggattggctatgggaaagcatgccacagccactcgccttcctacccccgcccgccatccccagttgcagggggatctggggactaccagagactctgggaaatggacaaggtggggggccccactctttctctcctgcagtcccgtagctggggcctccttccttctcagggtctccccagcccagtccccttgctcccatcccactcggtgctgttgggtaggggccctgccaggaactgaccagctcagcgaggagccataatgtgcatatgtgcacaagcagggttgggggaggggggtgtgaggggttgtgcccaggtgttgccccctatctcctggggagggtgaggcagggcagggacagtctccagggtcagtccctggatgggtggttacctccccttcctccaccctaagccctggggccctgaaatggggtgggagggcaggggtgggagccctcctagtgggtttggggggttgggttcctgaatgcaccataatcgctgtatgaaatattaaaaagtctaaagtgaaaa

SEQ ID NO: 3707 - DNA, 601 bp, Homo sapiens
  source 1..601: mol_type = unassigned DNA; mol_type = unassigned DNA
gaaaagtcatcttctcgcgaacctttaaaatgccttcctccccaagcacctcaagggactagaactgagtgcttcatttgtcttttttcctccttgcaaaagtcccgtttgccaccatggggatgtaccaagtgagaccgagtagggggaacgagtggtgattgacgcgccaggttactggccactgctcacctaggcgctagcaaacttctgccaagatcggaactgagtactaaacagcctccacagttctccctggtgccgtctccggcttggcgccgcatcctcctctgggctcgcgatggccgcgtcccctcccgctgcggacgggtcctttggtacatgcagtccgaggtcctcaggatatagccgtgacctaaacacagaaatctaccctggcggagctgatcttctagttgtggcgatcgccatggatcggatgaagaagatcaaacggcagctgtcaatgacactccgaggtggccgaggcatagacaagaccaatggtgcccctgagcagataggcctggatgagagtggtggtggtggcggcagtgaccctggagaggcccccacacgtgctgctcctggggaacttcgt

SEQ ID NO: 3708 - DNA, 573 bp, Homo sapiens
  source 1..573: mol_type = unassigned DNA; mol_type = unassigned DNA
tttgtcttttttcctccttgcaaaagtcccgtttgccaccatggggatgtaccaagtgagaccgagtagggggaacgagtggtgattgacgcgccaggttactggccactgctcacctaggcgctagcaaacttctgccaagatcggaactgagtactaaacagcctccacagttctccctggtgccgtctccggcttggcgccgcatcctcctctgggctcgcgatggccgcgtcccctcccgctgcggacgggtcctttggtacatgcagtccgagatcgccatggatcggatgaagaagatcaaacggcagctgtcaatgacactccgaggtggccgaggcatagacaagaccaatggtgcccctgagcagataggcctggatgagagtggtggtggtggcggcagtgaccctggagaggcccccacacgtgctgctcctggggaacttcgttctgcacggggcccactcagctctgcaccagattgtgcacgaggacttgaagatggggtctgatggggagagtgaccaggcttcagccacgtcctcggatgaggtgcagtctccagtg

SEQ ID NO: 3709 - DNA, 3144 bp, Homo sapiens
  source 1..3144: mol_type = unassigned DNA; mol_type = unassigned DNA
acccttccgagcgcctgcgtgcgcatgcgcggagcgcggcgcgcgcggcggttgggccgttggctgttcggccctgggatccgccgccactccgcgatcagaccgctctgtgccgcgagccgccgtgagcactcggattcaagccggcgccaacgagtccgggggcatcgcccgcagcggccaagctcatggccggctgagcgggacgccgcctccgcctcagccaccgccgccgccgccgcctcctcctcctcagccggcggcggcccgggcccagcaaccatggctgaagactactgggacgggcgcctgcggcgaacaggaggagaaggaggtcgcgcggcctcatcccgggccgccgccccaggcgccgccgcgccggccccgcggctctgaggttgctcgcgcgcccccgccgatcgccatggatcggatgaagaagatcaaacggcagctgtcaatgacactccgaggtggccgaggcatagacaagaccaatggtgcccctgagcagataggcctggatgagagtggtggtggtggcggcagtgaccctggagaggcccccacacgtgctgctcctggggaacttcgttctgcacggggcccactcagctctgcaccagagattgtgcacgaggacttgaagatggggtctgatggggagagtgaccaggcttcagccacgtcctcggatgaggtgcagtctccagtgagagtgcgtatgcgcaaccatcccccacgcaagatctccactgaggacatcaacaagcgcctatcactaccagctgacatccggctgcctgagggctacctggagaagctgaccctcaatagccccatctttgacaagcccctcagccgccgcctccgtcgtgtcagcctatctgagattggctttgggaaactggagacctacattaagctggacaaactgggcgagggtacctatgccaccgtctacaaaggcaaaagcaagctcacagacaaccttgtggcactcaaggagatcagactggaacatgaagagggggcaccctgcaccgccatccgggaagtgtccctgctcaaggacctcaaacacgccaacatcgttacgctacatgacattatccacacggagaagtccctcacccttgtctttgagtacctggacaaggacctgaagcagtacctggatgactgtgggaacatcatcaacatgcacaacgtgaaactgttcctgttccagctgctccgtggcctggcctactgccaccggcagaaggtgctacaccgagacctcaagccccagaacctgctcatcaacgagaggggagagctcaagctggctgactttggcctggcccgagccaagtcaatcccaacaaagacatactccaatgaggtggtgacactgtggtaccggccccctgacatcctgcttgggtccacggactactccactcagattgacatgtggggtgtgggctgcatcttctatgagatggccacaggccgtcccctctttccgggctccacggtggaggaacagctacacttcatcttccgtatcttaggaaccccaactgaggagacgtggccaggcatcctgtccaacgaggagttcaagacatacaactaccccaagtaccgagccgaggcccttttgagccacgcaccccgacttgatagcgacggggccgacctcctcaccaagctgttgcagtttgagggtcgaaatcggatctccgcagaggatgccatgaaacatccattcttcctcagtctgggggagcggatccacaaacttcctgacactacttccatatttgcactaaaggagattcagctacaaaaggaggccagccttcggtcttcgtcgatgcctgactcaggcaggccagctttccgcgtggtggacaccgagttctaagccacagaccgaggccccagcaggcagcggctggagggatgccacacccctcacagggcagcccccaactacatcttccctgcttactctctgcctacctgcctgagccatgttcacctgcccacttgtcccctgctgcctgcccaaacaccccaccattggcctgtcaacccacccattggcctgtctgctgggtgctaacaaagctctcatcactccttcacttggtctgtctgtctctgtcttggtagttgccggtggacagcatggccgtgccagcctcccacactgaggccaggtctaccccccatcataccagcccccaggaccactaccccacggccagccaggggtccagagctagcccaggctggggatctcgactcagacaagatggtgacaatgccttgagtctgaggcatcctctgcctgctttcctgcctgccccacctgcctcatattgtgtgggcctttttttgtttgtttcattcattgtttttttttttttaattattttaaatgagatttttgttttttttaaatgcaatatctctgtatacagactggctgggccccaccccctgcgtgtggccctcccacagtattttgtgcaatgaagccctgctcccagcctttcagagacagggacacagcccctatttggaaccctgatcatcaccagaccctgggattggctatgggaaagcatgccacagccactcgccttcctacccccgcccgccatccccagttgcagggggatctggggactaccagagactctgggaaatggacaaggtggggggccccactctttctctcctgcagtcccgtagctggggcctccttccttctcagggtctccccagcccagtccccttgctcccatcccactcggtgctgttgggtaggggccctgccaggaactgaccagctcagcgaggagccataatgtgcatatgtgcacaagcagggttgggggaggggggtgtgaggggttgtgcccaggtgttgccccctatctcctggggagggtgaggcagggcagggacagtctccagggtcagtccctggatgggtggttacctccccttcctccaccctaagccctggggccctgaaatggggtgggagggcaggggtgggagccctcctagtgggtttggggggttgggttcctgaatgcaccataatcgctgtatgaaatattaaaaagtctaaagtgaaaa

SEQ ID NO: 3710 - DNA, 991 bp, Homo sapiens
  source 1..991: mol_type = unassigned DNA; mol_type = unassigned DNA
cttccgagcgcctgcgtgcgcatgcgcggagcgcggcgcgcgcggcggttgggccgttggctgttcggccctgggatccgccgccactccgcgatcagaccgctctgtgccgcgagccgccgtgagcactcggattcaagccggcgccaacgagtccgggggcatcgcccgcagcggccaagctcatggccggctgagcgggacgccgcctccgcctcagccaccgccgccgccgccgcctcctcctcctcagccggcggcggcccgggcccagcaaccatggctgaagactactgggacgggcgcctgcggcgaacaggaggagaaggaggtcgcgcggcctcatcccgggccgccgccccaggcgccgccgcgccggccccgcggctctgaggttgctcgcgcgcccccgccgtcactattccaggtcctcaggatatagccgtgacctaaacacagaaatctaccctggcggagctgatcttctagttgtggcggtgaggagatagacagtaaagactaaagaaaccaataaatcgccatggatcggatgaagaagatcaaacggcagctgtcaatgacactccgaggtggccgaggcatagacaagaccaatggtgcccctgagcagataggcctggatgagagtggtggtggtggcggcagtgaccctggagaggcccccacacgtgctgctcctggggaacttcgttctgcacggggcccactcagctctgcaccagagattgtgcacgaggacttgaagatggggtctgatggggagagtgaccaggcttcagccacgtcctcggatgaggtgcagtctccagtgagagtgcgtatgcgcaaccatcccccacgcaagatctccactgaggacatcaacaagcgcctatcactaccagctgacatccggctgcctgagggctacctggagaagctgaccctcaatagccccatctttgacaagcccctcagccgccgcctccgt

SEQ ID NO: 3711 - DNA, 943 bp, Homo sapiens
  source 1..943: mol_type = unassigned DNA; mol_type = unassigned DNA
gcatgcgcggagcgcggcgcgcgcggcggttgggccgttggctgttcggccctgggatccgccgccactccgcgatcagaccgctctgtgccgcgagccgccgtgagcactcggattcaagccggcgccaacgagtccgggggcatcgcccgcagcggccaagctcatggccggctgagcgggacgccgcctccgcctcagccaccgccgccgccgccgcctcctcctcctcagccggcggcggcccgggcccagcaaccatggctgaagactactgggacgggcgcctgcggcgaacaggaggagaaggaggtcgcgcggcctcatcccgggccgccgccccaggcgccgccgcgccggccccgcggctctgaggttgctcgcgcgcccccgccgtcactattccaggtcctcaggatatagccgtgacctaaacacagaaatctaccctggcggagctgatcttctagttgtggcgatcgccatggatcggatgaagaagatcaaacggcagctgtcaatgacactccgaggtggccgaggcatagacaagaccaatggtgcccctgagcagataggcctggatgagagtggtggtggtggcggcagtgaccctggagaggcccccacacgtgctgctcctggggaacttcgttctgcacggggcccactcagctctgcaccagagattgtgcacgaggacttgaagatggggtctgatggggagagtgaccaggcttcagccacgtcctcggatgaggtgcagtctccagtgagagtgcgtatgcgcaaccatcccccacgcaagatctccactgaggacatcaacaagcgcctatcactaccagctgacatccggctgcctgagggctacctggagaagctgaccctcaatagccccatctttgacaagcccctcagccgccgcctccgtcgtgtcagc

SEQ ID NO: 3712 - DNA, 1574 bp, Homo sapiens
  source 1..1574: mol_type = unassigned DNA; mol_type = unassigned DNA
ggagcgcggcgcgcgcggcggttgggccgttggctgttcggccctgggatccgccgccactccgcgatcagaccgctctgtgccgcgagccgccgtgagcactcggattcaagccggcgccaacgagtccgggggcatcgcccgcagcggccaagctcatggccggctgagcgggacgccgcctccgcctcagccaccgccgccgccgccgcctcctcctcctcagccggcggcggcccgggcccagcaaccatggctgaagactactgggacgggcgcctgcggcgaacaggaggagaaggaggtcgcgcggcctcatcccgggccgccgccccaggcgccgccgcgccggccccgcggctctgaggttgctcgcgcgcccccgccgatcgccatggatcggatgaagaagatcaaacggcagctgtcaatgacactccgaggtggccgaggcatagacaagaccaatggtgcccctgagcagataggcctggatgagagtggtggtggtggcggcagtgaccctggagaggcccccacacgtgctgctcctggggaacttcgttctgcacggggcccactcagctctgcaccagagattgtgcacgaggacttgaagatggggtctgatggggagagtgaccaggcttcagccacgtcctcggatgaggtgcagtctccagtgagagtgcgtatgcgcaaccatcccccacgcaagatctccactgaggacatcaacaagcgcctatcactaccagctgacatccggctgcctgagggctacctggagaagctgaccctcaatagccccatctttgacaagcccctcagccgccgcctccgtcgtgtcagcctatctgagattggctttgggaaactggagacctacattaagctggacaaactgggcgagggtacctatgccaccgtctacaaaggcaaaagcaagctcacagacaaccttgtggcactcaaggagatcagactggaacatgaagagggggcaccctgcaccgccatccgggaagtgtccctgctcaaggacctcaaacacgccaacatcgttacgctacatgacattatccacacggagaagtccctcacccttgtctttgagtacctggacaaggacctgaagcagtacctggatgactgtgggaacatcatcaacatgcacaacgtgaaactgttcctgttccagctgctccgtggcctggcctactgccaccggcagaaggtgctacaccgagacctcaagccccagaacctgctcatcaacgagaggggagagctcaagctggctgactttggcctggcccgagccaagtcaatcccaacaaagacatactccaatgaggtggtgacactgtggtaccggccccctgacatcctgcttgggtccacggactactccactcagattgacatgtggggtgtgggctgcatcttctatgagatggccacaggccgtcccctctttccgggctccacggtggaggaacagctacacttcatcttccgtatcttagtattttgtgcaatgaagccctgctcccagcctttcagagacaggg

SEQ ID NO: 3713 - DNA, 1679 bp, Homo sapiens
  source 1..1679: mol_type = unassigned DNA; mol_type = unassigned DNA
actccgcgatcagaccgctctgtgccgcgagccgccgtgagcactcggattcaagccggcgccaacgagtccgggggcatcgcccgcagcggccaagctcatggccggctgagcgggacgccgcctccgcctcagccaccgccgccgccgccgcctcctcctcctcagccggcggcggcccgggcccagcaaccatggctgaagactactgggacgggcgcctgcggcgaacaggaggagaaggaggtcgcgcggcctcatcccgggccgccgccccaggcgccgccgcgccggccccgcggctctgaggttgctcgcgcgcccccgccgatcgccatggatcggatgaagaagatcaaacggcagctgtcaatgacactccgaggtggccgaggcatagacaagaccaatggtgcccctgagcagataggcctggatgagagtggtggtggtggcggcagtgaccctggagaggcccccacacgtgctgctcctggggaacttcgttctgcacggggcccactcagctctgcaccagagattgtgcacgaggacttgaagatggggtctgatggggagagtgaccaggcttcagccacgtcctcggatgaggtgcagtctccagtgagagtgcgtatgcgcaaccatcccccacgcaagatctccactgaggacatcaacaagcgcctatcactaccagctgacatccggctgcctgagggctacctggagaagctgaccctcaatagccccatctttgacaagcccctcagccgccgcctccgtcgtgtcagcctatctgagattggctttgggaaactggagacctacattaagctggacaaactgggcgagggtacctatgccaccgtctacaaaggcaaaagcaagctcacagacaaccttgtggcactcaaggagatcagactggaacatgaagagggggcaccctgcaccgccatccgggaagtgtccctgctcaaggacctcaaacacgccaacatcgttacgctacatgacattatccacacggagaagtccctcacccttgtctttgagtacctggacaaggacctgaagcagtacctggatgactgtgggaacatcatcaacatgcacaacgtgaaagtgggtgtggggcaggaagcaggggcacaagggggcccccactcacccactccaacccacaaatctcccagaaacggacttttccctttggctttttttgctaggagcccttggagggcactgggaccctgtcctcttttgtgtgacaaggctctgggcctagtgtctgtgtttgggaggggagcagtgcctgctgggggtcgggctagtggatagtctttgacctctgcctgccattcctgggtccccagctgttcctgttccagctgctccgtggcctggcctactgccaccggcagaaggtgctacaccgagacctcaagccccagaacctgctcatcaacgagaggggagagctcaagctggctgactttggtaccactggcctcccctttcttattggctccccagcctcctactttcccatgaccacttagtctcacttcccttcagccttgccagattttgcctaggacaccctcagtctcaactgcactctccccgagactttgcccatgactccctcattctagctgtcctttctctgattt

SEQ ID NO: 3714 - DNA, 785 bp, Homo sapiens
  source 1..785: mol_type = unassigned DNA; mol_type = unassigned DNA
taccttgtttagggttgttcaatgaatagcagggactcatcacctcagcagaggttggtcctaggccctcagccccctgattcacttatttctgccataagcactttttgagcatctactctgtgtcagtcactattccaggtcctcaggatatagccgtgacctaaacacagaaatctaccctggcggagctgatcttctagttgtggcgatcgccatggatcggatgaagaagatcaaacggcagctgtcaatgacactccgaggtggccgaggcatagacaagaccaatggtgcccctgagcagataggcctggatgagagtggtggtggtggcggcagtgaccctggagaggcccccacacgtgctgctcctggggaacttcgttctgcacggggcccactcagctctgcaccagagattgtgcacgaggacttgaagatggggtctgatggggagagtgaccaggcttcagccacgtcctcggatgaggtgcagtctccagtgagagtgcgtatgcgcaaccatcccccacgcaagatctccactgaggacatcaacaagcgcctatcactaccagctgacatccggctgcctgagggctacctggagaagctgaccctcaatagccccatctttgacaagcccctcagccgccgcctccgtcgtgtcagcctatctgagattggctttgggaaactggagacctacattaagctggacaaactgggcgagggtacctatgccaccgtctacaaaggcaaaagcaagctcacagacaacc

SEQ ID NO: 3715 - DNA, 3016 bp, Homo sapiens
  source 1..3016: mol_type = unassigned DNA; mol_type = unassigned DNA
ctggcagccctgagaagagctggtgtacactgagacccccccgccctccacacaatcccacccagtggttgggtctgggcaggacaccctgacacacgctcccctccccccccccacctgggtagatgaatgggatgatgcagtggttgtcatgacgatgagtgctagagaagtcaggaagagggtccctgtggccacagggaatagtctgccttggcctttgagggtggtgctaggggaactatgccactctatggccgtgctcgagaccatgtcacccatccttcaattctgggcacacgccctggccgacccatggctgggcccatcactgcagctgtacctgagaagatctgcaatggagccttctgctcctgcagtggggcttttcccctagatcccaacaatccatcgttagggcccttgccctcaatcagccacctaaatctgagaactcaggtgggctacgtaggagcagggtcccagtggggctggctgtgtgggtgggcaggtactgacaaagatccccatccatgctgggtttccagaactcctgagtggctctggggtccatagtggttgagtgagcactgacaagttcatgtcagtgccccctgctaggctgtgggctttagggaacccatggtgatcaagcaaatgctaataagagacccatttccatccttgtcccttgctcagatcgccatggatcggatgaagaagatcaaacggcagctgtcaatgacactccgaggtggccgaggcatagacaagaccaatggtgcccctgagcagataggcctggatgagagtggtggtggtggcggcagtgaccctggagaggcccccacacgtgctgctcctggggaacttcgttctgcacggggcccactcagctctgcaccagagattgtgcacgaggacttgaagatggggtctgatggggagagtgaccaggcttcagccacgtcctcggatgaggtgcagtctccagtgagagtgcgtatgcgcaaccatcccccacgcaagatctccactgaggacatcaacaagcgcctatcactaccagctgacatccggctgcctgagggctacctggagaagctgaccctcaatagccccatctttgacaagcccctcagccgccgcctccgtcgtgtcagcctatctgagattggctttgggaaactggagacctacattaagctggacaaactgggcgagggtacctatgccaccgtctacaaaggcaaaagcaagctcacagacaaccttgtggcactcaaggagatcagactggaacatgaagagggggcaccctgcaccgccatccgggaagtgtccctgctcaaggacctcaaacacgccaacatcgttacgctacatgacattatccacacggagaagtccctcacccttgtctttgagtacctggacaaggacctgaagcagtacctggatgactgtgggaacatcatcaacatgcacaacgtgaaagtgggtgtggggcaggaagcaggggcacaagggggcccccactcacccactccaacccacaaatctcccagaaacggacttttccctttggctttttttgctaggagcccttggagggcactgggaccctgtcctcttttgtgtgacaaggctctgggcctagtgtctgtgtttgggaggggagcagtgcctgctgggggtcgggctagtggatagtctttgacctctgcctgccattcctgggtccccagctgttcctgttccagctgctccgtggcctggcctactgccaccggcagaaggtgctacaccgagacctcaagccccagaacctgctcatcaacgagaggggagagctcaagctggctgactttggtaccactggcctcccctttcttattggctccccagcctcctactttcccatgaccacttagtctcacttcccttcagccttgccagattttgcctaggacaccctcagtctcaactgcactctccccgagactttgcccatgactccctcattctagctgtcctttctctgatttccaggcctggcccgagccaagtcaatcccaacaaagacatactccaatgaggtggtgacactgtggtaccggccccctgacatcctgcttgggtccacggactactccactcagattgacatgtggggtgtgggctgcatcttctatgagatggccacaggccgtcccctctttccgggctccacggtggaggaacagctacacttcatcttccgtatcttaggaaccccaactgaggagacgtggccaggcatcctgtccaacgaggagttcaagacatacaactaccccaagtaccgagccgaggcccttttgagccacgcaccccggtgaggctggtgggtgggtgggcgttaggggccagagtgtccaaactcattttaaatcaggtctctttgtccttgtggcagacttgatagcgacggggccgacctcctcaccaagctgttgcagtttgagggtcgaaatcggatctccgcagaggatgccatgaaacatccattcttcctcagtctgggggagcggatccacaaacttcctgacactacttccatatttgcactaaaggagattcagctacaaaaggaggccagccttcggtcttcgtcgatgcctgactcaggtaggtatagccccttgtcttcctccctgccccacccacctacctgcttacccaccaacagccatctgctctgctttcccccacaggcaggccagctttccgcgtggtggacaccgagttctaagccacagaccgaggccccagcaggcagcggctggagggatgccacacccctcacagggcagcccccaactacatcttccctgcttactctctgcctacctgcctgagccatgttcacctgcccacttgtcccctgctgcctgcccaaacaccccaccattggcctgtcaacccacccattggcctgtctgctgggtgctaacaaagctctcatcactccttc

SEQ ID NO: 3716 - DNA, 2022 bp, Homo sapiens
  source 1..2022: mol_type = unassigned DNA; mol_type = unassigned DNA
gatgagtgctagagaagtcaggaagagggtccctgtggccacagggaatagtctgccttggcctttgagggtggtgctaggggaactatgccactctatggccgtgctcgagaccatgtcacccatccttcaattctgggcacacgccctggccgacccatggctgggcccatcactgcagctgtacctgagaagatctgcaatggagccttctgctcctgcagtggggcttttcccctagatcccaacaatccatcgttagggcccttgccctcaatcagccacctaaatctgagaactcagatcgccatggatcggatgaagaagatcaaacggcagctgtcaatgacactccgaggtggccgaggcatagacaagaccaatggtgcccctgagcagataggcctggatgagagtggtggtggtggcggcagtgaccctggagaggcccccacacgtgctgctcctggggaacttcgttctgcacggggcccactcagctctgcaccagagattgtgcacgaggacttgaagatggggtctgatggggagagtgaccaggcttcagccacgtcctcggatgaggtgcagtctccagtgagagtgcgtatgcgcaaccatcccccacgcaagatctccactgaggacatcaacaagcgcctatcactaccagctgacatccggctgcctgagggctacctggagaagctgaccctcaatagccccatctttgacaagcccctcagccgccgcctccgtcgtgtcagcctatctgagattggctttgggaaactggagacctacattaagctggacaaactgggcgagggtacctatgccaccgtctacaaaggcaaaagcaagctcacagacaaccttgtggcactcaaggagatcagactggaacatgaagagggggcaccctgcaccgccatccgggaagtgtccctgctcaaggacctcaaacacgccaacatcgttacgctacatgacattatccacacggagaagtccctcacccttgtctttgagtacctggacaaggacctgaagcagtacctggatgactgtgggaacatcatcaacatgcacaacgtgaaactgttcctgttccagctgctccgtggcctggcctactgccaccggcagaaggtgctacaccgagacctcaagccccagaacctgctcatcaacgagaggggagagctcaagctggctgactttggcctggcccgagccaagtcaatcccaacaaagacatactccaatgaggtggtgacactgtggtaccggccccctgacatcctgcttgggtccacggactactccactcagattgacatgtggggtgtgggctgcatcttctatgagatggccacaggccgtcccctctttccgggctccacggtggaggaacagctacacttcatcttccgtatcttaggaaccccaactgaggagacgtggccaggcatcctgtccaacgaggagttcaagacatacaactaccccaagtaccgagccgaggcccttttgagccacgcaccccgacttgatagcgacggggccgacctcctcaccaagctgttgcagtttgagggtcgaaatcggatctccgcagaggatgccatgaaacatccattcttcctcagtctgggggagcggatccacaaacttcctgacactacttccatatttgcactaaaggagattcagctacaaaaggaggccagccttcggtcttcgtcgatgcctgactcaggcaggccagctttccgcgtggtggacaccgagttctaagccacagaccgaggccccagcaggcagcggctggagggatgccacacccctcacagggcagcccccaactacatcttccctgcttactctctgcctacctgcctgagccatgttcacctgcccacttgtcccctgctgcctgcccaaacaccccaccattggcctgtcaacccacccattggcctgtctgctgggtgctaacaaagctctcatcactccttc

SEQ ID NO: 3717 - DNA, 454 bp, Homo sapiens
  source 1..454: mol_type = unassigned DNA; mol_type = unassigned DNA
ccctgagcagataggcctggatgagagtggtggtggtggcggcagtgaccctggagaggcccccacacgtgctgctcctggggaacttcgttctgcacggggcccactcagctctgcaccagagattgtgcacgaggacttgaagatggggtctgatggggagagtgaccaggcttcagccacgtcctcggatgaggtgcagtctccagtgagagacatcaacaagcgcctatcactaccagctgacatccggctgcctgagggctacctggagaagctgaccctcaatagccccatctttgacaagcccctcagccgccgcctccgtcgtgtcagcctatctgagattggctttgggaaactggagacctacattaagctggacaaactgggcgagggtacctatgccaccgtctacaaaggcaaaagcaagctcacagacaaccttgtggca

SEQ ID NO: 3718 - DNA, 1266 bp, Homo sapiens
  source 1..1266: mol_type = unassigned DNA; mol_type = unassigned DNA
gacaaggacctgaagcagtacctggatgactgtgggaacatcatcaacatgcacaacgtgaaactgttcctgttccagctgctccgtggcctggcctactgccaccggcagaaggtgctacaccgagacctcaagccccagaacctgctcatcaacgagaggggagagctcaagctggctgactttggcctggcccgagccaagtcaatcccaacaaagacatactccaatgaggtggtgacactgtggtaccggccccctgacatcctgcttgggtccacggactactccactcagattgacatgtggggtgtgggctgcatcttctatgagatggccacaggccgtcccctctttccgggctccacggtggaggaacagctacacttcatcttccgtatcttaggaaccccaactgaggagacgtggccaggcatcctgtccaacgaggagttcaagacatacaactaccccaagtaccgagccgaggcccttttgagccacgcaccccggtctctttgtccttgtggcagacttgatagcgacggggccgacctcctcaccaagctgttgcagtttgagggtcgaaatcggatctccgcagaggatgccatgaaacatccattcttcctcagtctgggggagcggatccacaaacttcctgacactacttccatatttgcactaaaggagattcagctacaaaaggaggccagccttcggtcttcgtcgatgcctgactcaggcaggccagctttccgcgtggtggacaccgagttctaagccacagaccgaggccccagcaggcagcggctggagggatgccacacccctcacagggcagcccccaactacatcttccctgcttactctctgcctacctgcctgagccatgttcacctgcccacttgtcccctgctgcctgcccaaacaccccaccattggcctgtcaacccacccattggcctgtctgctgggtgctaacaaagctctcatcactccttcacttggtctgtctgtctctgtcttggtagttgccggtggacagcatggccgtgccagcctcccacactgaggccaggtctaccccccatcataccagcccccaggaccactaccccacggccagccaggggtccagagctagcccaggctggggatctcgactcagacaagatggtgacaatgccttgagtctgaggcatcctctgcctgctttcctgcctgccccacctgcctcatattgtgtgggcctttttttgtttg

SEQ ID NO: 3719 - DNA, 675 bp, Homo sapiens
  source 1..675: mol_type = unassigned DNA; mol_type = unassigned DNA
cagaaacggacttttccctttggctttttttgctaggagcccttggagggcactgggaccctgtcctcttttgtgtgacaaggctctgggcctagtgtctgtgtttgggaggggagcagtgcctgctgggggtcgggctagtggatagtctttgacctctgcctgccattcctgggtccccagctgttcctgttccagctgctccgtggcctggcctactgccaccggcagaaggtgctacaccgagacctcaagccccagaacctgctcatcaacgagaggggagagctcaagctggctgactttggcctggcccgagccaagtcaatcccaacaaagacatactccaatgaggtggtgacactgtggtaccggccccctgacatcctgcttgggtccacggactactccactcagattgacatgtggggtgtgggctgcatcttctatgagatggccacaggccgtcccctctttccgggctccacggtggaggaacagctacacttcatcttccgtatcttaggaaccccaactgaggagacgtggccaggcatcctgtccaacgaggagttcaagacatacaactaccccaagtaccgagccgaggcccttttgagccacgcaccccgacttgatagcgacggggccgacctcctcaccaagctgttgcag

SEQ ID NO: 3720 - DNA, 533 bp, Homo sapiens
  source 1..533: mol_type = unassigned DNA; mol_type = unassigned DNA
tttgcctaggacaccctcagtctcaactgcactctccccgagactttgcccatgactccctcattctagctgtcctttctctgatttccaggcctggcccgagccaagtcaatcccaacaaagacatactccaatgaggtggtgacactgtggtaccggccccctgacatcctgcttgggtccacggactactccactcagattgacatgtggggtgtgggctgcatcttctatgagatggccacaggccgtcccctctttccgggctccacggtggaggaacagctacacttcatcttccgtatcttaggaaccccaactgaggagacgtggccaggcatcctgtccaacgaggagttcaagacatacaactaccccaagtaccgagccgaggcccttttgagccacgcaccccgacttgatagcgacggggccgacctcctcaccaagctgttgcagtttgagggtcgaaatcggatctccgcagaggatgccatgaaacatccattcttcctcagtctgggggagcggat

SEQ ID NO: 3721 - DNA, 866 bp, Homo sapiens
  source 1..866: mol_type = unassigned DNA; mol_type = unassigned DNA
gttaggggccagagtgtccaaactcattttaaatcaggtctctttgtccttgtggcagacttgatagcgacggggccgacctcctcaccaagctgttgcagtttgagggtcgaaatcggatctccgcagaggatgccatgaaacatccattcttcctcagtctgggggagcggatccacaaacttcctgacagtgagtggagctggggaatggaccggccagcgtggggactgggaaacaggactgctggggccagctggcgggttgtgtaggattctggctgtgccacctctacgtggggggacatcttgttcacgtgtgtgatgggttgtatttgttatgaaaacattttttagttttcagttccttttacctttcatgaaaaatttaaaacatacataaaaatatatgcaatagcactttactttttttaaagtagacatttccttacatgtgctaaaaaatgcacaaatcataagtatactatacaatgaattttcataaatgaaacacatccttgtaactagcacaaaagtcaagaaacagaatgttaaaagctccccacccccagctcccttgcatctccttcagttattcccagccccttcccaaagggtggccactgttttgacctctaacagcaaggataagttttttctgtccttgtactttatagaaatagaatcacatgtgatgttctttttatatctggcttttaaaaactttttaatatggatattttcaaatatatgtatttatatattagtcaaagtaatatgatgagtccctaagtactccagtgagtcatcaattcatggtcaatctggttttatctatattctctctgattattttgaatcacatcc

SEQ ID NO: 3722 - DNA, 498 bp, Homo sapiens
  source 1..498: mol_type = unassigned DNA; mol_type = unassigned DNA
acttgatagcgacggggccgacctcctcaccaagctgttgcagtttgagggtcgaaatcggatctccgcagaggatgccatgaaacatccattcttcctcagtctgggggagcggatccacaaacttcctgacactacttccatatttgcactaaaggagattcagctacaaaaggaggccagccttcggtcttcgtcgatgcctgactcagccatctgctctgctttcccccacaggcaggccagctttccgcgtggtggacaccgagttctaagccacagaccgaggccccagcaggcagcggctggagggatgccacacccctcacagggcagcccccaactacatcttccctgcttactctctgcctacctgcctgagccatgttcacctgcccacttgtcccctgctgcctgcccaaacaccccaccattggcctgtcaacccacccattggcctgtctgctgggtgctaacaaagctctcatcactccttca

SEQ ID NO: 3723 - DNA, 664 bp, Homo sapiens
  source 1..664: mol_type = unassigned DNA; mol_type = unassigned DNA
acttgatagcgacggggccgacctcctcaccaagctgttgcagtttgagggtcgaaatcggatctccgcagaggatgccatgaaacatccattcttcctcagtctgggggagcggatccacaaacttcctgacactacttccatatttgcactaaaggagattcagctacaaaaggaggccagccttcggtcttcgtcgatgcctgactcagttgccggtggacagcatggccgtgccagcctcccacactgaggccaggtctaccccccatcataccagcccccaggaccactaccccacggccagccaggggtccagagctagcccaggctggggatctcgactcagacaagatggtgacaatgccttgagtctgaggcatcctctgcctgctttcctgcctgccccacctgcctcatattgtgtgggcctttttttgtttgtttcattcattgtttttttttttttaattattttaaatgagatttttgttttttttaaatgcaatatctctgtatacagactggctgggccccaccccctgcgtgtggccctcccacagtattttgtgcaatgaagccctgctcccagcctttcagagacagggacacagcccctatttggaaccctgatcatcaccagaccctgggattggctatggga

SEQ ID NO: 3724 - DNA, 527 bp, Homo sapiens
  source 1..527: mol_type = unassigned DNA; mol_type = unassigned DNA
ttttaaaacaacaatattattatcaaacctacaaaaaacatttgctcactttccctatcttcccactggattaatatataaagcaaaccccaaacaccacccatcacctagacttaacaggtggtaattgcaataccataattcacttgacaaagttaataatgatttctttgtgtcatgtaatagtctatatttcatcttccctggttgtagctggtttgtgtatggaattgtttgacagataaaggtcaagcctctcagagaaggggcagctttttctaattcttcccatggggtcatatggggctggtcctagatgacctcatgggtcatcccccacttctatgtctcccccatctgtagctacttccatatttgcactaaaggagattcagctacaaaaggaggccagccttcggtcttcgtcgatgcctgactcaggcaggccagctttccgcgtggtggacaccgagttctaagccacagaccgaggccccagcaggcagcggctggagggatgccacacc

SEQ ID NO: 3725 - DNA, 3016 bp, Homo sapiens
  source 1..3016: mol_type = unassigned DNA; mol_type = unassigned DNA
tagagaagtcaggaagagggtccctgtggccacagggaatagtctgccttggcctttgagggtggtgctaggggaactatgccactctatggccgtgctcgagaccatgtcacccatccttcaattctgggcacacgccctggccgacccatggctgggcccatcactgcagctgtacctgagaagatctgcaatggagccttctgctcctgcagtggggcttttcccctagatcccaacaatccatcgttagggcccttgccctcaatcagccacctaaatctgagaactcagatcgccatggatcggatgaagaagatcaaacggcagctgtcaatgacactccgaggtggccgaggcatagacaagaccaatggtgcccctgagcagataggcctggatgagagtggtggtggtggcggcagtgaccctggagaggcccccacacgtgctgctcctggggaacttcgttctgcacggggcccactcagctctgcaccagagattgtgcacgaggacttgaagatggggtctgatggggagagtgaccaggcttcagccacgtcctcggatgaggtgcagtctccagtgagagtgcgtatgcgcaaccatcccccacgcaagatctccactgaggacatcaacaagcgcctatcactaccagctgacatccggctgcctgagggctacctggagaagctgaccctcaatagccccatctttgacaagcccctcagccgccgcctccgtcgtgtcagcctatctgagattggctttgggaaactggagacctacattaagctggacaaactgggcgagggtacctatgccaccgtctacaaaggcaaaagcaagctcacagacaaccttgtggcactcaaggagatcagactggaacatgaagagggggcaccctgcaccgccatccgggaagtgtccctgctcaaggacctcaaacacgccaacatcgttacgctacatgacattatccacacggagaagtccctcacccttgtctttgagtacctggacaaggacctgaagcagtacctggatgactgtgggaacatcatcaacatgcacaacgtgaaactgttcctgttccagctgctccgtggcctggcctactgccaccggcagaaggtgctacaccgagacctcaagccccagaacctgctcatcaacgagaggggagagctcaagctggctgactttggcctggcccgagccaagtcaatcccaacaaagacatactccaatgaggtggtgacactgtggtaccggccccctgacatcctgcttgggtccacggactactccactcagattgacatgtggggtgtgggctgcatcttctatgagatggccacaggccgtcccctctttccgggctccacggtggaggaacagctacacttcatcttccgtatcttaggaaccccaactgaggagacgtggccaggcatcctgtccaacgaggagttcaagacatacaactaccccaagtaccgagccgaggcccttttgagccacgcaccccgacttgatagcgacggggccgacctcctcaccaagctgttgcagtttgagggtcgaaatcggatctccgcagaggatgccatgaaacatccattcttcctcagtctgggggagcggatccacaaacttcctgacactacttccatatttgcactaaaggagattcagctacaaaaggaggccagccttcggtcttcgtcgatgcctgactcaggcaggccagctttccgcgtggtggacaccgagttctaagccacagaccgaggccccagcaggcagcggctggagggatgccacacccctcacagggcagcccccaactacatcttccctgcttactctctgcctacctgcctgagccatgttcacctgcccacttgtcccctgctgcctgcccaaacaccccaccattggcctgtcaacccacccattggcctgtctgctgggtgctaacaaagctctcatcactccttcacttggtctgtctgtctctgtcttggtagttgccggtggacagcatggccgtgccagcctcccacactgaggccaggtctaccccccatcataccagcccccaggaccactaccccacggccagccaggggtccagagctagcccaggctggggatctcgactcagacaagatggtgacaatgccttgagtctgaggcatcctctgcctgctttcctgcctgccccacctgcctcatattgtgtgggcctttttttgtttgtttcattcattgtttttttttttttaattattttaaatgagatttttgttttttttaaatgcaatatctctgtatacagactggctgggccccaccccctgcgtgtggccctcccacagtattttgtgcaatgaagccctgctcccagcctttcagagacagggacacagcccctatttggaaccctgatcatcaccagaccctgggattggctatgggaaagcatgccacagccactcgccttcctacccccgcccgccatccccagttgcagggggatctggggactaccagagactctgggaaatggacaaggtggggggccccactctttctctcctgcagtcccgtagctggggcctccttccttctcagggtctccccagcccagtccccttgctcccatcccactcggtgctgttgggtaggggccctgccaggaactgaccagctcagcgaggagccataatgtgcatatgtgcacaagcagggttgggggaggggggtgtgaggggttgtgcccaggtgttgccccctatctcctggggagggtgaggcagggcagggacagtctccagggtcagtccctggatgggtggttacctccccttcctccaccctaagccctggggccctgaaatggggtgggagggcaggggtgggagccctcctagtgggtttggggggttgggttcctgaatgcaccataatcgctgtatgaaatattaaaaagtctaaagtg

SEQ ID NO: 3726 - DNA, 2968 bp, Homo sapiens
  source 1..2968: mol_type = unassigned DNA; mol_type = unassigned DNA
gcggagcgcggcgcgcgcggcggttgggccgttggctgttcggccctgggatccgccgccactccgcgatcagaccgctctgtgccgcgagccgccgtgagcactcggattcaagccggcgccaacgagtccgggggcatcgcccgcagcggccaagctcatggccggctgagcgggacgccgcctccgcctcagccaccgccgccgccgccgcctcctcctcctcagccggcggcggcccgggcccagcaaccatggctgaagactactgggacgggcgcctgcggcgaacaggaggagaaggaggtcgcgcggcctcatcccgggccgccgccccaggcgccgccgcgccggccccgcggctctgaggttgctcgcgcgcccccgccgatcgccatggatcggatgaagaagatcaaacggcagctgtcaatgacactccgctctgcaccagagattgtgcacgaggacttgaagatggggtctgatggggagagtgaccaggcttcagccacgtcctcggatgaggtgcagtctccagtgagagtgcgtatgcgcaaccatcccccacgcaagatctccactgaggacatcaacaagcgcctatcactaccagctgacatccggctgcctgagggctacctggagaagctgaccctcaatagccccatctttgacaagcccctcagccgccgcctccgtcgtgtcagcctatctgagattggctttgggaaactggagacctacattaagctggacaaactgggcgagggtacctatgccaccgtctacaaaggcaaaagcaagctcacagacaaccttgtggcactcaaggagatcagactggaacatgaagagggggcaccctgcaccgccatccgggaagtgtccctgctcaaggacctcaaacacgccaacatcgttacgctacatgacattatccacacggagaagtccctcacccttgtctttgagtacctggacaaggacctgaagcagtacctggatgactgtgggaacatcatcaacatgcacaacgtgaaactgttcctgttccagctgctccgtggcctggcctactgccaccggcagaaggtgctacaccgagacctcaagccccagaacctgctcatcaacgagaggggagagctcaagctggctgactttggcctggcccgagccaagtcaatcccaacaaagacatactccaatgaggtggtgacactgtggtaccggccccctgacatcctgcttgggtccacggactactccactcagattgacatgtggggtgtgggctgcatcttctatgagatggccacaggccgtcccctctttccgggctccacggtggaggaacagctacacttcatcttccgtatcttaggaaccccaactgaggagacgtggccaggcatcctgtccaacgaggagttcaagacatacaactaccccaagtaccgagccgaggcccttttgagccacgcaccccgacttgatagcgacggggccgacctcctcaccaagctgttgcagtttgagggtcgaaatcggatctccgcagaggatgccatgaaacatccattcttcctcagtctgggggagcggatccacaaacttcctgacactacttccatatttgcactaaaggagattcagctacaaaaggaggccagccttcggtcttcgtcgatgcctgactcaggcaggccagctttccgcgtggtggacaccgagttctaagccacagaccgaggccccagcaggcagcggctggagggatgccacacccctcacagggcagcccccaactacatcttccctgcttactctctgcctacctgcctgagccatgttcacctgcccacttgtcccctgctgcctgcccaaacaccccaccattggcctgtcaacccacccattggcctgtctgctgggtgctaacaaagctctcatcactccttcacttggtctgtctgtctctgtcttggtagttgccggtggacagcatggccgtgccagcctcccacactgaggccaggtctaccccccatcataccagcccccaggaccactaccccacggccagccaggggtccagagctagcccaggctggggatctcgactcagacaagatggtgacaatgccttgagtctgaggcatcctctgcctgctttcctgcctgccccacctgcctcatattgtgtgggcctttttttgtttgtttcattcattgtttttttttttttaattattttaaatgagatttttgttttttttaaatgcaatatctctgtatacagactggctgggccccaccccctgcgtgtggccctcccacagtattttgtgcaatgaagccctgctcccagcctttcagagacagggacacagcccctatttggaaccctgatcatcaccagaccctgggattggctatgggaaagcatgccacagccactcgccttcctacccccgcccgccatccccagttgcagggggatctggggactaccagagactctgggaaatggacaaggtggggggccccactctttctctcctgcagtcccgtagctggggcctccttccttctcagggtctccccagcccagtccccttgctcccatcccactcggtgctgttgggtaggggccctgccaggaactgaccagctcagcgaggagccataatgtgcatatgtgcacaagcagggttgggggaggggggtgtgaggggttgtgcccaggtgttgccccctatctcctggggagggtgaggcagggcagggacagtctccagggtcagtccctggatgggtggttacctccccttcctccaccctaagccctggggccctgaaatggggtgggagggcaggggtgggagccctcctagtgggtttggggggttgggttcctgaatgcaccataatcgctgtatgaaatattaaaaagtctaaagtg

SEQ ID NO: 3727 - DNA, 1648 bp, Homo sapiens
  source 1..1648: mol_type = unassigned DNA; mol_type = unassigned DNA
tttccttcctcctcctcctcctcctcctcctccctcctcttccccaccttcctccactccctcccttcccctccccttctacctcctcctcggccagctcaggttgcagcttctctggggaactgctcacctttccggagcaggggaagctgccccgtgcccgggagggagcgggcgcaccgcggcccccaggacacgcgctgacccggctgcccagtccctcatgatcatgaacaagatgaagaactttaagcgccgtttctccctgtcagtgccccgcactgagaccattgaagaatccttggctgaattcacggagcaattcaaccagctccacaaccggcggaatgagaacttgcagctcggtcctcttggcagagaccccccgcaggagtgcagcaccttctccccaacagacagcggggaggagccggggcagctctcccctggcgtgcagttccagcggcggcagaaccagcgccgcttctccatggaggacgtcagcaagaggctctctctgcccatggatatccgcctgccccaggaattcctacagaagctacagatggagagcccagatctgcccaagccgctcagccgcatgtcccgccgggcctccctgtcagacattggctttgggaaactggaaacatacgtgaaactggacaaactgggagagggcacctatgccacagtcttcaaagggcgcagcaaactgacggagaaccttgtggccctgaaagagatccggctggagcacgaggagggagcgccctgcactgccatccgagaggtgtctctgctgaagaacctgaagcacgccaatattgtgaccctgcatgacctcatccacacagatcggtccctcaccctggtgtttgagtacctggacagtgacctgaagcagtatctggaccactgtgggaacctcatgagcatgcacaacgtcaagattttcatgttccagctgctccggggcctcgcctactgtcaccaccgcaagatcctgcaccgggacctgaagccccagaacctgctcatcaacgagaggggggagctgaagctggccgactttggactggccagggccaagtcagtgcccacaaagacttactccaatgaggtggtgaccctgtggtacaggccccccgatgtgctgctgggatccacagagtactccacccccattgatatgtggggcgtgggctgcatccactacgagatggccacagggaggcccctcttcccgggctccacagtcaaggaggagctgcacctcatctttcgcctcctcgggacccccacagaagagacgtggcccggcgtgaccgccttctctgagttccgcacctacagcttcccctgctacctcccgcagccgctcatcaaccacgcgcccaggttggatacggatggcatccacctcctgagcagcctgctcctgtatgaatccaagagtcgcatgtcagcagaggctgccctgagtcactcctacttccggtctctgggagagcgtgtgcaccagcttgaagacactgcctccatcttctccctgaaggagatccagctccagaaggacccaggctaccgaggcttggccttccagcagccaggacgagggaagaacaggcggcagagcatcttctga

SEQ ID NO: 3728 - DNA, 1134 bp, Homo sapiens
  source 1..1134: mol_type = unassigned DNA; mol_type = unassigned DNA
ttccttcctcctcctcctcctcctcctcctccctcctcttccccaccttcctccactccctcccttcccctccccttctacctcctcctcggccagctcaggttgcagcttctctggggaactgctcacctttccggagcaggggaagctgccccgtgcccgggagggagcgggcgcaccgcggcccccaggacacgcgctgacccggctgcccagtccctcatgatcatgaacaagatgaagaactttaagcgccgtttctccctgtcagtgccccgcactgagaccattgaagaatccttggctgaattcacggagcaattcaaccagctccacaaccggcggaatgagagtgaggggtctgggcccacccagcacctctcccacctaccagacactccccagtcaccttcccctccccgcccaccccctccccactggccttaggggaggagcacagcgctgggggaggggggctacccttctctccctcaggacagagaggcagggaggggagctgacgcctgtccctcttagacttgcagctcggtcctcttggcagagaccccccgcaggagtgcagcaccttctccccaacagacagcggggaggagccggggcagctctcccctggcgtgcagttccagcggcggcagaaccagcgccgcttctccatggaggacgtcagcaagaggctctctctgcccatggatatccgcctgccccaggaattcctacagaagctacagatggagagcccagatctgcccaagccgctcagccgcatgtcccgccgggcctccctgtcagacattggctttgggaaactggaaacatacgtgaaactggacaaactgggagagggcacctatgccacagtcttcaaagggcgcagcaaactgacggagaaccttgtggccctgaaagagatccggctggagcacgaggagggagcgccctgcactgccatccgagaggtgtctctgctgaagaacctgaagcacgccaatattgtgaccctgcatgacctcatccacacagatcggtccctcaccctggtgtttgagtacctggacagtgacctgaagcagtatctggaccactgtgggaacctcatgagcatgcacaacgtca

SEQ ID NO: 3729 - DNA, 2435 bp, Homo sapiens
  source 1..2435: mol_type = unassigned DNA; mol_type = unassigned DNA
tccttcctcctcctcctcctcctcctcctccctcctcttccccaccttcctccactccctcccttcccctccccttctacctcctcctcggccagctcaggttgcagcttctctggggaactgctcacctttccggagcaggggaagctgccccgtgcccgggagggagcgggcgcaccgcggcccccaggacacgcgctgtgagtcccgcgggcggtgcgcctgggaggaagggggaggtcggaggagcgggcaccgcggcgccgggtataaggagcaaagaagacacaaccctggctcccagtgatggtggcatacagggcgacagagcttgatgagagagctgaattcccagtgggtggagacctggactggttgccttgttcttttcaactgctcttctcacacttcccatctcaggacccggctgcccagtccctcatgatcatgaacaagatgaagaactttaagcgccgtttctccctgtcagtgccccgcactgagaccattgaagaatccttggctgaattcacggagcaattcaaccagctccacaaccggcggaatgagagtgaggggtctgggcccacccagcacctctcccacctaccagacactccccagtcaccttcccctccccgcccaccccctccccactggccttaggggaggagcacagcgctgggggaggggggctacccttctctccctcaggacagagaggcagggaggggagctgacgcctgtccctcttagacttgcagctcggtcctcttggcagagaccccccgcaggagtgcagcaccttctccccaacagacagcggggaggagccggggcagctctcccctggcgtgcagttccagcggcggcagaaccagcgccgcttctccatggaggacgtcagcaagaggctctctctgcccatggatatccgcctgccccaggaattcctacagaagctacagatggagagcccagatctgcccaagccgctcagccgcatgtcccgccgggcctccctgtcagacattggctttgggaaactggaaacatacgtgaaactggacaaactgggagagggcacctatgccacagtcttcaaagggcgcagcaaactgacggagaaccttgtggccctgaaagagatccggctggagcacgaggagggagcgccctgcactgccatccgagaggtgtctctgctgaagaacctgaagcacgccaatattgtgaccctgcatgacctcatccacacagatcggtccctcaccctggtgtttgagtacctggacagtgacctgaagcagtatctggaccactgtgggaacctcatgagcatgcacaacgtcaagattttcatgttccagctgctccggggcctcgcctactgtcaccaccgcaagatcctgcaccgggacctgaagccccagaacctgctcatcaacgagaggggggagctgaagctggccgactttggactggccagggccaagtcagtgcccacaaagacttactccaatgaggtggtgaccctgtggtacaggccccccgatgtgctgctgggatccacagagtactccacccccattgatatgtggggcgtgggctgcatccactacgagatggccacagggaggcccctcttcccgggctccacagtcaaggaggagctgcacctcatctttcgcctcctcgggacccccacagaagagacgtggcccggcgtgaccgccttctctgagttccgcacctacagcttcccctgctacctcccgcagccgctcatcaaccacgcgcccaggttggatacggatggcatccacctcctgagcagcctgctcctgtatgaatccaagagtcgcatgtcagcagaggctgccctgagtcactcctacttccggtctctgggagagcgtgtgcaccagcttgaagacactgcctccatcttctccctgaaggagatccagctccagaaggacccaggctaccgaggcttggccttccagcagccaggacgagggaagaacaggcggcagagcatcttctgagccacgcccaccttgctgtggccaagggacaagagatcacatggagcacaaattcgggtaggatggagcctgtgtggccctcggaggactgaagaacgagggctgacagccagcctggaagaccgcttggcagcccttctggccacggctgtttcttctttgtgcttcccgtgtgcctccccagtagccctcacctgcataccaacccctcctttacccacgttggggctggcataagctgcttccctgagaggacatgaggggggggcggtcctcgtaccctctcccaccctggtgtttgggcacctgcgtgggatgcacacggatgacagaatcaaggcgccaggatgggcactctgccctggatacaggctctaccctcct

SEQ ID NO: 3730 - DNA, 2143 bp, Homo sapiens
  source 1..2143: mol_type = unassigned DNA; mol_type = unassigned DNA
ccttcctcctcctcctcctcctcctcctccctcctcttccccaccttcctccactccctcccttcccctccccttctacctcctcctcggccagctcaggttgcagcttctctggggaactgctcacctttccggagcaggggaagctgccccgtgcccgggagggagcgggcgcaccgcggcccccaggacacgcgctgacccggctgcccagtccctcatgatcatgaacaagatgaagaactttaagcgccgtttctccctgtcagtgccccgcactgagaccattgaagaatccttggctgaattcacggagcaattcaaccagctccacaaccggcggaatgagaacttgcagctcggtcctcttggcagagaccccccgcaggagtgcagcaccttctccccaacagacagcggggaggagccggggcagctctcccctggcgtgcagttccagcggcggcagaaccagcgccgcttctccatggaggtaagggcctctggagctctgccccggcaggtggcaggatgcacgcacaagggtgtgcacaggagggcagctgccttacagccagactttgacgtcagcaagaggctctctctgcccatggatatccgcctgccccaggaattcctacagaagctacagatggagagcccagatctgcccaagccgctcagccgcatgtcccgccgggcctccctgtcagacattggctttgggaaactggaaacatacgtgaaactggacaaactgggagagggcacctatgccacagtcttcaaagggcgcagcaaactgacggagaaccttgtggccctgaaagagatccggctggagcacgaggagggagcgccctgcactgccatccgagaggtgtctctgctgaagaacctgaagcacgccaatattgtgaccctgcatgacctcatccacacagatcggtccctcaccctggtgtttgagtacctggacagtgacctgaagcagtatctggaccactgtgggaacctcatgagcatgcacaacgtcaagattttcatgttccagctgctccggggcctcgcctactgtcaccaccgcaagatcctgcaccgggacctgaagccccagaacctgctcatcaacgagaggggggagctgaagctggccgactttggactggccagggccaagtcagtgcccacaaagacttactccaatgaggtggtgaccctgtggtacaggccccccgatgtgctgctgggatccacagagtactccacccccattgatatgtggggcgtgggctgcatccactacgagatggccacagggaggcccctcttcccgggctccacagtcaaggaggagctgcacctcatctttcgcctcctcgggacccccacagaagagacgtggcccggcgtgaccgccttctctgagttccgcacctacagcttcccctgctacctcccgcagccgctcatcaaccacgcgcccaggttggatacggatggcatccacctcctgagcagcctgctcctgtatgaatccaagagtcgcatgtcagcagaggctgccctgagtcactcctacttccggtctctgggagagcgtgtgcaccagcttgaagacactgcctccatcttctccctgaaggagatccagctccagaaggacccaggctaccgaggcttggccttccagcagccaggacgagggaagaacaggcggcagagcatcttctgagccacgcccaccttgctgtggccaagggacaagagatcacatggagcacaaattcgggtaggatggagcctgtgtggccctcggaggactgaagaacgagggctgacagccagcctggaagaccgcttggcagcccttctggccacggctgtttcttctttgtgcttcccgtgtgcctccccagtagccctcacctgcataccaacccctcctttacccacgttggggctggcataagctgcttccctgagaggacatgaggggggggcggtcctcgtaccctctcccaccctggtgtttgggcacctgcgtgggatgcacacggatgacagaatcaaggcgccaggatgggcactctgccctggatacaggctctaccctcctcccccaggacctgcctagtgccag

SEQ ID NO: 3731 - DNA, 3141 bp, Homo sapiens
  source 1..3141: mol_type = unassigned DNA; mol_type = unassigned DNA
cttcctcctcctcctcctcctcctcctccctcctcttccccaccttcctccactccctcccttcccctccccttctacctcctcctcggccagctcaggttgcagcttctctggggaactgctcacctttccggagcaggggaagctgccccgtgcccgggagggagcgggcgcaccgcggcccccaggacacgcgctgtgagtcccgcgggcggtgcgcctgggaggaagggggaggtcggaggagcgggcaccgcggcgccgggtataaggagcaaaggacccggctgcccagtccctcatgatcatgaacaagatgaagaactttaagcgccgtttctccctgtcagtgccccgcactgagaccattgaagaatccttggctgaattcacggagcaattcaaccagctccacaaccggcggaatgagaacttgcagctcggtcctcttggcagagaccccccgcaggagtgcagcaccttctccccaacagacagcggggaggagccggggcagctctcccctggcgtgcagttccagcggcggcagaaccagcgccgcttctccatggaggacgtcagcaagaggctctctctgcccatggatatccgcctgccccaggaattcctacagaagctacagatggagagcccagatctgcccaagccgctcagccgcatgtcccgccgggcctccctgtcagacattggctttgggaaactggaaacatacgtgaaactggacaaactgggagagggcacctatgccacagtcttcaaagggcgcagcaaactgacggagaaccttgtggccctgaaagagatccggctggagcacgaggagggagcgccctgcactgccatccgagaggtgtctctgctgaagaacctgaagcacgccaatattgtgaccctgcatgacctcatccacacagatcggtccctcaccctggtgtttgagtacctggacagtgacctgaagcagtatctggaccactgtgggaacctcatgagcatgcacaacgtcaagattttcatgttccagctgctccggggcctcgcctactgtcaccaccgcaagatcctgcaccgggacctgaagccccagaacctgctcatcaacgagaggggggagctgaagctggccgactttggactggccagggccaagtcagtgcccacaaagacttactccaatgaggtggtgaccctgtggtacaggccccccgatgtgctgctgggatccacagagtactccacccccattgatatgtggggcgtgggctgcatccactacgagatggccacagggaggcccctcttcccgggctccacagtcaaggaggagctgcacctcatctttcgcctcctcgggacccccacagaagagacgtggcccggcgtgaccgccttctctgagttccgcacctacagcttcccctgctacctcccgcagccgctcatcaaccacgcgcccaggttggatacggatggcatccacctcctgagcagcctgctcctgtatgaatccaagagtcgcatgtcagcagaggctgccctgagtcactcctacttccggtctctgggagagcgtgtgcaccagcttgaagacactgcctccatcttctccctgaaggagatccagctccagaaggacccaggctaccgaggcttggccttccagcagccaggacgagggaagaacaggcggcagagcatcttctgagccacgcccaccttgctgtggccaagggacaagagatcacatggagcacaaattcgggtaggatggagcctgtgtggccctcggaggactgaagaacgagggctgacagccagcctggaagaccgcttggcagcccttctggccacggctgtttcttctttgtgcttcccgtgtgcctccccagtagccctcacctgcataccaacccctcctttacccacgttggggctggcataagctgcttccctgagaggacatgaggggggggcggtcctcgtaccctctcccaccctggtgtttgggcacctgcgtgggatgcacacggatgacagaatcaaggcgccaggatgggcactctgccctggatacaggctctaccctcctcccccaggacctgcctagtgccagtttggtagtccccctttctggccccttggagcccacacacgtttcatctttttcccctctgagagcaagaagagacatggcatgttctctgggaccctggaatcctaggtacccacatgtgtgccaaagcctaccccacctggcaggtgtcccacagcaacagaaggaatagtagtccccactctttccatcagccctaccctaccctcattccccgacaccctctggcttgaaccatggctgagcagtgccggcatacgctttgctggcatgcttggatgcccagctgtgtccagaggtggcctgggaccgccagttgcacgcctgccacctcagccagcccccgcccagctcatcagtctgaatggagttgccttaaattggcaggtggtaccgtactcactgcccttggagctgtgaccggctcctgcctgtccaccccttcccgaggtggctcctgcttaccttatcatcccagggctctgattagccaggcctggtcagggtcctggggacggcacccagatatgcagagtcaccctgacactggtgccaggctgacctcagctcccgaaggctcgcacagcctccccatccttccttcccagcccttgtggctctgtccacctgatcccaataccagcttcccccagcccctgccaccccagagggcggccacgacagggagaggtgtagatgccaccatctgagggagaggaacgtggaacaggagcaggctctgatgctgagaggcttgcctccgggggctggaagcctgggtggccggggcccctgaagaaggctcccctctgtatcccccaggtctcctcaacactgggctgatcctgaatggcacaggccaaggggaggccagcctcgcctttctacccaggccccctgccctgcccacctcaggcccccaccctccactcctccccacggtactgtgaacgtcgtgtgactcagtgcagagacagataatatatttaattcatgtacagaaagga

SEQ ID NO: 3732 - DNA, 342 bp, Homo sapiens
  source 1..342: mol_type = unassigned DNA; mol_type = unassigned DNA
cttcccctccccttctacctcctcctcggccagctcaggttgcagcttctctggggaactgctcacctttccggagcaggggaagctgccccgtgcccgggagggagcgggcgcaccgcggcccccaggacacgcgctacttgcagctcggtcctcttggcagagaccccccgcaggagtgcagcaccttctccccaacagacagcggggaggagccggggcagctctcccctggcgtgcagttccagcggcggcagaaccagcgccgcttctccatggaggtaagggcctctggagctctgccccggcaggtggcaggatgcacgcacaagggtgtgcaca

SEQ ID NO: 3733 - DNA, 794 bp, Homo sapiens
  source 1..794: mol_type = unassigned DNA; mol_type = unassigned DNA
ccagctcaggttgcagcttctctggggaactgctcacctttccggagcaggggaagctgccccgtgcccgggagggagcgggcgcaccgcggcccccaggacacgcgctgtgagtcccgcgggcggtgcgcctgggaggaagggggaggtcggaggagcgggcaccgcggcgccgggtataaggagcaaaggacccggctgcccagtccctcatgatcatgaacaagatgaagaactttaagcgccgtttctccctgtcagtgccccgcactgagaccattgaagaatccttggctgaattcacggagcaattcaaccagctccacaaccggcggaatgagagtgaggggtctgggcccacccagcacctctcccacctaccagacactccccagtcaccttcccctccccgcccaccccctccccactggccttaggggaggagcacagcgctgggggaggggggctacccttctctccctcaggacagagaggcagggaggggagctgacgcctgtccctcttagacttgcagctcggtcctcttggcagagaccccccgcaggagtgcagcaccttctccccaacagacagcggggaggagccggggcagctctcccctggcgtgcagttccagcggcggcagaaccagcgccgcttctccatggaggacgtcagcaagaggctctctctgcccatggatatccgcctgccccaggaattcctacagaagctacagatggagagcccagatctgcccaagccgctcagccgcatgtcccgccgggcctccc

SEQ ID NO: 3734 - DNA, 782 bp, Homo sapiens
  source 1..782: mol_type = unassigned DNA; mol_type = unassigned DNA
caggttgcagcttctctggggaactgctcacctttccggagcaggggaagctgccccgtgcccgggagggagcgggcgcaccgcggcccccaggacacgcgctacttgcagctcggtcctcttggcagagaccccccgcaggagtgcagcaccttctccccaacagacagcggggaggagccggggcagctctcccctggcgtgcagttccagcggcggcagaaccagcgccgcttctccatggaggacgtcagcaagaggctctctctgcccatggatatccgcctgccccaggaattcctacagaagctacagatggagagcccagatctgcccaagccgctcagccgcatgtcccgccgggcctccctgtcagacattggctttgggaaactggaaacatacgtgaaactggacaaactgggagagggcacctatgccacagtcttcaaagggcgcagcaaactgacggagaaccttgtggccctgaaagagatccggctggagcacgaggagggagcgccctgcactgccatccgagaggtgtctctgctgaagaacctgaagcacgccaatattgtgaccctgcatgacctcatccacacagatcggtccctcaccctggtgtttgagtacctggacagtgacctgaagcagtatctggaccactgtgggaacctcatgagcatgcacaacgtcaagattttcatgttccagctgctccggggcctcgcctactgtcaccaccgcaagatcctgcaccgggacctgaagccccagaa

SEQ ID NO: 3735 - DNA, 591 bp, Homo sapiens
  source 1..591: mol_type = unassigned DNA; mol_type = unassigned DNA
ttctctggggaactgctcacctttccggagcaggggaagctgccccgtgcccgggagggagcgggcgcaccgcggcccccaggacacgcgctgacccggctgcccagtccctcatgatcatgaacaagatgaagaactttaagcgccgtttctccctgtcagtgccccgcactgagaccattgaagaatccttggctgaattcacggagcaattcaaccagctccacaaccggcggaatgagaacagcggggaggagccggggcagctctcccctggcgtgcagttccagcggcggcagaaccagcgccgcttctccatggaggtaagggcctctggagctctgccccggcaggtggcaggatgcacgcacaagggtgtgcacaggagggcagctgccttacagccagactttgacgtcagcaagaggctctctctgcccatggatatccgcctgccccaggaattcctacagaagctacagatggagagcccagatctgcccaagccgctcagccgcatgtcccgccgggcctccctgtcagacattggctttgggaaactggaaacatacgtgaaactggacaaactgg

SEQ ID NO: 3736 - DNA, 435 bp, Homo sapiens
  source 1..435: mol_type = unassigned DNA; mol_type = unassigned DNA
ccgtgcccgggagggagcgggcgcaccgcggcccccaggacacgcgcttgccccgcactgagaccattgaagaatccttggctgaattcacggagcaattcaaccagctccacaaccggcggaatgagaagaccccccgcaggagtgcagcaccttctccccaacagacagcggggaggagccggggcagctctcccctggcgtgcagttccagcggcggcagaaccagcgccgcttctccatggaggtaagggcctctggagctctgccccggcaggtggcaggatgcacgcacaagggtgtgcacaggagggcagctgccttacagccagactttgacgtcagcaagaggctctctctgcccatggatatccgcctgccccaggaattcctacagaagctacagatggagagcccagatctgcccaagccgct

SEQ ID NO: 3737 - DNA, 949 bp, Homo sapiens
  source 1..949: mol_type = unassigned DNA; mol_type = unassigned DNA
tcccgcgggcggtgcgcctgggaggaagggggaggtcggaggagcgggcaccgcggcgccgggtataaggagcaaaggacccggctgcccagtccctcatgatcatgaacaagatgaagaactttaagcgccgtttctccctgtcagtgccccgcactgagaccattgaagaatccttggctgaattcacggagcaattcaaccagctccacaaccggcggaatgagaacttgcagctcggtcctcttggcagagaccccccgcaggagtgcagcaccttctccccaacagacagcggggaggagccggggcagctctcccctggcgtgcagttccagcggcggcagaaccagcgccgcttctccatggaggtaagggcctctggagctctgccccggcaggtggcaggatgcacgcacaagggtgtgcacaggagggcagctgccttacagccagactttgacgtcagcaagaggctctctctgcccatggatatccgcctgccccaggaattcctacagaagctacagatggagagcccagatctgcccaagccgctcagccgcatgtcccgccgggcctccctgtcagacattggctttgggaaactggaaacatacgtgaaactggacaaactgggagagggcacctatgccacagtcttcaaagggcgcagcaaactgacggagaaccttgtggccctgaaagagatccggctggagcacgaggagggagcgccctgcactgccatccgagaggtgtctctgctgaagaacctgaagcacgccaatattgtgaccctgcatgacctcatccacacagatcggtccctcaccctggtgtttgagtacctggacagtgacctgaagcagtatctggaccactgtgggaacctcatgagcatgcacaacgtcaagattttcatgttccagctgctccggggcctcgc

SEQ ID NO: 3738 - DNA, 351 bp, Homo sapiens
  source 1..351: mol_type = unassigned DNA; mol_type = unassigned DNA
gggaatcggggctttgttcaagaggaaggcaaagaggcttcttgaaggggtttgctgagagaagactccagtcctggccccaggagcttgagaagtgaagctgactttcccgccctccagtctacagcatcccagattcctgggatgctctgtcaacctccttctccacctccatggtctccaggtcaaggtctctcaggggtccagccccaaggcaggacccggctgcccagtccctcatgatcatgaacaagatgaagaactttaagcgccgtttctccctgtcagtgccccgcactgagaccattgaagaatccttggctgaattcacggagcaattcaaccagctcc

SEQ ID NO: 3739 - DNA, 3756 bp, Homo sapiens
  source 1..3756: mol_type = unassigned DNA; mol_type = unassigned DNA
ccttccactgctcctgacctcctgtatttcagctggagagaaggtgcagctggccagctctgatgcactcttcccttcctcctctttttcccctcttgcctcctggggcatgccagagcagagaccttcaggtgtcagtatcagaggtgaaatgaggtttggacccaatcatgtcccaagggtgttggccaagctgacattcagtttacgggccttggtcagtaagatttattggctgttgacacattcaggcccttggacacaagttggtaaatttctgctggtccaaggactgcctggttctggcaccctccctgccaccccagcccttcccccagaactctctagacctccagcagctaaagggcttaggtctggggggccttcaggatcctctttgcacatcatgcctgctattatgaccaatactttgctggactaggtggtccatagagaactgcacagggcgtggcggggcgggcggtgggcagtggaggcagtgctgagggtcactgggaggaagaaggtgactgggaagaagagggtgaacacccaccctcagaggggtcaaactttgcagaagacacaaccctggctcccagtgatggtggcatacagggcgacagagcttgatgagagagctgaattcccagtgggtggagacctggactggttgccttgttcttttcaactgctcttctcacacttcccatctcaggacccggctgcccagtccctcatgatcatgaacaagatgaagaactttaagcgccgtttctccctgtcagtgccccgcactgagaccattgaagaatccttggctgaattcacggagcaattcaaccagctccacaaccggcggaatgagagtgaggggtctgggcccacccagcacctctcccacctaccagacactccccagtcaccttcccctccccgcccaccccctccccactggccttaggggaggagcacagcgctgggggaggggggctacccttctctccctcaggacagagaggcagggaggggagctgacgcctgtccctcttagacttgcagctcggtcctcttggcagagaccccccgcaggagtgcagcaccttctccccaacagacagcggggaggagccggggcagctctcccctggcgtgcagttccagcggcggcagaaccagcgccgcttctccatggaggacgtcagcaagaggctctctctgcccatggatatccgcctgccccaggaattcctacagaagctacagatggagagcccagatctgcccaagccgctcagccgcatgtcccgccgggcctccctgtcagacattggctttgggaaactggaaacatacgtgaaactggacaaactgggagagggcacctatgccacagtcttcaaagggcgcagcaaactgacggagaaccttgtggccctgaaagagatccggctggagcacgaggagggagcgccctgcactgccatccgagaggtgtctctgctgaagaacctgaagcacgccaatattgtgaccctgcatgacctcatccacacagatcggtccctcaccctggtgtttgagtacctggacagtgacctgaagcagtatctggaccactgtgggaacctcatgagcatgcacaacgtcaagattttcatgttccagctgctccggggcctcgcctactgtcaccaccgcaagatcctgcaccgggacctgaagccccagaacctgctcatcaacgagaggggggagctgaagctggccgactttggactggccagggccaagtcagtgcccacaaagacttactccaatgaggtggtgaccctgtggtacaggccccccgatgtgctgctgggatccacagagtactccacccccattgatatgtggggcgtgggctgcatccactacgagatggccacagggaggcccctcttcccgggctccacagtcaaggaggagctgcacctcatctttcgcctcctcgggacccccacagaagagacgtggcccggcgtgaccgccttctctgagttccgcacctacagcttcccctgctacctcccgcagccgctcatcaaccacgcgcccaggttggatacggatggcatccacctcctgagcagcctgctcctgtatgaatccaagagtcgcatgtcagcagaggctgccctgagtcactcctacttccggtctctgggagagcgtgtgcaccagcttgaagacactgcctccatcttctccctgaaggagatccagctccagaaggacccaggctaccgaggcttggccttccagcagccaggacgagggaagaacaggcggcagagcatcttctgagccacgcccaccttgctgtggccaagggacaagagatcacatggagcacaaattcgggtaggatggagcctgtgtggccctcggaggactgaagaacgagggctgacagccagcctggaagaccgcttggcagcccttctggccacggctgtttcttctttgtgcttcccgtgtgcctccccagtagccctcacctgcataccaacccctcctttacccacgttggggctggcataagctgcttccctgagaggacatgaggggggggcggtcctcgtaccctctcccaccctggtgtttgggcacctgcgtgggatgcacacggatgacagaatcaaggcgccaggatgggcactctgccctggatacaggctctaccctcctcccccaggacctgcctagtgccagtttggtagtccccctttctggccccttggagcccacacacgtttcatctttttcccctctgagagcaagaagagacatggcatgttctctgggaccctggaatcctaggtacccacatgtgtgccaaagcctaccccacctggcaggtgtcccacagcaacagaaggaatagtagtccccactctttccatcagccctaccctaccctcattccccgacaccctctggcttgaaccatggctgagcagtgccggcatacgctttgctggcatgcttggatgcccagctgtgtccagaggtggcctgggaccgccagttgcacgcctgccacctcagccagcccccgcccagctcatcagtctgaatggagttgccttaaattggcaggtggtaccgtactcactgcccttggagctgtgaccggctcctgcctgtccaccccttcccgaggtggctcctgcttaccttatcatcccagggctctgattagccaggcctggtcagggtcctggggacggcacccagatatgcagagtcaccctgacactggtgccaggctgacctcagctcccgaaggctcgcacagcctccccatccttccttcccagcccttgtggctctgtccacctgatcccaataccagcttcccccagcccctgccaccccagagggcggccacgacagggagaggtgtagatgccaccatctgagggagaggaacgtggaacaggagcaggctctgatgctgagaggcttgcctccgggggctggaagcctgggtggccggggcccctgaagaaggctcccctctgtatcccccaggtctcctcaacactgggctgatcctgaatggcacaggccaaggggaggccagcctcgcctttctacccaggccccctgccctgcccacctcaggcccccaccctccactcctccccacggtactgtgaacgtcgtgtgactcagtgcagagacagataatatatttaattcatgtac

SEQ ID NO: 3740 - DNA, 954 bp, Homo sapiens
  source 1..954: mol_type = unassigned DNA; mol_type = unassigned DNA
gaggagccggggcagctctcccctggcgtgcagttccagcggcggcagaaccagcgccgcttctccatggaggacgtcagcaagaggctctctctgcccatggatatccgcctgccccaggaattcctacagaagctacagatggagagcccagatctgcccaagccgctcagccgcatgtcccgccgggcctccctgtcagacattggctttgggaaactggaaacatacgtgaaactggacaaactgggagagggcacctatgccacagtcttcaaagggcgcagcaaactgacggagaaccttgtggccctgaaagagatccggctggagcacgaggagggagcgccctgcactgccatccgagaggtgtctctgctgaagaacctgaagcacgccaatattgtgaccctgcatgacctcatccacacagatcggtccctcaccctggtgtttgagtacctggacagtgacctgaagcagtatctggaccactgtgggaacctcatgagcatgcacaacgtcaaggtgaggcctcgggggcagggtccccccatcttggcagccacctgtccagaagcccagtgtggggacccactctcaccaccagggatccggctgctgaggtggctcagaccttcccacgtaggaaagagggagagggcaatgccatcaacgagtccaggaactgggttgagcgctttaccccaagaacagacacacactgtctgccactgtctagctgttggtataaaacccactctcaactctgaacatcagtttcccagtctgtcaaatgggagtgtgagctacctgccaaaatgcagggaggcttctggggaagctcggggttatgaatgacctctcctggtgtttgttaaagaatcaaggctgggcatggtggcccacgcctgtaatcccagcactgggaggccaaggcaggaagatggcttg

SEQ ID NO: 3741 - DNA, 1509 bp, Homo sapiens
  source 1..1509: mol_type = unassigned DNA; mol_type = unassigned DNA
ccggggcagctctcccctggcgtgcagttccagcggcggcagaaccagcgccgcttctccatggaggacgtcagcaagaggctctctctgcccatggatatccgcctgccccaggaattcctacagaagctacagatggagagcccagatctgcccaagccgctcagccgcatgtcccgccgggcctccctgtcagacattggctttgggaaactggaaacatacgtgaaactggacaaactgggagagggcacctatgccacagtcttcaaagggcgcagcaaactgacggagaaccttgtggccctgaaagagatccggctggagcacgaggagggagcgccctgcactgccatccgagaggtgtctctgctgaagaacctgaagcacgccaatattgtgaccctgcatgacctcatccacacagatcggtccctcaccctggtgtttgagtacctggggtcagcgtggggcaggactgagccacgctctgtgttccaggacagtgacctgaagcagtatctggaccactgtgggaacctcatgagcatgcacaacgtcaagattttcatgttccagctgctccggggcctcgcctactgtcaccaccgcaagatcctgcaccgggacctgaagccccagaacctgctcatcaacgagaggggggagctgaagctggccgactttggactggccagggccaagtcagtgcccacaaagacttactccaatgaggtggtgaccctgtggtacaggccccccgatgtgctgctgggatccacagagtactccacccccattgatatgtggggcgtgggctgcatccactacgagatggccacagggaggcccctcttcccgggctccacagtcaaggaggagctgcacctcatctttcgcctcctcgggacccccacagaagagacgtggcccggcgtgaccgccttctctgagttccgcacctacagcttcccctgctacctcccgcagccgctcatcaaccacgcgcccaggttggatacggatggcatccacctcctgagcagcctgctcctggtgagtgtcctcccggcggggcccagggagaggcagccaaagagccaggtccctgtgccccatgccgggcctacgccccaacttctgtggctcgtgtgcttacacgtctttgaaacatctcccctgtactctccacccccaaggccaaggggtggcctccatacacatcctctggagtctgtgcactgcgagcccaaacccgttacttagctgtgtagctctgggcaagttacagagctcctccatgcctcagtttcctcagctgcaaagtgggattaatacctattttataagatggccgtgaggatacattgagatgacgggacacacttagtgtggtgcctgtcttgtaaggcacacgatgaagggttgttatcggcactacgcttcctgttacggatgttctccatctgatcatggttggtttgcatctgtatttctatcccaagagaa

SEQ ID NO: 3742 - DNA, 3190 bp, Homo sapiens
  source 1..3190: mol_type = unassigned DNA; mol_type = unassigned DNA
ttgaggctgcagtgagccatgatcacaccactgcactccagcctgggtgacagagtaaaaccctgactctaaaagaaaaaaaaaaaaaaaagggatcaagcacatatgtctccacataggcgggcatcctgacccccgtgctcctgactgagacttcgctggcctcccccacactcactgcgtcctctgcacccctgctgtcctcccctctggatgggattccctggtgtgggtggggtccaggatgggggctgcagggtgtgcaggagaatgaggggcttgtgctgacctcactgccaagcccctgcccccatcctggtcccagccttggagcagaggctcagggccaccttccaccccacatttctcttccccctcccccagattttcatgttccagctgctccggggcctcgcctactgtcaccaccgcaagatcctgcaccgggacctgaagccccagaacctgctcatcaacgagaggggggagctgaagctggccgactttggactggccagggccaagtcagtgcccacaaagacttactccaatgaggtggtgaccctgtggtacaggccccccgatgtgctgctgggatccacagagtactccacccccattgatatgtggggcgtgggctgcatccactacgagatggccacagggaggcccctcttcccgggctccacagtcaaggaggagctgcacctcatctttcgcctcctcgggacccccacagaagagacgtggcccggcgtgaccgccttctctgagttccgcacctacagcttcccctgctacctcccgcagccgctcatcaaccacgcgcccaggttggatacggatggcatccacctcctgagcagcctgctcctggtgagtgtcctcccggcggggcccagggagaggcagccaaagagccaggtccctgtgccccatgccgggcctacgccccaacttctgtggctcgtgtgcttacacgtctttgaaacatctcccctgtactctccacccccaaggccaaggggtggcctccatacacatcctctggagtctgtgcactgcgagcccaaacccgttacttagctgtgtagctctgggcaagttacagagctcctccatgcctcagtttcctcagctgcaaagtgggattaatacctattttataagatggccgtgaggatacattgagatgacgggacacacttagtgtggtgcctgtcttgtaaggcacacgatgaagggttgttatcggcactacgcttcctgttacggatgttctccatctgatcatggttggtttgcatctgtatttctatcccaagagaaggtcactctcctgaagtttcatttctggtttttcctggtggctggagaccgaggagccttcccctgagtcttgagatggcctgaggttgggtttgtggtaggggctggaggctgacctggggcttctcctgttagcctcaagcctcacccaccttggtgctctaaccagcactggagtcctgctgcccagagggtttgcagccccccagccgggcccaatagccccaccctgtgcctttcagtatgaatccaagagtcgcatgtcagcagaggctgccctgagtcactcctacttccggtctctgggagagcgtgtgcaccagcttgaagacactgcctccatcttctccctgaaggagatccagctccagaaggacccaggctaccgaggcttggccttccagcagccaggacgagggaagaacaggcggcagagcatcttctgagccacgcccaccttgctgtggccaagggacaagagatcacatggagcacaaattcgggtaggatggagcctgtgtggccctcggaggactgaagaacgagggctgacagccagcctggaagaccgcttggcagcccttctggccacggctgtttcttctttgtgcttcccgtgtgcctccccagtagccctcacctgcataccaacccctcctttacccacgttggggctggcataagctgcttccctgagaggacatgaggggggggcggtcctcgtaccctctcccaccctggtgtttgggcacctgcgtgggatgcacacggatgacagaatcaaggcgccaggatgggcactctgccctggatacaggctctaccctcctcccccaggacctgcctagtgccagtttggtagtccccctttctggccccttggagcccacacacgtttcatctttttcccctctgagagcaagaagagacatggcatgttctctgggaccctggaatcctaggtacccacatgtgtgccaaagcctaccccacctggcaggtgtcccacagcaacagaaggaatagtagtccccactctttccatcagccctaccctaccctcattccccgacaccctctggcttgaaccatggctgagcagtgccggcatacgctttgctggcatgcttggatgcccagctgtgtccagaggtggcctgggaccgccagttgcacgcctgccacctcagccagcccccgcccagctcatcagtctgaatggagttgccttaaattggcaggtggtaccgtactcactgcccttggagctgtgaccggctcctgcctgtccaccccttcccgaggtggctcctgcttaccttatcatcccagggctctgattagccaggcctggtcagggtcctggggacggcacccagatatgcagagtcaccctgacactggtgccaggctgacctcagctcccgaaggctcgcacagcctccccatccttccttcccagcccttgtggctctgtccacctgatcccaataccagcttcccccagcccctgccaccccagagggcggccacgacagggagaggtgtagatgccaccatctgagggagaggaacgtggaacaggagcaggctctgatgctgagaggcttgcctccgggggctggaagcctgggtggccggggcccctgaagaaggctcccctctgtatcccccaggtctcctcaacactgggctgatcctgaatggcacaggccaaggggaggccagcctcgcctttctacccaggccccctgccctgcccacctcaggcccccaccctccactcctccccacggtactgtgaacgtcgtgtgactcagtgcagagacagataatatatttaattcatgtacagaaagga

SEQ ID NO: 3743 - DNA, 543 bp, Homo sapiens
  source 1..543: mol_type = unassigned DNA; mol_type = unassigned DNA
actgtcaccaccgcaagatcctgcaccgggacctgaagccccagaacctgctcatcaacgagaggggggagctgaagctggccgactttggactggccagggccaagtcagtgcccacaaagacttactccaatgaggtggtgaccctgtggtacaggccccccgatgtgctgctgggatccacagagtactccacccccattgatatgtgtggggcacacagtggagagagtttgagacaacactgctgagagaattgccacatgggcgctggctgcacagacccaaacctcacagagtgaaaggggactttcctcacagagtgaaagtcgcagctttcccgagcccagggaagccccccagagaggggctgtagtgggggctgggcagttctaggagcctccactgccctgggccacccctccgccgccagagccacgatccctgcagccgcctgtggcaggtcgtcattggtgccctggtggagcagccctaggaagggcggccgcccctgcctgatgccgaccctaccccttgctcctc

SEQ ID NO: 3744 - DNA, 468 bp, Homo sapiens
  source 1..468: mol_type = unassigned DNA; mol_type = unassigned DNA
cagggccaagtcagtgcccacaaagacttactccaatgaggtggtgaccctgtggtacaggccccccgatgtgctgctgggatccacagagtactccacccccattgatatgtggggcgtgggctgcatccactacgagatggccacagggaggcccctcttcccgggctccacagtcaaggaggagctgcacctcatctttcgcctcctcgggacccccacagaagagacgtggcccggcgtgaccgccttctctgagttccgcacctacagcttcccctgctacctcccgcagccgctcatcaaccacgcgcccaggtagcccctgcgcccgccgcccctcctgctgcggccctggctctcccatccccaatcaggcacagcctgtgtccgcgccttctccttgcaggttggatacggatggcatccacctcctgagcagcctgctcctggtgagtgtcctcccgg

SEQ ID NO: 3745 - DNA, 556 bp, Homo sapiens
  source 1..556: mol_type = unassigned DNA; mol_type = unassigned DNA
ctgggatccacagagtactccacccccattgatatgtggggcgtgggctgcatccactacgagatggccacagggaggcccctcttcccgggctccacagtcaaggaggagctgcacctcatctttcgcctcctcggtcagtctcccgctgctccgtccctctcaccaccagggggcgccggaactcctccagcccaggcgcggagcgggacggggaggagcggctcggccgcctctctcccgggcggggaccccctgtggcctcggccatctttgctcccacctcatacattgcatccctttcaagtcggccttggccctgggcctcacgcaggccctccccaccctctctcgtctccccagggacccccacagaagagacgtggcccggcgtgaccgccttctctgagttccgcacctacagcttcccctgctacctcccgcagccgctcatcaaccacgcgcccaggtagcccctgcgcccgccgcccctcctgctgcggccctggctctcccatccccaatcaggcacagcctgtgtccgcgccttctcctt

SEQ ID NO: 3746 - DNA, 582 bp, Homo sapiens
  source 1..582: mol_type = unassigned DNA; mol_type = unassigned DNA
ctctctcccgggcggggaccccctgtggcctcggccatctttgctcccacctcatacattgcatccctttcaagtcggccttggccctgggcctcacgcaggccctccccaccctctctcgtctccccagggacccccacagaagagacgtggcccggcgtgaccgccttctctgagttccgcacctacagcttcccctgctacctcccgcagccgctcatcaaccacgcgcccaggttggatacggatggcatccacctcctgagcagcctgctcctgcactggagtcctgctgcccagagggtttgcagccccccagccgggcccaatagccccaccctgtgcctttcagtatgaatccaagagtcgcatgtcagcagaggctgccctgagtcactcctacttccggtctctgggagagcgtgtgcaccagcttgaagacactgcctccatcttctccctgaaggagatccagctccagaaggacccaggctaccgaggcttggccttccagcagccaggacgagggaagaacaggcggcagagcatcttctgagccacgcccaccttgctgtggccaag

SEQ ID NO: 3747 - DNA, 1040 bp, Homo sapiens
  source 1..1040: mol_type = unassigned DNA
ccgggcggggaccccctgtggcctcggccatctttgctcccacctcatacattgcatccctttcaagtcggccttggccctgggcctcacgcaggccctccccaccctctctcgtctccccagggacccccacagaagagacgtggcccggcgtgaccgccttctctgagttccgcacctacagcttcccctgctacctcccgcagccgctcatcaaccacgcgcccaggttggatacggatggcatccacctcctgagcagcctgctcctgtatgaatccaagagtcgcatgtcagcagaggctgccctgagtcactcctacttccggtctctgggagagcgtgtgcaccagcttgaagacactgcctccatcttctccctgaaggagatccagctccagaaggacccaggctaccgaggcttggccttccagcagccaggacgagggaagaacaggcggcagagcatcttctgagccacgcccaccttgctgtggccaagggacaagagatcacatggagcacaaattcgggtaggatggagcctgtgtggccctcggaggactgaagaacgagggctgacagccagcctggaagaccgcttggcagcccttctggccacggctgtttcttctttgtgcttcccgtgtgcctccccagtagccctcacctgcataccaacccctcctttacccacgttggggctggcataagctgcttccctgagaggacatgaggggggggcggtcctcgtaccctctcccaccctggtgtttgggcacctgcgtgggatgcacacggatgacagaatcaaggcgccaggatgggcactctgccctggatacaggctctaccctcctcccccaggacctgcctagtgccagtttggtagtccccctttctggccccttggagcccacacacgtttcatctttttcccctctgagagcaagaagagacatggcatgttctctgggaccctggaatcctaggtacccacatgtgtgccaaagcctaccccacctggcaggtgtcccaca

SEQ ID NO: 3748 - DNA, 541 bp, Homo sapiens
  source 1..541: mol_type = unassigned DNA
tggcctcggccatctttgctcccacctcatacattgcatccctttcaagtcggccttggccctgggcctcacgcaggccctccccaccctctctcgtctccccagggacccccacagaagagacgtggcccggcgtgaccgccttctctgagttccgcacctacagcttcccctgctacctcccgcagccgctcatcaaccacgcgcccaggttggatacggatggcatccacctcctgagcagcctgctcctgctgcctccatcttctccctgaaggagatccagctccagaaggacccaggctaccgaggcttggccttccagcagccaggacgagggaagaacaggcggcagagcatcttctgagccacgcccaccttgctgtggccaagggacaagagatcacatggagcacaaattcgggtaggatggagcctgtgtggccctcggaggactgaagaacgagggctgacagccagcctggaagaccgcttggcagcccttctggccacggctgtttcttctttgtgcttcccgtgt

SEQ ID NO: 3749 - DNA, 716 bp, Homo sapiens
  source 1..716: mol_type = unassigned DNA
cggtctctgggagagcgtgtgcaccagcttgaagacagtgagtactgggggtccgggagcagggccacccagaaccaaggaaaggggttggtgagtgtgggcagaagaaccagaacaaagaggccagaggccccagccccagcagagcagccccgggcaccttgcctcccctgctggggttctcattccaaattgagggggcaaacagtggaaatgagacgctgcctcgagggctcagttggtccttctgggccagtccttactggaggccagctccacgcagccctctccagactatgcacttctctcccccagctgcctccatcttctccctgaaggagatccagctccagaaggacccaggctaccgaggcttggccttccagcagccaggacgagggaagaacaggcggcagagcatcttctgagccacgcccaccttgctgtggccaagggacaagagatcacatggagcacaaattcgggtaggatggagcctgtgtggccctcggaggactgaagaacgagggctgacagccagcctggaagaccgcttggcagcccttctggccacggctgtttcttctttgtgcttcccgtgtgcctccccagtagccctcacctgcataccaacccctcctttacccacgttggggctggcataagctgcttccctgagaggacatgaggggggggcggtcctcgtaccctctccc

SEQ ID NO: 3750 - DNA, 2296 bp, Homo sapiens
  source 1..2296: mol_type = unassigned DNA
aacgcgggaagcaggggcggggcctctggtggcggtcgggaactcggtgggaggcggcaacattgtttcaagttggccaaattgacaagagcgagaggtatactgcgttccatcccgacccggggccacggtactgggccctgtttccccctcctcggcccccgagagccagggtccgccttctgcagggttcccaggcccccgctccagggccgggctgacccgactcgctggcgcttcatggagaacttccaaaaggtggaaaagatcggagagggcacgtacggagttgtgtacaaagccagaaacaagttgacgggagaggtggtggcgcttaagaaaatccgcctggacactgagactgagggtgtgcccagtactgccatccgagagatctctctgcttaaggagcttaaccatcctaatattgtcaagctgctggatgtcattcacacagaaaataaactctacctggtttttgaatttctgcaccaagatctcaagaaattcatggatgcctctgctctcactggcattcctcttcccctcatcaagagctatctgttccagctgctccagggcctagctttctgccattctcatcgggtcctccaccgagaccttaaacctcagaatctgcttattaacacagagggggccatcaagctagcagactttggactagccagagcttttggagtccctgttcgtacttacacccatgaggtggtgaccctgtggtaccgagctcctgaaatcctcctgggctgcaaatattattccacagctgtggacatctggagcctgggctgcatctttgctgagatggtgactcgccgggccctattccctggagattctgagattgaccagctcttccggatctttcggactctggggaccccagatgaggtggtgtggccaggagttacttctatgcctgattacaagccaagtttccccaagtgggcccggcaagattttagtaaagttgtacctcccctggatgaagatggacggagcttgttatcgcaaatgctgcactacgaccctaacaagcggatttcggccaaggcagccctggctcaccctttcttccaggatgtgaccaagccagtaccccatcttcgactctgatagccttcttgaagcccccagccctaatctcaccctctcctccagtgtgggcttgaccaggcttggccttgggctatttggactcaggtgggccctctgaacttgccttaaacactcaccttctagtcttggccagccaactctgggaatacaggggtgaaaggggggaaccagtgaaaatgaaaggaagtttcagtattagatgcacttaagttagcctccaccaccctttcccccttctcttagttattgctgaagagggttggtataaaaataattttaaaaaagccttcctacacgttagatttgccgtaccaatctctgaatgccccataattattatttccagtgtttgggatgaccaggatcccaagcctcctgctgccacaatgtttataaaggccaaatgatagcgggggctaagttggtgcttttgagaaccaagtaaaacaaaaccactgggaggagtctattttaaagaattcggttgaaaaaatagatccaatcagtttataccctagttagtgttttgcctcacctaataggctgggagactgaagactcagcccgggtggggctgcagaaaaatgattggccccagtccccttgtttgtcccttctacaggcatgaggaatctgggaggccctgagacagggattgtgcttcattccaatctattgcttcaccatggccttatgaggcaggtgagagatgtttgaatttttctcttccttttagtattcttagttgttcagttgccaaggatccctgatcccattttcctctgacgtccacctcctaccccataggagttagaagttagggtttaggcatcattttgagaatgctgacactttttcagggctgtgattgagtgagggcatgggtaaaaatatttctttaaaagaaggatgaacaattatatttatatttcaggttatatccaatagtagagttggctttttttttttttttttggtcatagtgggtggatttgttgccatgtgcaccttggggttttgtaatgacagtgctaaaaaaaaaaagcattttttttttatgatttgtctctgtcacccttgtccttgagtgctcttgctattaacgttatttgtaatttagtttgtagctcattaaaaaaatgtgcctagttttata

SEQ ID NO: 3751 - DNA, 609 bp, Homo sapiens
  source 1..609: mol_type = unassigned DNA
aggggcggggcctctggtggcggtcgggaactcggtgggaggcggcaacattgtttcaagttggccaaattgacaagagcgagaggtggaaaagatcggagagggcacgtacggagttgtgtacaaagccagaaacaagttgacgggagaggtggtggcgcttaagaaaatccgcctggacactgagactgagggtgtgcccagtactgccatccgagagatctctctgcttaaggagcttaaccatcctaatattgtcaagctgctggatgtcattcacacagaaaataaactctacctggtttttgaatttctgcaccaagatctcaagaaattcatggatgcctctgctctcactggcattcctcttcccctcatcaagagctatctgttccagctgctccagggcctagctttctgccattctcatcgggtcctccaccgagaccttaaacctcagaatctgcttattaacacagagggggccatcaagctagcagactttggactagccagagcttttggagtccctgttcgtacttacacccatgaggtgactcgccgggccctattccctggagattctgagattgaccagctcttccggat

SEQ ID NO: 3752 - DNA, 2598 bp, Homo sapiens
  source 1..2598: mol_type = unassigned DNA; mol_type = unassigned DNA
gcggtcgggaactcggtgggaggcggcaacattgtttcaagttggccaaattgacaagagcgagaggtatactgcgttccatcccgacccggggccacggtactgggccctgtttccccctcctcggcccccgagagccagggtccgccttctgcagggttcccaggcccccgctccagggccgggctgacccgactcgctggcgcttcatggagaacttccaaaaggtggaaaagatcggagagggcacgtacggagttgtgtacaaagccagaaacaagttgacgggagaggtggtggcgcttaagaaaatccgcctggacacgtgagtggcctctgtacccgggactcctaactggggacctccttgattgtcccccccaaccccccacgggcgggtagccgtccagggaccggaagagagcagggagggacttctttagaagtggagaggtgggttgggggccagtagaaggtgaagagtatacttatactccctggggagagtatagggtggtgtggaatccatggaaaactttcttcccaaactgagccggatcgtgcccccaaatgtgcgactacagactcggggagagaaaggaggtctctgagatgaggtccaagactctccatggagtggagttatgtgggaaccggcgagaatcgcctttctgaatgaagagccctcttcactgccccaccctcaccttagaattctctcctctttccaaagaatggcagttgaacctcactggcccctctggggaggctgggggctactcctgcattttttcccctccattacagtctccctgcttcaccttcaccaggcggctttacttacctacccctgggaaaagaggagataatggccttaatatatccaaaaaccacaccctgactacccaagaattagctcttaccatcaccctttctcttctctcactttcctagggggtgctgggtggtgtctccttgggggaaagaaatgactaggtgggggggaaaggaatatttgtaaccatattcccatctctgctttcccaacctctccaagtgagactgagggtgtgcccagtactgccatccgagagatctctctgcttaaggagcttaaccatcctaatattgtcaagctgctggatgtcattcacacagaaaataaactctacctggtttttgaatttctgcaccaagatctcaagaaattcatggatgcctctgctctcactggcattcctcttcccctcatcaagagctatctgttccagctgctccagggcctagctttctgccattctcatcgggtcctccaccgagaccttaaacctcagaatctgcttattaacacagagggggccatcaagctagcagactttggactagccagagcttttggagtccctgttcgtacttacacccatgaggtggtgaccctgtggtaccgagctcctgaaatcctcctgggctgcaaatattattccacagctgtggacatctggagcctgggctgcatctttgctgagatggtgactcgccgggccctattccctggagattctgagattgaccagctcttccggatctttcggactctggggaccccagatgaggtggtgtggccaggagttacttctatgcctgattacaagccaagtttccccaagtgggcccggcaagattttagtaaagttgtacctcccctggatgaagatggacggagcttgttatcgcaaatgctgcactacgaccctaacaagcggatttcggccaaggcagccctggctcaccctttcttccaggatgtgaccaagccagtaccccatcttcgactctgatagccttcttgaagcccccagccctaatctcaccctctcctccagtgtgggcttgaccaggcttggccttgggctatttggactcaggtgggccctctgaacttgccttaaacactcaccttctagtcttggccagccaactctgggaatacaggggtgaaaggggggaaccagtgaaaatgaaaggaagtttcagtattagatgcacttaagttagcctccaccaccctttcccccttctcttagttattgctgaagagggttggtataaaaataattttaaaaaagccttcctacacgttagatttgccgtaccaatctctgaatgccccataattattatttccagtgtttgggatgaccaggatcccaagcctcctgctgccacaatgtttataaaggccaaatgatagcgggggctaagttggtgcttttgagaaccaagtaaaacaaaaccactgggaggagtctattttaaagaattcggttgaaaaaatagatccaatcagtttataccctagttagtgttttgcctcacctaataggctgggagactgaagactcagcccgggtggggctgcagaaaaatgattggccccagtccccttgtttgtcccttctacaggcatgaggaatctgggaggccctgagacagggattgtgcttcattccaatctattgcttcaccatggccttatgaggcaggtgagagatgtttgaatttttctcttccttttagtattcttagttgttcagttgc

SEQ ID NO: 3753 - DNA, 1725 bp, Homo sapiens
  source 1..1725: mol_type = unassigned DNA; mol_type = unassigned DNA
ggcggcaacattgtttcaagttggccaaattgacaagagcgagaggtatactgcgttccatcccgacccggggccacggtactgggccctgtttccccctcctcggcccccgagagccagggtccgccttctgcagggttcccaggcccccgctccagggccgggctgacccgactcgctggcgcttcatggagaacttccaaaaggtggaaaagatcggagagggcacgtacggagttgtgtacaaagccagaaacaagttgacgggagaggtggtggcgcttaagaaaatccgcctggacactgagactgagggtgtgcccagtactgccatccgagagatctctctgcttaaggagcttaaccatcctaatattgtcaagctgctggatgtcattcacacagaaaataaactctacctggtttttgaatttctgcaccaagatctcaagaaattcatggatgcctctgctctcactggcattcctcttcccctcatcaagagctatctgttccagctgctccagggcctagctttctgccattctcatcgggtcctccaccgagaccttaaacctcagaatctgcttattaacacagagggggccatcaagctagcagactttggactagccagagcttttggagtccctgttcgtacttacacccatgaggtggtgaccctgtggtaccgagctcctgaaatcctcctgggctgcaaatattattccacagctgtggacatctggagcctgggctgcatctttgctgagatgcacctagtgggtacccagcaccatgctaggtgctgtggggaacacagaagaaatggaagacagagtctctgcccgctgtgctcgtatctagaagtggctgcatcacaaggttgggggatgaccgcagtgtctaccccctaccccgtgactcgccgggccctattccctggagattctgagattgaccagctcttccggatctttcggactctggggaccccagatgaggtggtgtggccaggagttacttctatgcctgattacaagccaagtttccccaagtgggcccggcaagattttagtaaagttgtacctcccctggatgaagatggacggagcttgttatcgcaaatgctgcactacgaccctaacaagcggatttcggccaaggcagccctggctcaccctttcttccaggatgtgaccaagccagtaccccatcttcgactctgatagccttcttgaagcccccagccctaatctcaccctctcctccagtgtgggcttgaccaggcttggccttgggctatttggactcaggtgggccctctgaacttgccttaaacactcaccttctagtcttggccagccaactctgggaatacaggggtgaaaggggggaaccagtgaaaatgaaaggaagtttcagtattagatgcacttaagttagcctccaccaccctttcccccttctcttagttattgctgaagagggttggtataaaaataattttaaaaaagccttcctacacgttagatttgccgtaccaatctctgaatgccccataattattatttccagtgtttgggatgaccaggatcccaagcctcctgctgccacaatgtttataaaggccaaatgatagcgggggctaagttggtgcttttgagaaccaagtaaaacaaaaccactgggaggagtctattttaaagaattcggttgaaaaaa

SEQ ID NO: 3754 - DNA, 1031 bp, Homo sapiens
  source 1..1031: mol_type = unassigned DNA; mol_type = unassigned DNA
attgtttcaagttggccaaattgacaagagcgagaggtatactgcgttccatcccgacccggggccacggtactgggccctgtttccccctcctcggcccccgagagccagggtccgccttctgcagggttcccaggcccccgctccagggccgggctgacccgactcgctggcgcttcatggagaacttccaaaaggtggaaaagatcggagagggcacgtacggagttgtgtacaaagccagaaacaagttgacgggagaggtggtggcgcttaagaaaatccgcctggacacgctgctggatgtcattcacacagaaaataaactctacctggtttttgaatttctgcaccaagatctcaagaaattcatggatgcctctgctctcactggcattcctcttcccctcatcaagagctatctgttccagctgctccagggcctagctttctgccattctcatcgggtcctccaccgagaccttaaacctcagaatctgcttattaacacagagggggccatcaagctagcagactttggactagccagagcttttggagtccctgttcgtacttacacccatgaggtgactcgccgggccctattccctggagattctgagattgaccagctcttccggatctttcggactctggggaccccagatgaggtggtgtggccaggagttacttctatgcctgattacaagccaagtttccccaagtgggcccggcaagattttagtaaagttgtacctcccctggatgaagatggacggagcttgttatcgcaaatgctgcactacgaccctaacaagcggatttcggccaaggcagccctggctcaccctttcttccaggatgtgaccaagccagtaccccatcttcgactctgatagccttcttgaagcccccagccctaatctcaccctctcctccagtgtgggcttgaccaggcttggccttgggctatttggactcaggtgggccctctgaacttgccttaaacactcaccttctagtcttggcca

SEQ ID NO: 3755 - DNA, 1367 bp, Homo sapiens
  source 1..1367: mol_type = unassigned DNA; mol_type = unassigned DNA
ttgtttcaagttggccaaattgacaagagcgagaggtatactgcgttccatcccgacccggggccacggtactgggccctgtttccccctcctcggcccccgagagccagggtccgccttctgcagggttcccaggcccccgctccagggccgggctgacccgactcgctggcgcttcatggagaacttccaaaaggtggaaaagatcggagagggcacgtacggagttgtgtacaaagccagaaacaagttgacgggagaggtggtggcgcttaagaaaatccgcctggacacgtgagtggcctctgtacccgggactcctaactggggacctccttgattgtcccccccaaccccccacgggcgggtagccgtccagggaccggaagagagcagggagggacttctttagaagtggagaggtgggttgggggccagtagaaggtgaagagtatacttatactccctggggagagtatagggtggtgtggaatccatggaaaactttcttcccaaactgagccggatcgtgcccccaaatgtgcgactacagactcggggagagaaaggaggtctctgagatgaggtccaagactctccatggagtggagttatgtgggaaccggcgagaatcgcctttctgaatgaagagccctcttcactgccccaccctcaccttagaattctctcctctttccaaagaatggcagttgaacctcactggcccctctggggaggctgggggctactcctgcattttttcccctccattacagtctccctgcttcaccttcaccaggcggctttacttacctacccctgggaaaagaggagataatggccttaatatatccaaaaaccacaccctgactacccaagaattagctcttaccatcaccctttctcttctctcactttcctagggggtgctgggtggtgtctccttgggggaaagaaatgactaggtgggggggaaaggaatatttgtaaccatattcccatctctgctttcccaacctctccaagtgagactgagggtgtgcccagtactgccatccgagagatctctctgcttaaggagcttaaccatcctaatattgtcaagctgctggatgtcattcacacagaaaataaactctacctggtttttgaatttctgcaccaagatctcaagaaattcatggatgcctctgctctcactggcattcctcttcccctcatcaaggtaatgcttctcatcagctcctctcatcatgggcatgtcttgggggactggtggcaggcaattcagggtgatattttatgattttggcctccttctgagccctcatctcctatacacacacactccccttctttttgtgtct

SEQ ID NO: 3756 - DNA, 1260 bp, Homo sapiens
  source 1..1260: mol_type = unassigned DNA; mol_type = unassigned DNA
ttgtttcaagttggccaaattgacaagagcgagaggtatactgcgttccatcccgacccggggccacggtactgggccctgtttccccctcctcggcccccgagagccagggtccgccttctgcagggttcccaggcccccgctccagggccgggctgacccgactcgctggcgcttcatggagaacttccaaaaggtggaaaagatcggagagggcacgtacggagttgtgtacaaagccagaaacaagttgacgggagaggtggtggcgcttaagaaaatccgcctggacactgagactgagggtgtgcccagtactgccatccgagagatctctctgcttaaggagcttaaccatcctaatattgtcaagctgctggatgtcattcacacagaaaataaactctacctggtttttgaatttctgcaccaagatctcaagaaattcatggatgcctctgctctcactggcattcctcttcccctcatcaagagctatctgttccagctgctccagggcctagctttctgccattctcatcgggtcctccaccgagaccttaaacctcagaatctgcttattaacacagagggggccatcaagctagcagactttggactagccagagcttttggagtccctgttcgtacttacacccatgaggtgactcgccgggccctattccctggagattctgagattgaccagctcttccggatctttcggactctggggaccccagatgaggtggtgtggccaggagttacttctatgcctgattacaagccaagtttccccaagtgggcccggcaagattttagtaaagttgtacctcccctggatgaagatggacggagcttgttatcgcaaatgctgcactacgaccctaacaagcggatttcggccaaggcagccctggctcaccctttcttccaggatgtgaccaagccagtaccccatcttcgactctgatagccttcttgaagcccccagccctaatctcaccctctcctccagtgtgggcttgaccaggcttggccttgggctatttggactcaggtgggccctctgaacttgccttaaacactcaccttctagtcttggccagccaactctgggaatacaggggtgaaaggggggaaccagtgaaaatgaaaggaagtttcagtattagatgcacttaagttagcctccaccaccctttcccccttctcttagttattgctgaagagggttggtataaaaataattttaaaaaa

SEQ ID NO: 3757 - DNA, 1802 bp, Homo sapiens
  source 1..1802: mol_type = unassigned DNA; mol_type = unassigned DNA
tttcaagttggccaaattgacaagagcgagaggtatactgcgttccatcccgacccggggccacggtactgggccctgtttccccctcctcggcccccgagagccagggtccgccttctgcagggttcccaggcccccgctccagggccgggctgacccgactcgctggcgcttcatggagaacttccaaaaggtggaaaagatcggagagggcacgtacggagttgtgtacaaagccagaaacaagttgacgggagaggtggtggcgcttaagaaaatccgcctggacacgtgagtggcctctgtacccgggactcctaactggggacctccttgattgtcccccccaaccccccacgggcgggtagccgtccagggaccggaagagagcagggagggacttctttagaagtggagaggtgggttgggggccagtagaaggtgaagagtatacttatactccctggggagagtatagggtggtgtggaatccatggaaaactttcttcccaaactgagccggatcgtgcccccaaatgtgcgactacagactcggggagagaaaggaggtctctgagatgaggtccaagactctccatggagtggagttatgtgggaaccggcgagaatcgcctttctgaatgaagagccctcttcactgccccaccctcaccttagaattctctcctctttccaaagaatggcagttgaacctcactggcccctctggggaggctgggggctactcctgcattttttcccctccattacagtctccctgcttcaccttcaccaggcggctttacttacctacccctgggaaaagaggagataatggccttaatatatccaaaaaccacaccctgactacccaagaattagctcttaccatcaccctttctcttctctcactttcctagggggtgctgggtggtgtctccttgggggaaagaaatgactaggtgggggggaaaggaatatttgtaaccatattcccatctctgctttcccaacctctccaagtgagactgagggtgtgcccagtactgccatccgagagatctctctgcttaaggagcttaaccatcctaatattgtcaagctgctggatgtcattcacacagaaaataaactctacctggtttttgaatttctgcaccaagatctcaagaaattcatggatgcctctgctctcactggcattcctcttcccctcatcaagagctatctgttccagctgctccagggcctagctttctgccattctcatcgggtcctccaccgagaccttaaacctcagaatctgcttattaacacagagggggccatcaagctagcagactttggactagccagagcttttggagtccctgttcgtacttacacccatgaggtggtgaccctgtggtaccgagctcctgaaatcctcctgggctgcaaatattattccacagctgtggacatctggagcctgggctgcatctttgctgagatggtatggaggcttgcccaagttccacccagccccctccctctcctccccacatccaagaacaacagaactgcttcttggcccagacctatggcccttctatcacagggttctctctctaaagtagcaccaaggggaatggtgggaaaggatgcaactgttgccctgatatcaaccacagtgttaggatatcctcaaacagccttagtacctggtatacatctcttatccctgaaataagttaaagcatttctgcagctgttttagctgtagtctgcatatatttgggagaatgattccatttagtgcc

SEQ ID NO: 3758 - DNA, 665 bp, Homo sapiens
  source 1..665: mol_type = unassigned DNA; mol_type = unassigned DNA
gagtatacttatactccctggggagagtatagggtggtgtggaatccatggaaaactttcttcccaaactgagccggatcgtgcccccaaatgtgcgactacagactcggggagagaaaggaggtctctgagatgagtgagactgagggtgtgcccagtactgccatccgagagatctctctgcttaaggagcttaaccatcctaatattgtcaagctgctggatgtcattcacacagaaaataaactctacctggtttttgaatttctgcaccaagatctcaagaaattcatggatgcctctgctctcactggcattcctcttcccctcatcaagagctatctgttccagctgctccagggcctagctttctgccattctcatcgggtcctccaccgagaccttaaacctcagaatctgcttattaacacagagggggccatcaagctagcagactttggactagccagagcttttggagtccctgttcgtacttacacccatgaggtggtgaccctgtggtaccgagctcctgaaatcctcctgggctgcaaatattattccacagctgtggacatctggagcctgggctgcatctttgctgagatggtgactcgccgggccctattccctggagattctgagattgaccagctcttccggat

SEQ ID NO: 3759 - DNA, 1136 bp, Homo sapiens
  source 1..1136: mol_type = unassigned DNA; mol_type = unassigned DNA
gaatccatggaaaactttcttcccaaactgagccggatcgtgcccccaaatgtgcgactacagactcggggagagaaaggagtgagactgagggtgtgcccagtactgccatccgagagatctctctgcttaaggagcttaaccatcctaatattgtcaagctgctggatgtcattcacacagaaaataaactctacctggtttttgaatttctgcaccaagatctcaagaaattcatggatgcctctgctctcactggcattcctcttcccctcatcaagagctatctgttccagctgctccagggcctagctttctgccattctcatcgggtcctccaccgagaccttaaacctcagaatctgcttattaacacagagggggccatcaagctagcagactttggactagccagagcttttggagtccctgttcgtacttacacccatgaggtggtgaccctgtggtaccgagctcctgaaatcctcctgggctgcaaatattattccacagctgtggacatctggagcctgggctgcatctttgctgagatggtgactcgccgggccctattccctggagattctgagattgaccagctcttccggatctttcggactctggggaccccagatgaggtggtgtggccaggagttacttctatgcctgattacaagccaagtttccccaagtgggcccggcaagattttagtaaagttgtacctcccctggatgaagatggacggagcttgttatcggtgagagtgggcacctgttttccctcattcatttctcccagggaagggcttttccaggatgaaggaaggatgagaccctgaaatctgggcctcagtgtttcatttccctggttcctgctctccctgttggcacactgattcagctatgggaggatggaagtgagaattctgccttgggtagaaggagttctggtttcctgatttctgggaacacctgctgcccatttagtccactatcacatcattgaagtcaacatgcatctctccctctagcaaatgctgcactacgaccctaacaagcggatttcggccaaggcagccctggctcaccctttcttccaggatgtgaccaagccagtaccccatcttcgactctga

SEQ ID NO: 3760 - DNA, 911 bp, Homo sapiens
  source 1..911: mol_type = unassigned DNA; mol_type = unassigned DNA
atcgcctttctgaatgaagagccctcttcactgccccaccctcaccttagaattctctcctctttccaaagaatggcagttgaacctcactggcccctctggggaggctgggggctactcctgcattttttcccctccattacagtctccctgcttcaccttcaccaggcggctttacttacctacccctgggaaaagaggagataatggccttaatatatccaaaaaccacaccctgactacccaagaattagctcttaccatcaccctttctcttctctcactttcctagggggtgctgggtggtgtctccttgggggaaagaaatgactaggtgggggggaaaggaatatttgtaaccatattcccatctctgctttcccaacctctccaagtgagactgagggtgtgcccagtactgccatccgagagatctctctgcttaaggagcttaaccatcctaatattgtcaagctgctggatgtcattcacacagaaaataaactctacctggtttttgaatttctgcaccaagatctcaagaaattcatggatgcctctgctctcactggcattcctcttcccctcatcaagagctatctgttccagctgctccagggcctagctttctgccattctcatcgggtcctccaccgagaccttaaacctcagaatctgcttattaacacagagggggccatcaagctagcagactttggactagccagagcttttggagtccctgttcgtacttacacccatgaggtggtgaccctgtggtaccgagctcctgaaatcctcctgggctgcaaatattattccacagctgtggacatctggagcctgggctgcatctttgctgagatggtgactcgccgggccctattccctggagattctgagattgacca

SEQ ID NO: 3761 - DNA, 445 bp, Homo sapiens
  source 1..445: mol_type = unassigned DNA; mol_type = unassigned DNA
cagatgaggtggtgtggccaggagttacttctatgcctgattacaagccaagtttccccaagtgggcccggcaagattttagtaaagttgtacctcccctggatgaagatggacggagcttgttatcgcaaatgctgcactacgaccctaacaagcggatttcggccaaggcagccctggctcaccctttcttccaggatgtgaccaagccagtaccccatcttcgactctgatagccttcttgaagcccccagccctaatctcaccctctcctccagtgtgggcttgaccaggcttggccttgggctatttggactcaggtgggccctctgaacttgccttaaacactcaccttctagtcttggccagccaactctgggaatacaggggtgaaaggggggaaccagtgaaaatgaaaggaagtttcagtattagatgcacttaa

SEQ ID NO: 3762 - DNA, 2508 bp, Homo sapiens
  source 1..2508: mol_type = unassigned DNA; mol_type = unassigned DNA
agctcaggattagagcagcggagccgcctagcagccaccttcccccgccagtccgcgcgcccgggccggggctaggccccccaccgccgggtcccccggggctgcagtagcagcggcgccgcccgcggctcccgctggggcctgggcgccggccccgctctgcaggatgggcacagtgctgtctctttcgcctgcctcctcggccaagggccggaggcccggcgggctgcccgaggagaagaagaaggcgccgcccgcgggggacgaggcgctggggggctacggggcgccgccagtgggcaagggcggcaaaggcgagagccgactcaagcggccgtccgtgctcatctcggcgctcacctggaagcgcctggtggccgcgtccgccaagaagaagaaaggcagcaagaaggtgacacccaagccggcatccacgggccccgaccccctggtccagcaacgcaaccgcgagaaccttctccgcaagggccgggatccccccgacggcggcggcaccgccaagcccctggcggtgccagtgcccaccgtgcccgcggctgccgccacctgcgagccaccgtcggggggcagcgcggccgctcagccgccgggctcgggcgggggaaagcctccgccgccgcctcccccagccccgcaggtggcgccgccggtgcctggcggctcgccgcggcgggtcatcgtgcaggcgtccaccggcgagctgctgcgctgtctgggcgacttcgtgtgccgacgctgctatcgcctcaaggagctgagcccgggcgagctggtgggctggttccgcggtgtggaccgctcgctgctgctgcagggctggcaagaccaggccttcattacgcctgcaaacctggtgttcgtgtacctgctgtgccgcgagtcgctgcgtggggacgagctggcgtcggccgccgagctgcaggccgccttcctcacctgcctctacctcgcctactcctacatgggcaacgagatctcctacccactcaagcccttcctcgtggagcccgacaaggagcgcttctggcagcgctgcctgcgcctcatccagcggctcagcccgcagatgctgcggctcaacgccgacccccacttcttcacgcaggtctttcaagacctcaagaacgagggcgaggccgccgccagcggcgggggcccaccgagcgggggcgcgcccgccgcctcctcggccgccagggacagctgcgcggccggaaccaagcactggactatgaacctggaccgctagggatacccaggggccgcgcccatcccccgccccagcccctgacacacactcggaccccccgggaccacaaagccaccgccgctgttaccgccgctcagcgccccggctgggcggaggaggagacgcccatgcccctcaggggaaagtggagaccgggacaccagaggccgcggtgtttggatttgctgggcgtggagtggggacggaagatgagcgcgggaaaggcactccaacctcactcttcccgtctgtctgcgcccccatttctccatttctgccggggtctcccccttcccttcagcccattccccctcggttttatccatttccttgcctcctttttgtgtcttcatttttcctcctgtctgcattcctctctctctctctccctctctctcctgttcctctctttcttcctccctctccctgcctttccattttccgttccttgggtttgtgtgtctgcatctccatcttaccccttgcctgactgtaccccgtagacccctgtttctcctcctgcacctgtgtccccatctgcccttcttgttgctcctgtcatgtgtcaccatcttccctcctgtctgccttcttcctccacttgtgtcagcttgcatttttttattcctgactgagtcaccacacccctctcccctgatcaaagggaatattagtttttaatttggatcgactgaggtgccaggagaaactgcagtcccaggtatccagacagccaccaggatggtccctcgccccacccccaccgcctctccccaccttttccaacgtgttgcatgctgggagctggggggtgtgggggaaggggctgccggcttctttcaggaggctgaggtttggaggcaaaatcaacctgggagaccaccccggccgcggcgcctcagtggacaggtgggaggaaaagaaaacttcttaccttggaggagggacatcccgcttccttatccttagcttttttgttgctcctccccactgccccttttaatttatttggttgtttgcggagggaggggggaggggggtaggctgggccgggaactgtccgaggtgctgagctggggcgggaccggaatcctcccggtagggtaccagggactgagttgggcctggggccgtgtccaaggtgccaatgatgcgggccgacagagcgggccgcactgtctgtctgtccgtctgtcccggaaagaactataaagcgctggaagcgcctgcagatggtt

SEQ ID NO: 3763 - DNA, 6228 bp, Homo sapiens
  source 1..6228: mol_type = unassigned DNA; mol_type = unassigned DNA
ggaagaagcgccgggaaagatggcggcgtctgtggtttgaattccagcggcgccgccagagtctgaacaagagctggggtggagggggcggggacctggggagcccggcgggtcgctatcgcggggggtactagtggcgccgccgccacagacaccaacgctgtcgccacctctgtagccatgatggacttggtgttggaagaggacgtcaccgtccctgggacgctcagcggctgcagtggccttgttcccagtgtaccagatgacctggatggcatcaaccccaatgctgggttgggaaatggtctgctcccaaatgtgtcagaagaaacagtgtctcccaccagagcacggaacatgaaggactttgaaaatcaaatcactgaattgaagaaagaaaactttaacctaaagctccgcatctatttccttgaggaaagaatgcaacaggaatttcatggccccactgaacatatctacaaaactaacattgagctcaaggtggaagtagaaagtctgaagcgggaactccaggagagagagcagctgctcatcaaagcctccaaagcagttgagagcttagctgaagcaggtggctctgaaatccagcgggtgaaagaagatgctcgaaagaaggtgcagcaggtggaagatctcctaactaaaagaatactccttttggaaaaggatgtgacagccgcccaggcagaactggaaaaggcctttgcagggacagagacggagaaggctcttcggttgcgtttggaaagcaagctttcagagatgaagaagatgcacgagggggacttggcgatggctctggtcctggatgagaaagacagactgattgaggagttgaagctgtctttgaagagcaaagaagctttaattcagtgccttaaagaggagaaatctcagatggcatgtcctgatgagaatgtgtcatctggagagctccgaggactttgtgctgctccaagggaagaaaaggagagagaaactgaggctgcacaaatggagcatcagaaggagagaaacagctttgaagagaggatccaggcacttgaagaggacctgagagagaaggaaagagaaattgctacagagaagaaaaatagtctaaagagggataaagccattcagggtttaaccatggcattaaaatcaaaggaaaaaaaggttgaagaacttaactctgaaattgaaaagctcagtgctgcctttgctaaagccagagaggccctacagaaagcacagacccaggaatttcaggggtctgaagactatgagactgctctatcaggaaaggaagccctttcggctgcgctgcgctcacaaaacctcaccaagagtacagagaaccacagactgcgtagaagcattaagaagatcacccaggagctgagtgacttgcagcaggagagggagagactggagaaggacctggaggaagcccatcgagagaagagcaaaggagactgcaccatccgtgatcttagaaatgaagttgaaaaattacgcaatgaagtgaatgaaagagagaaagcaatggaaaatcgttacaagagtcttctgagtgaaagcaataaaaaattgcacaatcaagagcaagtgatcaaacatctaacagaaagtaccaatcagaaggacgtgttgcttcagaaattcaatgaaaaagatttggaagtaatacagcagaactgctatttaatggctgcagaggatcttgagctcaggagtgaaggcttaataacagaaaagtgctcttctcaacagccaccaggcagcaaaaccatcttctctaaggaaaagaaacaatcatcagactatgaagagctgattcaggtcttaaagaaagagcaggacatctatacccatctggtcaaatctctgcaggaatcagacagtatcaacaacctgcaggctgagttaaacaagatttttgccctgcggaagcaactggagcaggatgtgctttcatatcagaatttgcggaagaccttggaggagcagatcagcgaaattcggaggcgggaagaagaatcattttcactttatagtgatcaaacatcttatctaagtatttgccttgaagaaaacaatcggtttcaagtggaacatttttctcaagaagaacttaagaaaaaggtcagtgaccttatacagctagtgaaggagctgtatacagacaaccagcacctgaagaaaaccatttttgatctctcctgcatgggtttccagggaaatgggtttccagatagacttgcgtctacagaacaaacagagcttctggctagcaaggaggacgaggacacgatcaaaattggggaggatgacgagattaatttcctgagtgaccagcatttgcagcagagtaatgagattatgaaagacctttccaaaggaggctgcaaaaatggatacttaaggcacacggagtctaagatttcagattgtgatggggcccacgcacctggctgcctagaagaaggtgcattcataaacctgcttgcccctttgttcaatgagaaggccacattattactggaatccaggccagaccttctgaaagtggtacgggaactgcttctgggacaactattcttgacagagcaggaagtttctggagaacaccttgatggtaaaactgagaagacacctaagcaaaaaggtgaacttgtacattttgtccaaaccaactcattttccaagccacatgatgaactgaagttgtcttgtgaggcccagctagtaaaggcaggcgaagtgcccaaggtaggactgaaagatgcctcagtgcagactgtggccacggagggcgacctgctgagattcaagcatgaagcaacaagagaggcttgggaagagaaaccgatcaacactgcactcagcgcagagcatcggccagagaacctgcacggggtgcctgggtggcaggctgccctcctttccctccctggtattaccaacagagaggctaagaagtcccgcttgccaatcctaataaaaccatcccggtcattaggaaatatgtatcgtctccctgccacccaggaggtggtgacgcagctgcagagccagatcttggagctgcagggggagctgaaggagtttaaaacttgtaataagcaacttcaccaaaagttaattctggctgaagcagtgatggaggggaggccaacgcccgacaaaacgttgctgaatgctcagccccctgtgggagcagcctaccaggacagcccaggagagcagaaaggaattaaaaccacatcttctgtctggagagacaaggaaatggacagtgatcagcaaagaagctacgagattgactctgagatttgcccacctgatgaccttgccagcttgccatcatgcaaagaaaatcctgaagatgttctgagcccaacttcagtagctacttacctgagttccaagagtcagccttctgctaaagtcagtgtgatggggactgatcagtcagagagcattaatacctcaaatgagacagaatacttaaaacagaaaatccatgacttggaaactgagctggaaggctaccagaatttcatatttcagcttcaaaagcactcccagtgcagtgaggccataattacagttttgtgtgggacagaaggggcccaggatggcttgagcaagcccaagaatggttctgatggggaagaaatgaccttttcaagtttgcaccaagtgcgatacgtgaaacacgtgaaaatcctcggtccgctggccccagagatgattgacagcagggtgctggagaacctcaaacagcagctggaggaacaggaatacaagctgcagaaggagcagaatttgaacatgcaacttttcagtgagatccataatctgcagaataagttcagagatctctcacctcccagatacgattcattagttcagtcccaagccagggagctctcccttcaacggcagcagattaaggatggccatggcatctgtgtcatctcccgtcaacacatgaacaccatgattaaggcatttgaggagttgctgcaggccagtgatgtggattactgtgtggccgagggtttccaggaacagctgaatcaatgtgctgagctgctggagaaattggaaaagctatttctcaacggaaaatcagttggagtggaaatgaacacccagaatgaactgatggagaggattgaggaagacaacttaacctaccaacatcttctgcctgaatctcctgagccttcagcctctcatgcgctctctgattatgaaacatctgaaaagtccttcttctcacgagaccagaagcaagataatgagacagagaagacttcagttatggtgaacagtttttctcaagacttactaatggaacacatacaggaaattcgaactttgagaaagcgtttagaagaatctattaaaacaaatgagaagctacggaaacagttggaacggcaaggatctgaatttgttcaaggttctacaagcatttttgcttctggttcagagcttcatagttctctaacatcagaaattcatttcttgaggaagcagaaccaggccctcaatgcaatgctcattaaaggatccagagataaacagaaggagaatgacaaattacgagagtccctctccaggaagaccgtgagcctggagcaccttcagcgggagtatgccagcgtgaaggaagaaaatgaaaggctgcagaaagaaggcagcgagaaggagagacacaaccagcagctgatccaggaggtccgctgcagcggccaggagctgagcagggtgcaggaggaggtgaagttgaggcagcagctgctctcacagaatgacaagctattgcagtctctccgagtggagctgaaggcgtatgagaagctggatgaagagcacaggagactgagagaggcgtcgggagaaggctggaaggggcaggatcctttcagggacctgcacagcctcctgatggagatccaggctctgcgcttgcaactagaaaggagcatcgaaaccagcagcactctgcagagcaggctcaaggaacagctggcaaggggggcagagaaggcacaggaaggagccctcactctggctgtccaagccgtgtccatccctgaggtgccccttcagcctgacaaacacgatggtgacaaatatcccatggaaagtgataattcatttgatctgtttgattcctcccaggcagtgacaccaaaatcagtttcagagactcctccactctctgggaatgacacggactccctctcctgcgacagtggcagttcggcaactagcactccgtgtgtgtcccgcctggtcactggccaccacctgtgggccagcaagaatggccgccatgtcctgggcctgattgaggactatgaggccctgctcaaacagatcagccagggacagaggctccttgctgaaatggacattcaaacccaagaggctcccagctccacaagtcaagagctgggaacaaagggtccacacccagcaccactgagcaagtttgtgagcagtgtgagcacggccaagctgaccctggaagaggcctacaggcggctgaagcttctctggagagtctcactccccgaggatggccagtgcccccttcactgtgagcagattggagaaatgaaggcagaggtcaccaaactacataaaaaattgtttgaacaagaaaagaagttgcaaaacaccatgaagcttttgcagctgagcaagcgccaggaaaaagtcatctttgatcaattggtcgtaacccacaaaatccttcggaaggccagaggaaacctggagcttaggcctgggggagcccatccaggaacatgcagtcccagcagaccaggctcctgagaagaactttcagccaataaagcttgtgcttcccccaccgagctcacgctgtctctttgttccaagtgtggttcctatttattgaggaagaaagagctgtctggccaaaggaaatctattttttcccttcatgttttctctctgaaagttggcttgagagttgttgtcagaaaggtgcaggtgctccacaaacgggtggtaaaaaggcctcgagctcttggatgttgtatttcagatcaggggcaggcaccggagttgaggctgtgcgccttggtgggcttcacgtcttcccctggatttgcttagtactcagccagtgccacagtttgaagattctcattaaatgattcatttcatttcaccttg

SEQ ID NO: 3764 - DNA, 5985 bp, Homo sapiens
  source 1..5985: mol_type = unassigned DNA; mol_type = unassigned DNA
ggaagaagcgccgggaaagatggcggcgtctgtggtttgaattccagcggcgccgccagagtctgaacaagagctggggtggagggggcggggacctggggagcccggcgggtcgctatcgcggggggtactagtggcgccgccgccacagacaccaacgctgtcgccacctctgtagccatgatggacttggtgttggaagaggacgtcaccgtccctgggacgctcagcggctgcagtggccttgttcccagtgtaccagatgacctggatggcatcaaccccaatgctgggttgggaaatggtctgctcccaaatgtgtcagaagaaacagtgtctcccaccagagcacggaacatgaaggactttgaaaatcaaatcactgaattgaagaaagaaaactttaacctaaagctccgcatctatttccttgaggaaagaatgcaacaggaatttcatggccccactgaacatatctacaaaactaacattgagctcaaggtggaagtagaaagtctgaagcgggaactccaggagagagagcagctgctcatcaaagcctccaaagcagttgagagcttagctgaagcaggtggctctgaaatccagcgggtgaaagaagatgctcgaaagaaggtgcagcaggtggaagatctcctaactaaaagaatactccttttggaaaaggatgtgacagccgcccaggcagaactggaaaaggcctttgcagggacagagacggagaaggctcttcggttgcgtttggaaagcaagctttcagagatgaagaagatgcacgagggggacttggcgatggctctggtcctggatgagaaagacagactgattgaggagttgaagctgtctttgaagagcaaagaagctttaattcagtgccttaaagaggagaaatctcagatggcatgtcctgatgagaatgtgtcatctggagagctccgaggactttgtgctgctccaagggaagaaaaggagagagaaactgaggctgcacaaatggagcatcagaaggagagaaacagctttgaagagaggatccaggcacttgaagaggacctgagagagaaggaaagagaaattgctacagagaagaaaaatagtctaaagagggataaagccattcagggtttaaccatggcattaaaatcaaaggaaaaaaaggttgaagaacttaactctgaaattgaaaagctcagtgctgcctttgctaaagccagagaggccctacagaaagcacagacccaggaatttcaggggtctgaagactatgagactgctctatcaggaaaggaagccctttcggctgcgctgcgctcacaaaacctcaccaagagtacagagaaccacagactgcgtagaagcattaagaagatcacccaggagctgagtgacttgcagcaggagagggagagactggagaaggacctggaggaagcccatcgagagaagagcaaaggagactgcaccatccgtgatcttagaaatgaagttgaaaaattacgcaatgaagtgaatgaaagagagaaagcaatggaaaatcgttacaagagtcttctgagtgaaagcaataaaaaattgcacaatcaagagcaagtgatcaaacatctaacagaaagtaccaatcagaaggacgtgttgcttcagaaattcaatgaaaaagatttggaagtaatacagcagaactgctatttaatggctgcagaggatcttgagctcaggagtgaaggcttaataacagaaaagtgctcttctcaacagccaccaggcagcaaaaccatcttctctaaggaaaagaaacaatcatcagactatgaagagctgattcaggtcttaaagaaagagcaggacatctatacccatctggtcaaatctctgcaggaatcagacagtatcaacaacctgcaggctgagttaaacaagatttttgccctgcggaagcaactggagcaggatgtgctttcatatcagaatttgcggaagaccttggaggagcagatcagcgaaattcggaggcgggaagaagaatcattttcactttatagtgatcaaacatcttatctaagtatttgccttgaagaaaacaatcggtttcaagtggaacatttttctcaagaagaacttaagaaaaaggtcagtgaccttatacagctagtgaaggagctgtatacagacaaccagcacctgaagaaaaccatttttgatctctcctgcatgggtttccagggaaatgggtttccagatagacttgcgtctacagaacaaacagagcttctggctagcaaggaggacgaggacacgatcaaaattggggaggatgacgagattaatttcctgagtgaccagcatttgcagcagagtaatgagattatgaaagacctttccaaaggaggctgcaaaaatggatacttaaggcacacggagtctaagatttcagattgtgatggggcccacgcacctggctgcctagaagaaggtgcattcataaacctgcttgcccctttgttcaatgagaaggccacattattactggaatccaggccagaccttctgaaagtggtacgggaactgcttctgggacaactattcttgacagagcaggaagtttctggagaacaccttgatggtaaaactgagaagacacctaagcaaaaaggtgaacttgtacattttgtccaaaccaactcattttccaagccacatgatgaactgaagttgtcttgtgaggcccagctagtaaaggcaggcgaagtgcccaaggtaggactgaaagatgcctcagtgcagactgtggccacggagggcgacctgctgagattcaagcatgaagcaacaagagaggcttgggaagagaaaccgatcaacactgcactcagcgcagagcatcggccagagaacctgcacggggtgcctgggtggcaggctgccctcctttccctccctggtattaccaacagagaggctaagaagtcccgcttgccaatcctaataaaaccatcccggtcattaggaaatatgtatcgtctccctgccacccaggaggtggtgacgcagctgcagagccagatcttggagctgcagggggagctgaaggagtttaaaacttgtaataagcaacttcaccaaaagttaattctggctgaagcagtgatggaggggaggccaacgcccgacaaaacgttgctgaatgctcagccccctgtgggagcagcctaccaggacagcccaggagagcagaaaggaattaaaaccacatcttctgtctggagagacaaggaaatggacagtgatcagcaaagaagctacgagattgactctgagatttgcccacctgatgaccttgccagcttgccatcatgcaaagaaaatcctgaagatgttctgagcccaacttcagtagctacttacctgagttccaagagtcagccttctgctaaagtcagtgtgatggggactgatcagtcagagagcattaatacctcaaatgagacagaatacttaaaacagaaaatccatgacttggaaactgagctggaaggctaccagaatttcatatttcagcttcaaaagcactcccagtgcagtgaggccataattacagttttgtgtgggacagaaggggcccaggatggcttgagcaagcccaagaatggttctgatggggaagaaatgaccttttcaagtttgcaccaagtgcgatacgtgaaacacgtgaaaatcctcggtccgctggccccagagatgattgacagcagggtgctggagaacctcaaacagcagctggaggaacaggaatacaagctgcagaaggagcagaatttgaacatgcaacttttcagtgagatccataatctgcagaataagttcagagatctctcacctcccagatacgattcattagttcagtcccaagccagggagctctcccttcaacggcagcagattaaggatggccatggcatctgtgtcatctcccgtcaacacatgaacaccatgattaaggcatttgaggagttgctgcaggccagtgatgtggattactgtgtggccgagggtttccaggaacagctgaatcaatgtgctgagctgctggagaaattggaaaagctatttctcaacggaaaatcagttggagtggaaatgaacacccagaatgaactgatggagaggattgaggaagacaacttaacctaccaacatcttctgcctgaatctcctgagccttcagcctctcatgcgctctctgattatgaaacatctgaaaagtccttcttctcacgagaccagaagcaagataatgagacagagaagacttcagttatggtgaacagtttttctcaagacttactaatggaacacatacaggaaattcgaactttgagaaagcgtttagaagaatctattaaaacaaatgagaagctacggaaacagttggaacggcaaggatctgaatttgttcaaggttctacaagcatttttgcttctggttcagagcttcatagttctctaacatcagaaattcatttcttgaggaagcagaaccaggccctcaatgcaatgctcattaaaggatccagagataaacagaaggagaatgacaaattacgagagtccctctccaggaagaccgtgagcctggagcaccttcagcgggagtatgccagcgtgaaggaagaaaatgaaaggctgcagaaagaaggcagcgagaaggagagacacaaccagcagctgatccaggaggtccgctgcagcggccaggagctgagcagggtgcaggaggaggtgaagttgaggcagcagctgctctcacagaatgacaagctattgcagtctctccgagtggagctgaaggcgtatgagaagctggatgaagagcacaggagactgagagatggtgacaaatatcccatggaaagtgataattcatttgatctgtttgattcctcccaggcagtgacaccaaaatcagtttcagagactcctccactctctgggaatgacacggactccctctcctgcgacagtggcagttcggcaactagcactccgtgtgtgtcccgcctggtcactggccaccacctgtgggccagcaagaatggccgccatgtcctgggcctgattgaggactatgaggccctgctcaaacagatcagccagggacagaggctccttgctgaaatggacattcaaacccaagaggctcccagctccacaagtcaagagctgggaacaaagggtccacacccagcaccactgagcaagtttgtgagcagtgtgagcacggccaagctgaccctggaagaggcctacaggcggctgaagcttctctggagagtctcactccccgaggatggccagtgcccccttcactgtgagcagattggagaaatgaaggcagaggtcaccaaactacataaaaaattgtttgaacaagaaaagaagttgcaaaacaccatgaagcttttgcagctgagcaagcgccaggaaaaagtcatctttgatcaattggtcgtaacccacaaaatccttcggaaggccagaggaaacctggagcttaggcctgggggagcccatccaggaacatgcagtcccagcagaccaggctcctgagaagaactttcagccaataaagcttgtgcttcccccaccgagctcacgctgtctctttgttccaagtgtggttcctatttattgaggaagaaagagctgtctggccaaaggaaatctattttttcccttcatgttttctctctgaaagttggcttgagagttgttgtcagaaaggtgcaggtgctccacaaacgggtggtaaaaaggcctcgagctcttggatgttgtatttcagatcaggggcaggcaccggagttgaggctgtgcgccttggtgggcttcacgtcttcccctggatttgcttagtactcagccagtgccacagtttgaagattctcattaaatgattcatttcatttc

SEQ ID NO: 3765 - DNA, 635 bp, Homo sapiens
  source 1..635: mol_type = unassigned DNA; mol_type = unassigned DNA
tggcttcgtagaacttggaccctcatatgtgggtctgcctgatcggggcacagtcccttcccacagctgcttcccagagggcctaggaaactaaagagtgctgggcaggcccaggcctctaccctccctgcgccattgccctccctggcccacagaagtgagcctgagggatacctggacagccaggtggccgtgcacagctgtagggtgttctctgaaccggcatagcatgctgtagcctctgcatcactgtcaggtggtggcttagcggggcctcaaagaggtgttgttgatgcgttatttggccctggggtttgtgatgggtcaggtgggccctttgtacctccctctggtctggatgcttcagacctcgtgttgtctacatgtccgagccctttggggtggggttcatcctccctgcacttggctttcacacagctctcctggatatccatggccctaatcattgcattctttgctctctcctcagtggtcgtaacccacaaaatccttcggaaggccagaggaaacctggagcttaggcctgggggagcccatccaggaacatgcagtcccagcagaccaggctcctgagaagaactttcagccaataaagcttgtgcttcccccaccga

SEQ ID NO: 3766 - DNA, 549 bp, Homo sapiens
  source 1..549: mol_type = unassigned DNA; mol_type = unassigned DNA
atgtggtaccaggctttcgctcagcgtgtgaaacagaagccctacagtctggagatttatactgcatgttaaggcttgcttgtctaaaatctttttcaagactgcacgtaacagccttcatatcccccgtgtagggtccacacccagcaccactgagcaagtttgtgagcagtgtgagcacggccaagctgaccctggaagaggcctacaggcggctgaagcttctctggagagtctcactccccgaggatggccagtgcccccttcactgtgagcagattggagaaatgaaggcagaggtcaccaaactacataaaaaattgtttgaacaagaaaagaagttgcaaaacaccatgaagcttttgcagctgagcaagcgccaggaaaaagtcatctttgatcaattggtcgtaacccacaaaatccttcggaaggccagaggaaacctggagcttaggcctgggggagcccatccaggaacatgcagtcccagcagaccaggctcctgagaagaactttcagccaataaagcttgtgcttcccccaccg

SEQ ID NO: 3767 - DNA, 5956 bp, Homo sapiens
  source 1..5956: mol_type = unassigned DNA; mol_type = unassigned DNA
accaacgctgtcgccacctctgtagccatgatggacttggtgttggaagaggacgtcaccgtccctgggacgctcagcggctgcagtggccttgttcccagtgtaccagatgacctggatggcatcaaccccaatgctgggttgggaaatgtgctcccaaatgtgtcagaagaaacagtgtctcccaccagagcacggaacatgaaggactttgaaaatcaaatcactgaattgaagaaagaaaactttaacctaaagctccgcatctatttccttgaggaaagaatgcaacaggaatttcatggccccactgaacatatctacaaaactaacattgagctcaaggtggaagtagaaagtctgaagcgggaactccaggagagagagcagctgctcatcaaagcctccaaagcagttgagagcttagctgaagcaggtggctctgaaatccagcgggtgaaagaagatgctcgaaagaaggtgcagcaggtggaagatctcctaactaaaagaatactccttttggaaaaggatgtgacagccgcccaggcagaactggaaaaggcctttgcagggacagagacggagaaggctcttcggttgcgtttggaaagcaagctttcagagatgaagaagatgcacgagggggacttggcgatggctctggtcctggatgagaaagacagactgattgaggagttgaagctgtctttgaagagcaaagaagctttaattcagtgccttaaagaggagaaatctcagatggcatgtcctgatgagaatgtgtcatctggagagctccgaggactttgtgctgctccaagggaagaaaaggagagagaaactgaggctgcacaaatggagcatcagaaggagagaaacagctttgaagagaggatccaggcacttgaagaggacctgagagagaaggaaagagaaattgctacagagaagaaaaatagtctaaagagggataaagccattcagggtttaaccatggcattaaaatcaaaggaaaaaaaggttgaagaacttaactctgaaattgaaaagctcagtgctgcctttgctaaagccagagaggccctacagaaagcacagacccaggaatttcaggggtctgaagactatgagactgctctatcaggaaaggaagccctttcggctgcgctgcgctcacaaaacctcaccaagagtacagagaaccacagactgcgtagaagcattaagaagatcacccaggagctgagtgacttgcagcaggagagggagagactggagaaggacctggaggaagcccatcgagagaagagcaaaggagactgcaccatccgtggtctcactctgtttcctgggctgttcctgaactcctgggctcaagtgatcctcccacctcagtttcttgagtagctgggattataggcacatgccaccatgcccacctcactgattgttcctgatagaggatcttagaaatgaagttgaaaaattacgcaatgaagtgaatgaaagagagaaagcaatggaaaatcgttacaagagtcttctgagtgaaagcaataaaaaattgcacaatcaagagcaagtgatcaaacatctaacagaaagtaccaatcagaaggacgtgttgcttcagaaattcaatgaaaaagatttggaagtaatacagcagaactgctatttaatggctgcagaggatcttgagctcaggagtgaaggcttaataacagaaaagtgctcttctcaacagccaccaggcagcaaaaccatcttctctaaggaaaagaaacaatcatcagactatgaagagctgattcaggtcttaaagaaagagcaggacatctatacccatctggtcaaatctctgcaggaatcagacagtatcaacaacctgcaggctgagttaaacaagatttttgccctgcggaagcaactggagcaggatgtgctttcatatcagaatttgcggaagaccttggaggagcagatcagcgaaattcggaggcgggaagaagaatcattttcactttatagtgatcaaacatcttatctaagtatttgccttgaagaaaacaatcggtttcaagtggaacatttttctcaagaagaacttaagaaaaaggtcagtgaccttatacagctagtgaaggagctgtatacagacaaccagcacctgaagaaaaccatttttgatctctcctgcatgggtttccagggaaatgggtttccagatagacttgcgtctacagaacaaacagagacatcactgacttattcatacatattcatgctgcacacttttttgggttgcattttcacaccattccatgctccatgtagcttctggctagcaaggaggacgaggacacgatcaaaattggggaggatgacgagattaatttcctgagtgaccagcatttgcagcagagtaatgagattatgaaagacctttccaaaggaggctgcaaaaatggatacttaaggcacacggagtctaagatttcagattgtgatggggcccacgcacctggctgcctagaagaaggtgcattcataaacctgcttgcccctttgttcaatgagaaggccacattattactggaatccaggccagaccttctgaaagtggtacgggaactgcttctgggacaactattcttgacagagcaggaagtttctggagaacaccttgatggtaaaactgagaagacacctaagcaaaaaggtgaacttgtacattttgtccaaaccaactcattttccaagccacatgatgaactgaagttgtcttgtgaggcccagctagtaaaggcaggcgaagtgcccaaggtaggactgaaagatgcctcagtgcagactgtggccacggagggcgacctgctgagattcaagcatgaagcaacaagagaggcttgggaagagaaaccgatcaacactgcactcagcgcagagcatcggccagagaacctgcacggggtgcctgggtggcaggctgccctcctttccctccctggtattaccaacagagaggctaagaagtcccgcttgccaatcctaataaaaccatcccggtcattaggaaatatgtatcgtctccctgccacccaggaggtggtgacgcagctgcagagccagatcttggagctgcagggggagctgaaggagtttaaaacttgtaataagcaacttcaccaaaagttaattctggctgaagcagtgatggaggggaggccaacgcccgacaaaacgttgctgaatgctcagccccctgtgggagcagcctaccaggacagcccaggagagcagaaaggaattaaaaccacatcttctgtctggagagacaaggaaatggacagtgatcagcaaagaagctacgagattgactctgagatttgcccacctgatgaccttgccagcttgccatcatgcaaagaaaatcctgaagatgttctgagcccaacttcagtagctacttacctgagttccaagagtcagccttctgctaaagtcagtgtgatggggactgatcagtcagagagcattaatacctcaaatgagacagaatacttaaaacagaaaatccatgacttggaaactgagctggaaggctaccagaatttcatatttcagcttcaaaagcactcccagtgcagtgaggccataattacagttttgtgtgggacagaaggggcccaggatggcttgagcaagcccaagaatggttctgatggggaagaaatgaccttttcaagtttgcaccaagtgcgatacgtgaaacacgtgaaaatcctcggtccgctggccccagagatgattgacagcagggtgctggagaacctcaaacagcagctggaggaacaggaatacaagctgcagaaggagcagaatttgaacatgcaacttttcagtgagatccataatctgcagaataagttcagagatctctcacctcccagatacgattcattagttcagtcccaagccagggagctctcccttcaacggcagcagattaaggatggccatggcatctgtgtcatctcccgtcaacacatgaacaccatgattaaggcatttgaggagttgctgcaggccagtgatgtggattactgtgtggccgagggtttccaggaacagctgaatcaatgtgctgagctgctggagaaattggaaaagctatttctcaacggaaaatcagttggagtggaaatgaacacccagaatgaactgatggagaggattgaggaagacaacttaacctaccaacatcttctgcctgaatctcctgagccttcagcctctcatgcgctctctgattatgaaacatctgaaaagtccttcttctcacgagaccagaagcaagataatgagacagagaagacttcagttatggtgaacagtttttctcaagacttactaatggaacacatacaggaaattcgaactttgagaaagcgtttagaagaatctattaaaacaaatgagaagctacggaaacagttggaacggcaaggatctgaatttgttcaaggttctacaagcatttttgcttctggttcagagcttcatagttctctaacatcagaaattcatttcttgaggaagcagaaccaggccctcaatgcaatgctcattaaaggatccagagataaacagaaggagaatgacaaattacgagagtccctctccaggaagaccgtgagcctggagcaccttcagcgggagtatgccagcgtgaaggaagaaaatgaaaggctgcagaaagaaggcagcgagaaggagagacacaaccagcagctgatccaggaggtccgctgcagcggccaggagctgagcagggtgcaggaggaggtgaagttgaggcagcagctgctctcacagaatgacaagctattgcagtctctccgagtggagctgaaggcgtatgagaagctggatgaagagcacaggagactgagagaggcgtcgggagaaggctggaaggggcaggatcctttcagggacctgcacagcctcctgatggagatccaggctctgcgcttgcaactagaaaggagcatcgaaaccagcagcactctgcagagcaggctcaaggaacagctggcaaggggggcagagaaggcacaggaaggagccctcactctggctgtccaagccgtgtccatccctgaggtgccccttcagcctgacaaacacgatggtgacaaatatcccatggaaagtgataattcatttgatctgtttgattcctcccaggcagtgacaccaaaatcagtttcagagactcctccactctctgggaatgacacggactccctctcctgcgacagtggcagttcggcaactagcactccgtgtgtgtcccgcctggtcactggccaccacctgtgggccagcaagaatggccgccatgtcctgggcctgattgaggactatgaggccctgctcaaacagatcagccagggacagaggctccttgctgaaatggacattcaaacccaagaggctcccagctccacaagtcaagagctgggaacaaagggtccacacccagcaccactgagcaagtttgtgagcagtgtgagcacggccaagctgaccctggaagaggcctacaggcggctgaagcttctctggagagtctcactccccgaggatggccagtgcccccttcactgtgagcagattggagaaatgaaggcagaggtcaccaaactacataaaaaattgtttgaacaagaaaagaagttgcaaaacaccatgaagcttttgcagctgagcaagcgccaggaaaaagtcatctttgatcaattggtcgtaacccacaaaatccttcggaaggccagaggaaacctggagcttaggcctgggggagcccatccaggaacatgcagtcccagcagaccaggctcctgagaagaactttcagccaataaagcttgtgcttcccccaccg

SEQ ID NO: 3768 - DNA, 5826 bp, Homo sapiens
  source 1..5826: mol_type = unassigned DNA; mol_type = unassigned DNA
accaacgctgtcgccacctctgtagccatgatggacttggtgttggaagaggacgtcaccgtccctgggacgctcagcggctgcagtggccttgttcccagtgtaccagatgacctggatggcatcaaccccaatgctgggttgggaaatgtgctcccaaatgtgtcagaagaaacagtgtctcccaccagagcacggaacatgaaggactttgaaaatcaaatcactgaattgaagaaagaaaactttaacctaaagctccgcatctatttccttgaggaaagaatgcaacaggaatttcatggccccactgaacatatctacaaaactaacattgagctcaaggtggaagtagaaagtctgaagcgggaactccaggagagagagcagctgctcatcaaagcctccaaagcagttgagagcttagctgaagcaggtggctctgaaatccagcgggtgaaagaagatgctcgaaagaaggtgcagcaggtggaagatctcctaactaaaagaatactccttttggaaaaggatgtgacagccgcccaggcagaactggaaaaggcctttgcagggacagagacggagaaggctcttcggttgcgtttggaaagcaagctttcagagatgaagaagatgcacgagggggacttggcgatggctctggtcctggatgagaaagacagactgattgaggagttgaagctgtctttgaagagcaaagaagctttaattcagtgccttaaagaggagaaatctcagatggcatgtcctgatgagaatgtgtcatctggagagctccgaggactttgtgctgctccaagggaagaaaaggagagagaaactgaggctgcacaaatggagcatcagaaggagagaaacagctttgaagagaggatccaggcacttgaagaggacctgagagagaaggaaagagaaattgctacagagaagaaaaatagtctaaagagggataaagccattcagggtttaaccatggcattaaaatcaaaggaaaaaaaggttgaagaacttaactctgaaattgaaaagctcagtgctgcctttgctaaagccagagaggccctacagaaagcacagacccaggaatttcaggggtctgaagactatgagactgctctatcaggaaaggaagccctttcggctgcgctgcgctcacaaaacctcaccaagagtacagagaaccacagactgcgtagaagcattaagaagatcacccaggagctgagtgacttgcagcaggagagggagagactggagaaggacctggaggaagcccatcgagagaagagcaaaggagactgcaccatccgtgatcttagaaatgaagttgaaaaattacgcaatgaagtgaatgaaagagagaaagcaatggaaaatcgttacaagagtcttctgagtgaaagcaataaaaaattgcacaatcaagagcaagtgatcaaacatctaacagaaagtaccaatcagaaggacgtgttgcttcagaaattcaatgaaaaagatttggaagtaatacagcagaactgctatttaatggctgcagaggatcttgagctcaggagtgaaggcttaataacagaaaagtgctcttctcaacagccaccaggcagcaaaaccatcttctctaaggaaaagaaacaatcatcagactatgaagagctgattcaggtcttaaagaaagagcaggacatctatacccatctggtcaaatctctgcaggaatcagacagtatcaacaacctgcaggctgagttaaacaagatttttgccctgcggaagcaactggagcaggatgtgctttcatatcagaatttgcggaagaccttggaggagcagatcagcgaaattcggaggcgggaagaagaatcattttcactttatagtgatcaaacatcttatctaagtatttgccttgaagaaaacaatcggtttcaagtggaacatttttctcaagaagaacttaagaaaaaggtcagtgaccttatacagctagtgaaggagctgtatacagacaaccagcacctgaagaaaaccatttttgatctctcctgcatgggtttccagggaaatgggtttccagatagacttgcgtctacagaacaaacagagacatcactgacttattcatacatattcatgctgcacacttttttgggttgcattttcacaccattccatgctccatgtagcttctggctagcaaggaggacgaggacacgatcaaaattggggaggatgacgagattaatttcctgagtgaccagcatttgcagcagagtaatgagattatgaaagacctttccaaaggaggctgcaaaaatggatacttaaggcacacggagtctaagatttcagattgtgatggggcccacgcacctggctgcctagaagaaggtgcattcataaacctgcttgcccctttgttcaatgagaaggccacattattactggaatccaggccagaccttctgaaagtggtacgggaactgcttctgggacaactattcttgacagagcaggaagtttctggagaacaccttgatggtaaaactgagaagacacctaagcaaaaaggtgaacttgtacattttgtccaaaccaactcattttccaagccacatgatgaactgaagttgtcttgtgaggcccagctagtaaaggcaggcgaagtgcccaaggtaggactgaaagatgcctcagtgcagactgtggccacggagggcgacctgctgagattcaagcatgaagcaacaagagaggcttgggaagagaaaccgatcaacactgcactcagcgcagagcatcggccagagaacctgcacggggtgcctgggtggcaggctgccctcctttccctccctggtattaccaacagagaggctaagaagtcccgcttgccaatcctaataaaaccatcccggtcattaggaaatatgtatcgtctccctgccacccaggaggtggtgacgcagctgcagagccagatcttggagctgcagggggagctgaaggagtttaaaacttgtaataagcaacttcaccaaaagttaattctggctgaagcagtgatggaggggaggccaacgcccgacaaaacgttgctgaatgctcagccccctgtgggagcagcctaccaggacagcccaggagagcagaaaggaattaaaaccacatcttctgtctggagagacaaggaaatggacagtgatcagcaaagaagctacgagattgactctgagatttgcccacctgatgaccttgccagcttgccatcatgcaaagaaaatcctgaagatgttctgagcccaacttcagtagctacttacctgagttccaagagtcagccttctgctaaagtcagtgtgatggggactgatcagtcagagagcattaatacctcaaatgagacagaatacttaaaacagaaaatccatgacttggaaactgagctggaaggctaccagaatttcatatttcagcttcaaaagcactcccagtgcagtgaggccataattacagttttgtgtgggacagaaggggcccaggatggcttgagcaagcccaagaatggttctgatggggaagaaatgaccttttcaagtttgcaccaagtgcgatacgtgaaacacgtgaaaatcctcggtccgctggccccagagatgattgacagcagggtgctggagaacctcaaacagcagctggaggaacaggaatacaagctgcagaaggagcagaatttgaacatgcaacttttcagtgagatccataatctgcagaataagttcagagatctctcacctcccagatacgattcattagttcagtcccaagccagggagctctcccttcaacggcagcagattaaggatggccatggcatctgtgtcatctcccgtcaacacatgaacaccatgattaaggcatttgaggagttgctgcaggccagtgatgtggattactgtgtggccgagggtttccaggaacagctgaatcaatgtgctgagctgctggagaaattggaaaagctatttctcaacggaaaatcagttggagtggaaatgaacacccagaatgaactgatggagaggattgaggaagacaacttaacctaccaacatcttctgcctgaatctcctgagccttcagcctctcatgcgctctctgattatgaaacatctgaaaagtccttcttctcacgagaccagaagcaagataatgagacagagaagacttcagttatggtgaacagtttttctcaagacttactaatggaacacatacaggaaattcgaactttgagaaagcgtttagaagaatctattaaaacaaatgagaagctacggaaacagttggaacggcaaggatctgaatttgttcaaggttctacaagcatttttgcttctggttcagagcttcatagttctctaacatcagaaattcatttcttgaggaagcagaaccaggccctcaatgcaatgctcattaaaggatccagagataaacagaaggagaatgacaaattacgagagtccctctccaggaagaccgtgagcctggagcaccttcagcgggagtatgccagcgtgaaggaagaaaatgaaaggctgcagaaagaaggcagcgagaaggagagacacaaccagcagctgatccaggaggtccgctgcagcggccaggagctgagcagggtgcaggaggaggtgaagttgaggcagcagctgctctcacagaatgacaagctattgcagtctctccgagtggagctgaaggcgtatgagaagctggatgaagagcacaggagactgagagaggcgtcgggagaaggctggaaggggcaggatcctttcagggacctgcacagcctcctgatggagatccaggctctgcgcttgcaactagaaaggagcatcgaaaccagcagcactctgcagagcaggctcaaggaacagctggcaaggggggcagagaaggcacaggaaggagccctcactctggctgtccaagccgtgtccatccctgaggtgccccttcagcctgacaaacacgatggtgacaaatatcccatggaaagtgataattcatttgatctgtttgattcctcccaggcagtgacaccaaaatcagtttcagagactcctccactctctgggaatgacacggactccctctcctgcgacagtggcagttcggcaactagcactccgtgtgtgtcccgcctggtcactggccaccacctgtgggccagcaagaatggccgccatgtcctgggcctgattgaggactatgaggccctgctcaaacagatcagccagggacagaggctccttgctgaaatggacattcaaacccaagaggctcccagctccacaagtcaagagctgggaacaaagggtccacacccagcaccactgagcaagtttgtgagcagtgtgagcacggccaagctgaccctggaagaggcctacaggcggctgaagcttctctggagagtctcactccccgaggatggccagtgcccccttcactgtgagcagattggagaaatgaaggcagaggtcaccaaactacataaaaaattgtttgaacaagaaaagaagttgcaaaacaccatgaagcttttgcagctgagcaagcgccaggaaaaagtcatctttgatcaattggtcgtaacccacaaaatccttcggaaggccagaggaaacctggagcttaggcctgggggagcccatccaggaacatgcagtcccagcagaccaggctcctgagaagaactttcagccaataaagcttgtgcttcccccaccg

SEQ ID NO: 3769 - DNA, 3902 bp, Homo sapiens
  source 1..3902: mol_type = unassigned DNA; mol_type = unassigned DNA
gacagtatcaacaacctgcaggctgagttaaacaagatttttgccctgcggaagcaactggagcaggatgtgctttcatatcagaatttgcggaagaccttggaggagcagatcagcgaaattcggaggcgggaagaagaatcattttcactttatagtgatcaaacatcttatctaagtatttgccttgaagaaaacaatcggtttcaagtggaacatttttctcaagaagaacttaagaaaaaggtcagtgaccttatacagctagtgaaggagctgtatacagacaaccagcacctgaagaaaaccatttttgatctctcctgcatgggtttccagggaaatgggtttccagatagacttgcgtctacagaacaaacagagattatgaaagacctttccaaaggaggctgcaaaaatggatacttaaggcacacggagtctaagatttcagattgtgatggggcccacgcacctggctgcctagaagaaggtgcattcataaacctgcttgcccctttgttcaatgagaaggccacattattactggaatccaggccagaccttctgaaagtggtacgggaactgcttctgggacaactattcttgacagagcaggaagtttctggagaacaccttgatggtaaaactgagaagacacctaagcaaaaaggtgaacttgtacattttgtccaaaccaactcattttccaagccacatgatgaactgaagttgtcttgtgaggcccagctagtaaaggcaggcgaagtgcccaaggtaggactgaaagatgcctcagtgcagactgtggccacggagggcgacctgctgagattcaagcatgaagcaacaagagaggcttgggaagagaaaccgatcaacactgcactcagcgcagagcatcggccagagaacctgcacggggtgcctgggtggcaggctgccctcctttccctccctggtattaccaacagagaggctaagaagtcccgcttgccaatcctaataaaaccatcccggtcattaggaaatatgtatcgtctccctgccacccaggaggtggtgacgcagctgcagagccagatcttggagctgcagggggagctgaaggagtttaaaacttgtaataagcaacttcaccaaaagttaattctggctgaagcagtgatggaggggaggccaacgcccgacaaaacgttgctgaatgctcagccccctgtgggagcagcctaccaggacagcccaggagagcagaaaggaattaaaaccacatcttctgtctggagagacaaggaaatggacagtgatcagcaaagaagctacgagattgactctgagatttgcccacctgatgaccttgccagcttgccatcatgcaaagaaaatcctgaagatgttctgagcccaacttcagtagctacttacctgagttccaagagtcagccttctgctaaagtcagtgtgatggggactgatcagtcagagagcattaatacctcaaatgagacagaatacttaaaacagaaaatccatgacttggaaactgagctggaaggctaccagaatttcatatttcagcttcaaaagcactcccagtgcagtgaggccataattacagttttgtgtgggacagaaggggcccaggatggcttgagcaagcccaagaatggttctgatggggaagaaatgaccttttcaagtttgcaccaagtgcgatacgtgaaacacgtgaaaatcctcggtccgctggccccagagatgattgacagcagggtgctggagaacctcaaacagcagctggaggaacaggaatacaagctgcagaaggagcagaatttgaacatgcaacttttcagtgagatccataatctgcagaataagttcagagatctctcacctcccagatacgattcattagttcagtcccaagccagggagctctcccttcaacggcagcagattaaggatggccatggcatctgtgtcatctcccgtcaacacatgaacaccatgattaaggcatttgaggagttgctgcaggccagtgatgtggattactgtgtggccgagggtttccaggaacagctgaatcaatgtgctgagctgctggagaaattggaaaagctatttctcaacggaaaatcagttggagtggaaatgaacacccagaatgaactgatggagaggattgaggaagacaacttaacctaccaacatcttctgcctgaatctcctgagccttcagcctctcatgcgctctctgattatgaaacatctgaaaagtccttcttctcacgagaccagaagcaagataatgagacagagaagacttcagttatggtgaacagtttttctcaagacttactaatggaacacatacaggaaattcgaactttgagaaagcgtttagaagaatctattaaaacaaatgagaagctacggaaacagttggaacggcaaggatctgaatttgttcaaggttctacaagcatttttgcttctggttcagagcttcatagttctctaacatcagaaattcatttcttgaggaagcagaaccaggccctcaatgcaatgctcattaaaggatccagagataaacagaaggagaatgacaaattacgagagtccctctccaggaagaccgtgagcctggagcaccttcagcgggagtatgccagcgtgaaggaagaaaatgaaaggctgcagaaagaaggcagcgagaaggagagacacaaccagcagctgatccaggaggtccgctgcagcggccaggagctgagcagggtgcaggaggaggtgaagttgaggcagcagctgctctcacagaatgacaagctattgcagtctctccgagtggagctgaaggcgtatgagaagctggatgaagagcacaggagactgagagaggcgtcgggagaaggctggaaggggcaggatcctttcagggacctgcacagcctcctgatggagatccaggctctgcgcttgcaactagaaaggagcatcgaaaccagcagcactctgcagagcaggctcaaggaacagctggcaaggggggcagagaaggcacaggaaggagccctcactctggctgtccaagccgtgtccatccctgaggtgccccttcagcctgacaaacacgatggtgacaaatatcccatggaaagtgataattcatttgatctgtttgattcctcccaggcagtgacaccaaaatcagtttcagagactcctccactctctgggaatgacacggactccctctcctgcgacagtggcagttcggcaactagcactccgtgtgtgtcccgcctggtcactggccaccacctgtgggccagcaagaatggccgccatgtcctgggcctgattgaggactatgaggccctgctcaaacagatcagccagggacagaggctccttgctgaaatggacattcaaacccaagaggctcccagctccacaagtcaagagctgggaacaaagggtccacacccagcaccactgagcaagtttgtgagcagtgtgagcacggccaagctgaccctggaagaggcctacaggcggctgaagcttctctggagagtctcactccccgaggatggccagtgcccccttcactgtgagcagattggagaaatgaaggcagaggtcaccaaactacataaaaaattgtttgaacaagaaaagaagttgcaaaacaccatgaagcttttgcagctgagcaagcgccaggaaaaagtcatctttgatcaattggtcgtaacccacaaaatccttcggaaggccagaggaaacctggagcttaggcctgggggagcccatccaggaacatgcagtcccagcagaccaggctcctgagaagaactttcagccaataaagcttgtgcttcccccac

SEQ ID NO: 3770 - DNA, 815 bp, Homo sapiens
  source 1..815: mol_type = unassigned DNA; mol_type = unassigned DNA
attgttttttctggctctggcccttcatcactctgctgttgcaccttctgcagtgtctgtgttctgatcagactgtgggctactggaatgcaggcaccagcttgagtcatccttgtgaatctggggtcttctgccgatttcagagactcctccactctctgggaatgacacggactccctctcctgcgacagtggcagttcggcaactagcactccgtgtgtgtcccgcctggtcactggccaccacctgtgggccagcaagaatggccgccatgtcctgggcctgattgaggactatgaggccctgctcaaacagatcagccagggacagaggctccttgctgaaatggacattcaaacccaagaggctcccagctccacaagtcaagagctgggaacaaagggtccacacccagcaccactgagcaagtttgtgagcagtgtgagcacggccaagctgaccctggaagaggcctacaggcggctgaagcttctctggagagtctcactccccgaggatggccagtgcccccttcactgtgagcagattggagaaatgaaggcagaggtcaccaaactacataaaaaattgtttgaacaagaaaagaagttgcaaaacaccatgaagcttttgcagctgagcaagcgccaggaaaaagtcatctttgatcaattggtcgtaacccacaaaatccttcggaaggccagaggaaacctggagcttaggcctgggggagcccatccaggaacatgcagtcccagcagaccaggctcctgagaagaactttcagccaataaagcttgtgcttccccca

SEQ ID NO: 3771 - DNA, 931 bp, Homo sapiens
  source 1..931: mol_type = unassigned DNA; mol_type = unassigned DNA
cttctcagaagccttccctgttctctccctccctgcacagataattgttttttctggctctggcccttcatcactctgctgttgcaccttctgcagtgtctgtgttctgatcagactgtgggctactggaatgcaggcaccagcttgagtcatccttgtgaatctggggtcttctgccgagtgggtggttgataagtgttggttgagttgacttgagcctctcctacaagatgactcataagcccagtgtgggtttcagagactcctccactctctgggaatgacacggactccctctcctgcgacagtggcagttcggcaactagcactccgtgtgtgtcccgcctggtcactggccaccacctgtgggccagcaagaatggccgccatgtcctgggcctgattgaggactatgaggccctgctcaaacagatcagccagggacagaggctccttgctgaaatggacattcaaacccaagaggctcccagctccacaagtcaagagctgggaacaaagggtccacacccagcaccactgagcaagtttgtgagcagtgtgagcacggccaagctgaccctggaagaggcctacaggcggctgaagcttctctggagagtctcactccccgaggatggccagtgcccccttcactgtgagcagattggagaaatgaaggcagaggtcaccaaactacataaaaaattgtttgaacaagaaaagaagttgcaaaacaccatgaagcttttgcagctgagcaagcgccaggaaaaagtcatctttgatcaattggtcgtaacccacaaaatccttcggaaggccagaggaaacctggagcttaggcctgggggagcccatccaggaacatgcagtcccagcagaccaggctcctgagaagaactttcagccaataaagcttgtgcttccccca

SEQ ID NO: 3772 - DNA, 1269 bp, Homo sapiens
  source 1..1269: mol_type = unassigned DNA; mol_type = unassigned DNA
ttttagaccccctttgtcccactctttgccggtagaagtcccgtttcctcaagactcatcatgaatacacatttctctgtgacatgcctttgctgctgtccttggtcagaatgactcatcattcgtgtaattcttgctacttgctcaatccagttcaaatgctgctccttctcagaagccttccctgttctctccctccctgcacagataattgttttttctggctctggcccttcatcactctgctgttgcaccttctgcagtgtctgtgttctgatcagactgtgggctactggaatgcaggcaccagcttgagtcatccttgtgaatctggggtcttctgccgagtgggtggttgataagtgttggttgagttgacttgagcctctcctacaagatgactcataagcccagtgtggggtaatatacagaggtccaggagcgtgcctcttttcccctctgggcttgtgttgggtggcatttgggcacgagggcctcttctagccctcctagctagcttcaacatcataagcgtcttgaacgcagagtgttacctgaaacagattttacatcctacttctcattttacagtttcagagactcctccactctctgggaatgacacggactccctctcctgcgacagtggcagttcggcaactagcactccgtgtgtgtcccgcctggtcactggccaccacctgtgggccagcaagaatggccgccatgtcctgggcctgattgaggactatgaggccctgctcaaacagatcagccagggacagaggctccttgctgaaatggacattcaaacccaagaggctcccagctccacaagtcaagagctgggaacaaagggtccacacccagcaccactgagcaagtttgtgagcagtgtgagcacggccaagctgaccctggaagaggcctacaggcggctgaagcttctctggagagtctcactccccgaggatggccagtgcccccttcactgtgagcagattggagaaatgaaggcagaggtcaccaaactacataaaaaattgtttgaacaagaaaagaagttgcaaaacaccatgaagcttttgcagctgagcaagcgccaggaaaaagtcatctttgatcaattggtcgtaacccacaaaatccttcggaaggccagaggaaacctggagcttaggcctgggggagcccatccaggaacatgcagtcccagcagaccaggctcctgagaagaactttcagccaataaagcttgtgcttccccca

SEQ ID NO: 3773 - DNA, 2747 bp, Homo sapiens
  source 1..2747: mol_type = unassigned DNA; mol_type = unassigned DNA
aatatgtatcgtctccctgccacccaggaggtggtgacgcagctgcagagccagatcttggagctgcagggggagctgaaggagtttaaaacttgtaataagcaacttcaccaaaagttaattctggctgaagcagtgatggaggggaggccaacgcccgacaaaacgttgctgaatgactctgagatttgcccacctgatgaccttgccagcttgccatcatgcaaagaaaatcctgaagatgttctgagcccaacttcagtagctacttacctgagttccaagagtcagccttctgctaaagtcagtgtgatggggactgatcagtcagagagcattaatacctcaaatgagacagaatacttaaaacagaaaatccatgacttggaaactgagctggaaggctaccagaatttcatatttcagcttcaaaagcactcccagtgcagtgaggccataattacagttttgtgtgggacagaaggggcccaggatggcttgagcaagcccaagaatggttctgatggggaagaaatgaccttttcaagtttgcaccaagtgcgatacgtgaaacacgtgaaaatcctcggtccgctggccccagagatgattgacagcagggtgctggagaacctcaaacagcagctggaggaacaggaatacaagctgcagaaggagcagaatttgaacatgcaacttttcagtgagatccataatctgcagaataagttcagagatctctcacctcccagatacgattcattagttcagtcccaagccagggagctctcccttcaacggcagcagattaaggatggccatggcatctgtgtcatctcccgtcaacacatgaacaccatgattaaggcatttgaggagttgctgcaggccagtgatgtggattactgtgtggccgagggtttccaggaacagctgaatcaatgtgctgagctgctggagaaattggaaaagctatttctcaacggaaaatcagttggagtggaaatgaacacccagaatgaactgatggagaggattgaggaagacaacttaacctaccaacatcttctgcctgaatctcctgagccttcagcctctcatgcgctctctgattatgaaacatctgaaaagtccttcttctcacgagaccagaagcaagataatgagacagagaagacttcagttatggtgaacagtttttctcaagacttactaatggaacacatacaggaaattcgaactttgagaaagcgtttagaagaatctattaaaacaaatgagaagctacggaaacagttggaacggcaaggatctgaatttgttcaaggttctacaagcatttttgcttctggttcagagcttcatagttctctaacatcagaaattcatttcttgaggaagcagaaccaggccctcaatgcaatgctcattaaaggatccagagataaacagaaggagaatgacaaattacgagagtccctctccaggaagaccgtgagcctggagcaccttcagcgggagtatgccagcgtgaaggaagaaaatgaaaggctgcagaaagaaggcagcgagaaggagagacacaaccagcagctgatccaggaggtccgctgcagcggccaggagctgagcagggtgcaggaggaggtgaagttgaggcagcagctgctctcacagaatgacaagctattgcagtctctccgagtggagctgaaggcgtatgagaagctggatgaagagcacaggagactgagagaggcgtcgggagaaggctggaaggggcaggatcctttcagggacctgcacagcctcctgatggagatccaggctctgcgcttgcaactagaaaggagcatcgaaaccagcagcactctgcagagcaggctcaaggaacagctggcaaggggggcagagaaggcacaggaaggagccctcactctggctgtccaagccgtgtccatccctgaggtgccccttcagcctgacaaacacgatggtgacaaatatcccatggaaagtgataattcatttgatctgtttgattcctcccaggcagtgacaccaaaatcagtttcagagactcctccactctctgggaatgacacggactccctctcctgcgacagtggcagttcggcaactagcactccgtgtgtgtcccgcctggtcactggccaccacctgtgggccagcaagaatggccgccatgtcctgggcctgattgaggactatgaggccctgctcaaacagatcagccagggacagaggctccttgctgaaatggacattcaaacccaagaggctcccagctccacaagtcaagagctgggaacaaagggtccacacccagcaccactgagcaagtttgtgagcagtgtgagcacggccaagctgaccctggaagaggcctacaggcggctgaagcttctctggagagtctcactccccgaggatggccagtgcccccttcactgtgagcagattggagaaatgaaggcagaggtcaccaaactacataaaaaattgtttgaacaagaaaagaagttgcaaaacaccatgaagcttttgcagctgagcaagcgccaggaaaaagtcatctttgatcaattggtcgtaacccacaaaatccttcggaaggccagaggaaacctggagcttaggcctgggggagcccatccaggaacatgcagtcccagcagaccaggctcctgagaagaactttcagccaataaagcttgtgcttcccc

SEQ ID NO: 3774 - DNA, 6235 bp, Homo sapiens
  source 1..6235: mol_type = unassigned DNA; mol_type = unassigned DNA
ttcagagatgaagaagatgcacgagggggacttggcgatggctctggtcctggatgagaaagacagactgattgaggagttgaagctgtctttgaagagcaaagaagctttaattcagtgccttaaagaggagaaatctcagatggcatgtcctgatgagaatgtgtcatctggagagctccgaggactttgtgctgctccaagggaagaaaaggagagagaaactgaggctgcacaaatggagcatcagaaggagagaaacagctttgaagagaggatccaggcacttgaagaggacctgagagagaaggaaagagaaattgctacagagaagaaaaatagtctaaagagggataaagccattcagggtttaaccatggcattaaaatcaaaggaaaaaaaggttgaagaacttaactctgaaattgaaaagctcagtgctgcctttgctaaagccagagaggccctacagaaagcacagacccaggaatttcaggggtctgaagactatgagactgctctatcaggaaaggaagccctttcggctgcgctgcgctcacaaaacctcaccaagagtacagagaaccacagactgcgtagaagcattaagaagatcacccaggagctgagtgacttgcagcaggagagggagagactggagaaggacctggaggaagcccatcgagagaagagcaaaggagactgcaccatccgtgatcttagaaatgaagttgaaaaattacgcaatgaagtgaatgaaagagagaaagcaatggaaaatcgttacaagagtcttctgagtgaaagcaataaaaaattgcacaatcaagagcaagtgatcaaacatctaacagaaagtaccaatcagaaggacgtgttgcttcagaaattcaatgaaaaagatttggaagtaatacagcagaactgctatttaatggctgcagaggatcttgagctcaggagtgaaggcttaataacagaaaagtgctcttctcaacagccaccaggcagcaaaaccatcttctctaaggaaaagaaacaatcatcagactatgaagagctgattcaggtcttaaagaaagagcaggacatctatacccatctggtcaaatctctgcaggaatcagacagtatcaacaacctgcaggctgagttaaacaagatttttgccctgcggaagcaactggagcaggatgtgctttcatatcagaatttgcggaagaccttggaggagcagatcagcgaaattcggaggcgggaagaagaatcattttcactttatagtgatcaaacatcttatctaagtatttgccttgaagaaaacaatcggtttcaagtggaacatttttctcaagaagaacttaagaaaaaggtcagtgaccttatacagctagtgaaggagctgtatacagacaaccagcacctgaagaaaaccatttttgatctctcctgcatgggtttccagggaaatgggtttccagatagacttgcgtctacagaacaaacagagattatgaaagacctttccaaaggaggctgcaaaaatggatacttaaggcacacggagtctaagatttcagattgtgatggggcccacgcacctggctgcctagaagaaggtgcattcataaacctgcttgcccctttgttcaatgagaaggccacattattactggaatccaggccagaccttctgaaagtggtacgggaactgcttctgggacaactattcttgacagagcaggaagtttctggagaacaccttgatggtaaaactgagaagacacctaagcaaaaaggtgaacttgtacattttgtccaaaccaactcattttccaagccacatgatgaactgaagttgtcttgtgaggcccagctagtaaaggcaggcgaagtgcccaaggtaggactgaaagatgcctcagtgcagactgtggccacggagggcgacctgctgagattcaagcatgaagcaacaagagaggcttgggaagagaaaccgatcaacactgcactcagcgcagagcatcggccagagaacctgcacggggtgcctgggtggcaggctgccctcctttccctccctggtattaccaacagagaggctaagaagtcccgcttgccaatcctaataaaaccatcccggtcattaggaaatatgtatcgtctccctgccacccaggaggtggtgacgcagctgcagagccagatcttggagctgcagggggagctgaaggagtttaaaacttgtaataagcaacttcaccaaaagttaattctggctgaagcagtgatggaggggaggccaacgcccgacaaaacgttgctgaatgctcagccccctgtgggagcagcctaccaggacagcccaggagagcagaaaggaattaaaaccacatcttctgtctggagagacaaggaaatggacagtgatcagcaaagaagctacgagattgactctgagatttgcccacctgatgaccttgccagcttgccatcatgcaaagaaaatcctgaagatgttctgagcccaacttcagtagctacttacctgagttccaagagtcagccttctgctaaagtcagtgtgatggggactgatcagtcagagagcattaatacctcaaatgagacagaatacttaaaacagaaaatccatgacttggaaactgagctggaaggctaccagaatttcatatttcagcttcaaaagcactcccagtgcagtgaggccataattacagttttgtgtgggacagaaggggcccaggatggcttgagcaagcccaagaatggttctgatggggaagaaatgaccttttcaagtttgcaccaagtgcgatacgtgaaacacgtgaaaatcctcggtccgctggccccagagatgattgacagcagggtgctggagaacctcaaacagcagctggaggaacaggaatacaagctgcagaaggagcagaatttgaacatgcaacttttcagtgagatccataatctgcagaataagttcagagatctctcacctcccagatacgattcattagttcagtcccaagccagggagctctcccttcaacggcagcagattaaggatggccatggcatctgtgtcatctcccgtcaacacatgaacaccatgattaaggcatttgaggagttgctgcaggccagtgatgtggattactgtgtggccgagggtttccaggaacagctgaatcaatgtgctgagctgctggagaaattggaaaagctatttctcaacggaaaatcagttggagtggaaatgaacacccagaatgaactgatggagaggattgaggaagacaacttaacctaccaacatcttctgcctgaatctcctgagccttcagcctctcatgcgctctctgattatgaaacatctgaaaagtccttcttctcacgagaccagaagcaagataatgagacagagaagacttcagttatggtgaacagtttttctcaagacttactaatggaacacatacaggaaattcgaactttgagaaagcgtttagaagaatctattaaaacaaatgagaagctacggaaacagttggaacggcaaggatctgaatttgttcaaggttctacaagcatttttgcttctggttcagagcttcatagttctctaacatcagaaattcatttcttgaggaagcagaaccaggccctcaatgcaatgctcattaaaggatccagagataaacagaaggagaatgacaaattacgagagtccctctccaggaagaccgtgagcctggagcaccttcagcgggagtatgccagcgtgaaggaagaaaatgaaaggctgcagaaagaaggcagcgagaaggagagacacaaccagcagctgatccaggaggtccgctgcagcggccaggagctgagcagggtgcaggaggaggtgaagttgaggcagcagctgctctcacagaatgacaagctattgcagtctctccgagtggagctgaaggcgtatgagaagctggatgaagagcacaggagactgagaggtactgaggcccttctcaccttgaggctactgtgctttgggctgtaagaccacccgacagctggctgtaggcacaggagggcagagctcagccctctccactctggccttgtgggtagagtggatgggtgttgaagctagctctttgacccactcttcttctgaaggaacagcaggaaacatagaaggactgaggctcagcacccaggccagccgaggtccgggttcccactcacttgttcccagctatgtgaccctcagtaggccacttcaccctttgagcccatacctatctctgtaaaacatgtctctcagcacctgttgtgtggagaattgtgttgaaaattgaatgagaccatttattaaaagcatcctagcaagatacctgacacatagtaggcacccaggaaatgacctttattataatcgtcctgctagtatatgttactttttgcccactcattcagcaaacatttatggacacctctcacgtgctgggcattgctctggggatggttgttggcctcgttgctctctgtatcccaggagagataccagctcagagtgcttcaactataacgtctaatgtttcagaatcaattttgaggtgtggtgaggtgttttttttttttttttattttactaattttccagatggtttctctctattgaaagtttatctagaaaggggtcatctcacagcttttattttctcctcaacttgctttttttattcttgctgttgtgtctttttaatatagtgtggctcttaaaatcatcccctttcattctataattctagcccaaatagattttattactactagacataatttcggggtttggtgtgcaatttgctaggcttttatggccagaagcgaaaattaatttccagctcttatttagcgtgtggaatagcagcaattaagtctgccaatatttttgtttctaaagtcaagttgttattttaaactgtacctagttcttaggaagggggagggcgatggtggtggtgagtgtaaaatgcgattgagttccttcgatggctgaccctttggttgtggaagatgtcagggcttctctttgcacatgtcctcagaggcgtcgggagaaggctggaaggggcaggatcctttcagggacctgcacagcctcctgatggagatccaggctctgcgcttgcaactagaaaggagcatcgaaaccagcagcactctgcagagcaggctcaaggaacagctggcaaggggggcagagaaggcacaggaaggagccctcactctggctgtccaagccgtgtccatccctgaggtgccccttcagcctgacaaacacggtactgcccctgcctctccccacttgctgagaatgcagctctgagcatctgtgtgtgacatgtgaacttctgaatgatgcctttgccccacagaggtgtctttccattgatagctgacatgctgtaccctaggagccaggggacctgactgctaattaattagcggtcaccttgggcaaagtggcgtaatctccatctgaggcatcttgattctcagggaagtggaatttggacttccagacaccctcagtgcctctggccttgctccctcctatccatttagtcctgcctgcatcactttgatgctgaaatttcttttagtttctcttactgcctttagaagggaacctaaacatcttaatctggctttcagtgtctttcaggatctgaaaatcatcctgataggtttaaaaagtggatctgttttgcatttgtgtgcaggttaattgcctagccctggagaggctgtggggggtacgagaaagaggaccagacacctctaccacccgcccacccagggtgtggagcaaaccagtaaatggttagactccaagcaatcaggcagcctgtcctctttgctctagagatgaaaaacaaaggcccagagagtggatggggcttgcccaaagtggcacagcaagtaggcagcagagctggagctagaaaccatttccagcttcgagtccagggctgttcctaaaccccactggactctctggagcgttgggtatcctgggattatcatcctgacacccatagggtaaatgtgtgtatccagtgggatgaggaatgccagcctgctttacaagcaagtattgtactaaagtttggactgacttttacttggatacctctagttaaaaaaa

SEQ ID NO: 3775 - DNA, 577 bp, Homo sapiens
  source 1..577: mol_type = unassigned DNA; mol_type = unassigned DNA
aaaagcatggaggcatgacacagcacgcaatgtgcagggaatcatggttaattttgtaggaaatctccagagtggtgccagagatattcctggaaaggttgcctggaactagatcatggaagactctgagatttgcccacctgatgaccttgccagcttgccatcatgcaaagaaaatcctgaagatgttctgagcccaacttcagtagctacttacctgagttccaagagtcagccttctgctaaagtcagtgtgatggggactgatcagtcagagagcattaatacctcaaatgagacagaatacttaaaacagaaaatccatgacttggaaactgagctggaaggctaccagaatttcatatttcagcttcaaaagcactcccagtgcagtgaggccataattacagttttgtgtgggacagaaggggcccaggatggcttgagcaagcccaagaatggttctgatggggaagaaatgaccttttcaagtttgcaccaagtgcgatacgtgaaacacgtgaaaatcctcggtccgctggccccagagatgattgacagcagggtgctggagaac

SEQ ID NO: 3776 - DNA, 611 bp, Homo sapiens
  source 1..611: mol_type = unassigned DNA; mol_type = unassigned DNA
tagaagaaggtgcattcataaacctgcttgcccctttgttcaatgagaaggccacattattactggaatccaggaggctaagaagtcccgcttgccaatcctaataaaaccatcccggtcattaggaaatatgtatcgtctccctgccacccaggaggtggtgacgcagctgcagagccagatcttggagctgcagggggagctgaaggagtttaaaacttgtaataagcaacttcaccaaaagttaattctggctgaagcagtgatggaggggaggccaacgcccgacaaaacgttgctgaatgctcagccccctgtgggagcagcctaccaggacagcccaggagagcagaaaggaattaaaaccacatcttctgtctggagagacaaggaaatggacagtgatcagcaaagaagctacgagattgactctgagatttgcccacctgatgaccttgccagcttgccatcatgcaaagaaaatcctgaagatgttctgagcccaacttcagtagctacttacctgagttccaagagtcagccttctgctaaagtcagtgtgatggggactgatcagtcagagagcattaatacctcaaatgagacagaat

SEQ ID NO: 3777 - DNA, 565 bp, Homo sapiens
  source 1..565: mol_type = unassigned DNA; mol_type = unassigned DNA
agaaaactggagccagagtccttggttttgccctggtgagacggatccagatctgcgacacagattgactcactgttgggcagggcaagactgattgaggagttgaagctgtctttgaagagcaaagaagctttaattcagtgccttaaagaggagaaatctcagatggcatgtcctgatgagaatgtgtcatctggagagctccgaggactttgtgctgctccaagggaagaaaaggagagagaaactgaggctgcacaaatggagcatcagaaggagagaaacagctttgaagagaggatccaggcacttgaagaggacctgagagagaaggaaagagaaattgctacagagaagaaaaatagtctaaagagggataaagccattcagggtttaaccatggcattaaaatcaaaggaaaaaaaggttgaagaacttaactctgaaattgaaaagctcagtgctgcctttgctaaagccagagaggccctacagaaagcacagacccaggaatttcaggggtctgaagactatgagactgctctatcaggaaaggaagcccttt

SEQ ID NO: 3778 - DNA, 389 bp, Homo sapiens
  source 1..389: mol_type = unassigned DNA; mol_type = unassigned DNA
agcgggtgaaagaagatgctcgaaagaaggtgcagcaggtggaagatctcctaactaaaagaatactccttttggaaaaggatgtgacagccgcccaggcagaactggaaaaggcctttgcagggacagagacggagaaggctcttcggttgcgtttggaaagcaagctttcagagatgaagaagatgcacgagggggacttggcgatggctctggtcctggatgagaaagacaggctgcacaaatggagcatcagaaggagagaaacagctttgaagagaggatccaggcacttgaagaggacctgagagagaaggaaagagaaattgctacagagaagaaaaatagtctaaagagggataaagccattcagggtttaaccatggcat

SEQ ID NO: 3779 - DNA, 970 bp, Homo sapiens
  source 1..970: mol_type = unassigned DNA; mol_type = unassigned DNA
ggggagcccggcgggtcgctatcgcggggggtactagtggcgccgccgccacagacaccaacgctgtcgccacctctgtagccatgatggacttggtgttggaagaggacgtcaccgtccctgggacgctcagcggctgcagtggccttgttcccagtgtaccagatgacctggatggcatcaaccccaatgctgggttgggaaatggtctgctcccaaatgtgtcagaagaaacagtgtctcccaccagagcacggaacatgaaggactttgaaaatcaaatcactgaattgaagaaagaaaactttaacctaaagctccgcatctatttccttgaggaaagaatgcaacaggaatttcatggccccactgaacatatctacaaaactaacattgagctcaaggtggaagtagaaagtctgaagcgggaactccaggagagagagcagctgctcatcaaagcctccaaagcagttgagagcttagctgaagcaggtggctctgaaatccagcgggtgaaagaagatgctcgaaagaaggtgcagcaggtggaagatctcctaactaaaagaatactccttttggaaaaggatgtgacagccgcccaggcagaactggaaaaggcctttgcagggacagagacggagaaggctcttcggttgcgtttggaaagcaagctttcagagatgaagaagatgcacgagggggacttggcgatggctctggtcctggatgagaaagacagactgattgaggagttgaagctgtctttgaagagcaaagaagctttaattcagtgccttaaagaggagaaatctcagatggcatgtcctgatgagaatgtgtcatctggagagctccgaggactttgtgctgctccaagggaagaaaaggagagagaaactgagtagtgggggaaggagagaaacagctttgaagagaggatccaggcacttgaagaggacctgag

SEQ ID NO: 3780 - DNA, 546 bp, Homo sapiens
  source 1..546: mol_type = unassigned DNA; mol_type = unassigned DNA
ctcgtttccgtaggaagaagcgccgggaaagatggcggcgtctgtggtttgaattccagcggcgccgccagagtctgaacaagagctggggtggagggggcggggacctggggagcccggcgggtcgctatcgcggggggtactagtggcgccgccgccacagacaccaacgctgtcgccacctctgtagccatgatggacttggtgttggaagaggacgtcaccgtccctgggacgctcagcggctgcagtggccttgttcccagtgtaccagatgacctggatggcatcaaccccaatgctgggttgggaaatggtcgtaagtacacaaaaccaggcattctcttgagtaaagaacaaggaaagtagacattggactgtgagcatcttgagctttcatatctctggggcccagaggcttccctgaactggcacaccgtaggtgctcagtattttttgtatgtattgatttgctttccacctcctttcataaacactggactagaggaattgttgtccttttggccatacttcatgagtttcatt

SEQ ID NO: 3781 - DNA, 5551 bp, Homo sapiens
  source 1..5551: mol_type = unassigned DNA; mol_type = unassigned DNA
ctcgtttccgtaggaagaagcgccgggaaagatggcggcgtctgtggtttgaattccagcggcgccgccagagtctgaacaagagctggggtggagggggcggggacctggggagcccggcgggtcgctatcgcggggggtactagtggcgccgccgccacagacaccaacgctgtcgccacctctgtagccatgatggacttggtgttggaagaggacgtcaccgtccctgggacgctcagcggctgcagtggccttgttcccagtgtaccagatgacctggatggcatcaaccccaatgctgggttgggaaatggtctgctcccaaatgtgtcagaagaaacagtgtctcccaccagagcacggaacatgaaggactttgaaaatcaaatcactgaattgaagaaagaaaactttaacctaaagctccgcatctatttccttgaggaaagaatgcaacaggaatttcatggccccactgaacatatctacaaaactaacattgagctcaaggtggaagtagaaagtctgaagcgggaactccaggagagagagcagctgctcatcaaagcctccaaagcagttgagagcttagctgaagcaggtggctctgaaatccagcgggtgaaagaagatgctcgaaagaaggtgcagcaggtggaagatctcctaactaaaagaatactccttttggaaaaggatgtgacagccgcccaggcagaactggaaaaggcctttgcagggacagagacggagaaggctcttcggttgcgtttggaaagcaagctttcagagatgaagaagatgcacgagggggacttggcgatggctctggtcctggatgagaaagacagactgattgaggagttgaagctgtctttgaagagcaaagaagctttaattcagtgccttaaagaggagaaatctcagatggcatgtcctgatgagaatgtgtcatctggagagctccgaggactttgtgctgctccaagggaagaaaaggagagagaaactgaggctgcacaaatggagcatcagaaggagagaaacagctttgaagagaggatccaggcacttgaagaggacctgagagagaaggaaagagaaattgctacagagaagaaaaatagtctaaagagggataaagccattcagggtttaaccatggcattaaaatcaaaggaaaaaaaggttgaagaacttaactctgaaattgaaaagctcagtgctgcctttgctaaagccagagaggccctacagaaagcacagacccaggaatttcaggggtctgaagactatgagactgctctatcaggaaaggaagccctttcggctgcgctgcgctcacaaaacctcaccaagagtacagagaaccacagactgcgtagaagcattaagaagatcacccaggagctgagtgacttgcagcaggagagggagagactggagaaggacctggaggaagcccatcgagagaagagcaaaggagactgcaccatccgtgatcttagaaatgaagttgaaaaattacgcaatgaagtgaatgaaagagagaaagcaatggaaaatcgttacaagagtcttctgagtgaaagcaataaaaaattgcacaatcaagagcaagtgatcaaacatctaacagaaagtaccaatcagaaggacgtgttgcttcagaaattcaatgaaaaagatttggaagtaatacagcagaactgctatttaatggctgcagaggatcttgagctcaggagtgaaggcttaataacagaaaagtgctcttctcaacagccaccaggcagcaaaaccatcttctctaaggaaaagaaacaatcatcagactatgaagagctgattcaggtcttaaagaaagagcaggacatctatacccatctggtcaaatctctgcaggaatcagacagtatcaacaacctgcaggctgagttaaacaagatttttgccctgcggaagcaactggagcaggatgtgctttcatatcagaatttgcggaagaccttggaggagcagatcagcgaaattcggaggcgggaagaatcattttcactttatagtgatcaaacatcttatctaagtatttgccttgaagaaaacaatcggtttcaagtggaacatttttctcaagaagaacttaagaaaaaggtcagtgaccttatacagctagtgaaggagctgtatacagacaaccagcacctgaagaaaaccatttttgatctctcctgcatgggtttccagggaaatgggtttccagatagacttgcgtctacagaacaaacagaggaggctaagaagtcccgcttgccaatcctaataaaaccatcccggtcattaggaaatatgtatcgtctccctgccacccaggaggtggtgacgcagctgcagagccagatcttggagctgcagggggagctgaaggagtttaaaacttgtaataagcaacttcaccaaaagttaattctggctgaagcagtgatggaggggaggccaacgcccgacaaaacgttgctgaatgctcagccccctgtgggagcagcctaccaggacagcccaggagagcagaaaggaattaaaaccacatcttctgtctggagagacaaggaaatggacagtgatcagcaaagaagctacgagattgactctgagatttgcccacctgatgaccttgccagcttgccatcatgcaaagaaaatcctgaagatgttctgagcccaacttcagtagctacttacctgagttccaagagtcagccttctgctaaagtcagtgtgatggggactgatcagtcagagagcattaatacctcaaatgagacagaatacttaaaacagaaaatccatgacttggaaactgagctggaaggctaccagaatttcatatttcagcttcaaaagcactcccagtgcagtgaggccataattacagttttgtgtgggacagaaggggcccaggatggcttgagcaagcccaagaatggttctgatggggaagaaatgaccttttcaagtttgcaccaagtgcgatacgtgaaacacgtgaaaatcctcggtccgctggccccagagatgattgacagcagggtgctggagaacctcaaacagcagctggaggaacaggaatacaagctgcagaaggagcagaatttgaacatgcaacttttcagtgagatccataatctgcagaataagttcagagatctctcacctcccagatacgattcattagttcagtcccaagccagggagctctcccttcaacggcagcagattaaggatggccatggcatctgtgtcatctcccgtcaacacatgaacaccatgattaaggcatttgaggagttgctgcaggccagtgatgtggattactgtgtggccgagggtttccaggaacagctgaatcaatgtgctgagctgctggagaaattggaaaagctatttctcaacggaaaatcagttggagtggaaatgaacacccagaatgaactgatggagaggattgaggaagacaacttaacctaccaacatcttctgcctgaatctcctgagccttcagcctctcatgcgctctctgattatgaaacatctgaaaagtccttcttctcacgagaccagaagcaagataatgagacagagaagacttcagttatggtgaacagtttttctcaagacttactaatggaacacatacaggaaattcgaactttgagaaagcgtttagaagaatctattaaaacaaatgagaagctacggaaacagttggaacggcaaggatctgaatttgttcaaggttctacaagcatttttgcttctggttcagagcttcatagttctctaacatcagaaattcatttcttgaggaagcagaaccaggccctcaatgcaatgctcattaaaggatccagagataaacagaaggagaatgacaaattacgagagtccctctccaggaagaccgtgagcctggagcaccttcagcgggagtatgccagcgtgaaggaagaaaatgaaaggctgcagaaagaaggcagcgagaaggagagacacaaccagcagctgatccaggaggtccgctgcagcggccaggagctgagcagggtgcaggaggaggtgaagttgaggcagcagctgctctcacagaatgacaagctattgcagtctctccgagtggagctgaaggcgtatgagaagctggatgaagagcacaggagactgagagaggcgtcgggagaaggctggaaggggcaggatcctttcagggacctgcacagcctcctgatggagatccaggctctgcgcttgcaactagaaaggagcatcgaaaccagcagcactctgcagagcaggctcaaggaacagctggcaaggggggcagagaaggcacaggaaggagccctcactctggctgtccaagccgtgtccatccctgaggtgccccttcagcctgacaaacacgatggtgacaaatatcccatggaaagtgataattcatttgatctgtttgattcctcccaggcagtgacaccaaaatcagtttcagagactcctccactctctgggaatgacacggactccctctcctgcgacagtggcagttcggcaactagcactccgtgtgtgtcccgcctggtcactggccaccacctgtgggccagcaagaatggccgccatgtcctgggcctgattgaggactatgaggccctgctcaaacagatcagccagggacagaggctccttgctgaaatggacattcaaacccaagaggctcccagctccacaagtcaagagctgggaacaaagggtccacacccagcaccactgagcaagtttgtgagcagtgtgagcacggccaagctgaccctggaagaggcctacaggcggctgaagcttctctggagagtctcactccccgaggatggccagtgcccccttcactgtgagcagattggagaaatgaaggcagaggtcaccaaactacataaaaaattgtttgaacaagaaaagaagttgcaaaacaccatgaagcttttgcagctgagcaagcgccaggaaaaagtcatctttgatcaattggtcgtaacccacaaaatccttcggaaggccagaggaaacctggagcttaggcctgggggagcccatccaggaacatgcagtcccagcagaccaggctcctgagaagaactttcagccaataaagcttgtgcttcccccaccgagctcacgctgtctctttgttccaagtgtggttcctatttattgaggaagaaagagctgtctggccaaaggaaatctattttttcccttcatgttttctctctgaaagttggcttgagagttgttgtcagaaaggtgcaggtgctccacaaacgggtggtaaaaaggcctcgagctcttggatgttgtatttcagatcaggggcaggcaccggagttgaggctgtgcgccttggtgggcttcacgtcttcccctggatttgcttagtactcagccagtgccacagtttgaagattctcattaaatgattcatttcatttcaccttga

SEQ ID NO: 3782 - DNA, 1775 bp, Homo sapiens
  source 1..1775: mol_type = unassigned DNA; mol_type = unassigned DNA
gatccattttaagaagatttattcctctatgatggagaagtatgaaaaaattgggaaaattggagaaggatcctatggagttgttttcaaatgtagaaacagggacacgggtcagattgtggccatcaagaagtttctggaatcagaagatgaccctgtcataaagaaaattgcccttcgggaaatccgaatgctcaagcaactcaagcatcccaaccttgttaacctcctggaagtcttcaggaggaaacggaggcttcacctggtgtttgaatattgtgaccacacagttctccatgagttggacagataccaaagaggggtaccagaacatctcgtgaagagcataacttggcagacactgcaagctgtaaatttttgccataaacacaattgcatacatagagacgtgaagccagaaaatatcctcatcacgaaacattccgtgattaagctttgtgactttggatttgctcggcttttgactggaccgagtgactactatacagactacgtggctaccaggtggtaccgctcccctgagctgctggtgggggacacgcagtacggccccccggtggatgtttgggcaattggctgtgtctttgctgagctgctgtcaggagtgcctctgtggccaggaaaatcggatgtggatcagctgtatctgattaggaagaccttgggggatctcattcctaggcaccagcaagtgtttagcacgaatcagtacttcagtggagtgaaaattccagaccctgaagatatggaaccacttgaattaaaattcccaaacatctcttatcctgccctggggctcctaaagggctgtctccacatggaccctactcaaaggctgacatgtgaacagctgttgcatcacccatattttgaaaacatcagagaaatagaggatttggcaaaagaacacaacaaaccaacaaggaagaccctaagaaagagccgaaagcaccactgctttacagaaacatccaagttgcagtacctaccccagctaactggcagcagcatccttccagctttggataataagaagtactactgtgataccaagaaacttaactaccgttttccaaacatttaaaggagctaggagacatgattttaaaaaaggaatcaatagatgctttgaagaaaataaaacttatacagttgattgaaaacaattacaatgttgaaaacacaccaggagaaaacataagcaagaaactgggaggccaactggcaagatatgaagggaaattccagatccagtcttccatgcttgatgatggtgtccagaaaagaaaaaacctgtttggagttgcacttgtatttcagtttatgtaagtagccgaacttatggacagaatatgaactgtcccatacctctggcaaaactagatgatatcaaaaagatttatgcttcagttgtaccacatgccacacaagaaaaatgaaccacaaaatgcccatatatatttcctcggatctctgttgcctgagtcctatctcctgcctctcagattgtttcagcatcatatttaagatagttctatttcttgaaatcaaaatgtttaaaatcccatttcctgcttgctctatttcttgatttttatattttaaaacattttgagggtaacacttaggttcaaaatatttaaaagcatatgaattatcacaaaagcttggtaatttataatttaattatatgtttccacatttcatccttactttatcagtaaaggatacaccttagtcacttttgcaggcaa

SEQ ID NO: 3783 - DNA, 210 bp, Homo sapiens
  source 1..210: mol_type = unassigned DNA; mol_type = unassigned DNA
gggatctcattcctaggcaccagcaagtgtttagcacgaatcagtacttcagtggagtgaaaattccagaccctgaagatatggaaccacttgaattaaaattcccaaacatctcttatcctgccctggggctcctaaagttgcagtacctaccccagctaactggcagcagcatccttccagctttggataataagaagtactactgtg

SEQ ID NO: 3784 - DNA, 745 bp, Homo sapiens
  source 1..745: mol_type = unassigned DNA; mol_type = unassigned DNA
ggcaattggctgtgtctttgctgagctgctgtcaggagtgcctctgtggccaggaaaatcggatgtggatcagctgtatctgattaggaagaccttgggggatctcattcctaggcaccagcaagtgtttagcacgaatcagtacttcagtggagtgaaaattccagaccctgaagatatggaaccacttgaattaaaattcccaaacatctcttatcctgccctggggctcctaaagggctgtctccacatggaccctactcaaaggctgacatgtgaacagctgttgcatcacccatattttgaaaacatcagagaaatagaggatttggcaaaagaacacaacaaaccaacaaggaagaccctaagaaagagccgaaagcaccactgctttacagaaacatccaaggttataatttgaaatgatctcctacctgccacctggtacagagagttggaatctagacttgaggatggcagttgtggctttcagctccagcatcctcattccagcactaggagacaggtcataggatctatcaaccagggccccagggacatctgtctcctgaagccccctctccctgaatcctaaaggtgcccttgtcctgctgcttcctgatgccacacaggggccagggtttccagcctgcatgagcacaggtctcaacaaggtacatgagtatgagtccagctaaggagactttttgggctttggaaaatgaaatcagattttccccatgca

SEQ ID NO: 3785 - DNA, 2209 bp, Homo sapiens
  source 1..2209: mol_type = unassigned DNA; mol_type = unassigned DNA
acagcagaagactgccgtggaaccttccctactgtagaggaaagtgctgactttaagcaatttctgcagtcacgccttcctcttctttcctttctccctctcattcattcactgacgccgcagcactgatcagcacagacacagaagatgcctccaagggaccaaagggaataaccgcggttctgaggaccgtgacaaacactcatcgttgggtggggctctagtgcagtccgttggtgccaatattttataagcgacgttttcaaactatgtgaagatcctttcttttcttttctttctttcttttttttttttttttttttttttttttgagacggaatctcgctctgtcgcccgggctggagtgcagtggcgcgatctcggctcactgcaacctgcgcctcccaggttcacgcgattctcctgcctcagtctcctgagttgctgggactacgggcgcccatcaccacacccggctaattttttgtatctttagtagagacggagtttcagtatgttggccagactggtctcgaactcctgacctcaggtgatctgcccgcctcagcctcccaaagtgctgggattacaggcgtgagccaccattctcggctgaagatccattttaagaagatttattcctctatgatggagaagtatgaaaaaattgggaaaattggagaaggatcctatggagttgttttcaaatgtagaaacagggacacgggtcagattgtggccatcaagaagtttctggaatcagaagatgaccctgtcataaagaaaattgcccttcgggaaatccgaatgctcaagcaactcaagcatcccaaccttgttaacctcctggaagtcttcaggaggaaacggaggcttcacctggtgtttgaatattgtgaccacacagttctccatgagttggacagataccaaagaggggtaccagaacatctcgtgaagagcataacttggcagacactgcaagctgtaaatttttgccataaacacaattgcatacatagagacgtgaagccagaaaatatcctcatcacgaaacattccgtgattaagctttgtgactttggatttgctcggcttttgactggaccgagtgactactatacagactacgtggctaccaggtggtaccgctcccctgagctgctggtgggggacacgcagtacggccccccggtggatgtttgggcaattggctgtgtctttgctgagctgctgtcaggagtgcctctgtggccaggaaaatcggatgtggatcagctgtatctgattaggaagaccttgggggatctcattcctaggcaccagcaagtgtttagcacgaatcagtacttcagtggagtgaaaattccagaccctgaagatatggaaccacttgaattaaaattcccaaacatctcttatcctgccctggggctcctaaagggcagagtaccaattgcttcaagaacagaataaggtggagaaaatgatttttcattactacttctagaaactatttatttaatatgtgagtgccatttaggaatgactggaaggaactaaaatcatgactggtgtgttttcctgccttttcccccttcttattgcaactgaagtttcatctttcaaagaagaaaaaaatgacattaataagttaatacaattttgaagaagtaagaagaaggaattttctgttcttttagggctgtctccacatggaccctactcaaaggctgacatgtgaacagctgttgcatcacccatattttgaaaacatcagagaaatagaggatttggcaaaagaacacaacaaaccaacaaggaagaccctaagaaagagccgaaagcaccactgctttacagaaacatccaaggttataatttgaaatgatctcctacctgccacctggtacagagagttggaatctagacttgaggatggcagttgtggctttcagctccagcatcctcattccagcactaggagacaggtcataggatctatcaaccagggccccagggacatctgtctcctgaagccccctctccctgaatcctaaaggtgcccttgtcctgctgcttcctgatgccacacaggggccagggtttccagcctgcatgagcacaggtctcaacaaggtacatgagtatgagtccagctaaggagactttttgggctttggaaaatgaaatcagattttccccatgc

SEQ ID NO: 3786 - DNA, 2982 bp, Homo sapiens
  source 1..2982: mol_type = unassigned DNA
atggagctgtccactgatactggctggaatcagaagagtaatttcccgccttgtgactctcgtgtctccaaagaagaagcccaactccctttcccaacacctagcagctacggtgcagactcctccaaccagacttacgcacacaagtctcagtctgaaagagagcagcacaaggaagtacgtgctgtcctgaaccattgttctggcttggatggtggagaggagtctggcctttgtgggacaagtacccgcattgatgctggcactgggaacgggacggatgataaagtcactgatcagcacagacacagaagatgcctccaagggaccaaagggaataaccgcggttctgaggtgtggggactgctgttgcagggaaatgtggaccgctcaggaggggctcctagcgcaggcgtcttgctccgcagacgcggttacagctgcgctttgcacggcctgcggaagtttgcaaatctagcaggtctgctctcccggcagcaggactcggcccgcggcgtgagccaccattctcggctgaagatccattttaagaagatttattcctctatgatggagaagtatgaaaaaattgggaaaattggagaaggatcctatggagttgttttcaaatgtagaaacagggacacgggtcagattgtggccatcaagaagtttctggaatcagaagatgaccctgtcataaagaaaattgcccttcgggaaatccgaatgctcaaggccccaagcccctatgctgctgaaccttctctctgtggaatgaaaatggtaagaagaggaaagaaagaatttctgccagcagtggcagaaaaagtagatgctcctagcggagttggaggtcaaggacaggacagtgtcactgtgggatccctgggcagacgttctacctatggcagaaaacaagaaaaacaagtgagacaaagagaaggaatcatctactgctatgtggcagttttgcttcggatttactattttgaccagggttgtgttgccagggaggaagagcagtttcaggagcttgtgtttggccctttctgccatattggctcttacttcacaggtcatagaaccaatgtgaggccttacattttactactatcacggcccagccccttcaagacggctgctggtacctatgaggcaggtcttgtcattcttgagtgcagttatttcctcgcagagcaagaaccttattgccctactcaggcactgcaacaacctcatcctattataggtccgtgggccctagaaggaggtggggtagaatctaaggaggacaggcatccccctcctaaggaggcacctgcatcatgtgagggatttttaaggtctgcagtgccgaagcaagcttacaccccattcaaaaccagccctgacaaaaggcttagtgactgtgttgctacacctccctgggctcctcccaccccacttatcatcagcagtggggtccttgttgccatctgctccatgattgatccagttccagaattccattctgaaggcctgctagctaaggccacttcaggaagtgctggaatcctggtatggatatttttatgcaatgatgcttttatttatggaaagtatattctcagaagtggagtgctatgggttcgtggtctccctggcttcaagagtgaagctgcagccctttgccataagtgttacagcagtgcggacccaaagcgtgagcagcagcaagatttattgcaaagagtgaaagaacaaagcttccacagtgtgaatggtgcccaggctagacataaaggttctccaagtccccaccagactcaggagcccagctggcctcacccagtggatcccacaccaggccacaggtggagctgcctgccagtcccatgccgtgcgcccgcactcctcagtccttgggtggtcgatgggaccgggtgctgcggagcagggggcggttctgatcgtggaggctcggccgcgcaggagcccacgcaactcaagcatcccaaccttgttaacctcctggaagtcttcaggaggaaacggaggcttcacctggtgtttgaatattgtgaccacacagttctccatgagttggacagataccaaagaggcatatgcaacatctttgtgtgcactggaagaagacttggtgagcacacagaggccttgtccaagaaaaagaaaaaaggaggagggggtcccttcctgaagttgagggcagcctcttgcaggatcaccctgtttaagaatgttggctgtgggctggaaaccacaggtgatttgagtctaaattctggagggggggccgcatctcgaggggtggctgcagctctcagagcacttgtgtgtgggacagagctgacatctagcgactctccccagaggtgcatacatagagacgtgaagccagaaaatatcctcatcacgaaacattccgtgattaagctttgtgactttggatttgctcggcttttgactggaccgagtgactactatacagactacgtggctaccaggtggtaccgctcccctgagctgctggtgggggacacgcagtacggccccccggtggatgtttgggcaattggctgtgtctttgctgagctgctgtcaggagtgcctctgtggccaggaaaatcggatgtggatcagctgtatctgattaggaagaccttgggggatctcattcctaggcaccagcaagtgtttagcacgaatcagtacttcagtggagtgaaaattccagaccctgaagatatgtccctctgcctgtcagtaaccctgacagagggaggcctgcttgcttctggggctgtgaaacgctcacagatgggctccagcgtatcacaggcaaccagttggcctcatccagacattgttgctgagacagcagagctcgatgatatagcaatggcacgtcaaaccccagtgatgctcagattcaaccgacagaaagaacaagagaaatatttaagctatggagcatga

SEQ ID NO: 3787 - DNA, 487 bp, Homo sapiens
  source 1..487: mol_type = unassigned DNA
ctgtatttttctctgctaagaccggctaccctactttcattttcctttcactcttcttggctcttttgggccttttaggaatttgggatgattcaggctctgacaggcatgtgcatacatagagacgtgaagccagaaaatatcctcatcacgaaacattccgtgattaagctttgtgactttggatttgctcggcttttgactggaccgagtgactactatacagactacgtggctaccaggtggtaccgctcccctgagctgctggtgggggacacgcagtacggccccccggtggatgtttgggcaattggctgtgtctttgctgagctgctgtcaggagtgcctctgtggccaggaaaatcggatgtggatcagctgtatctgattaggaagaccttgggggatctcattcctaggcaccagcaagtgtttagcacgaatcagtacttcagtggagtgaaaattccagaccctgaagatatgg

SEQ ID NO: 3788 - DNA, 673 bp, Homo sapiens
  source 1..673: mol_type = unassigned DNA
atttgaatttcagataaacaagcataacttttagtataagtacatcccaagtgcttcatgggatgtattatcctaaaaaaattatttgtttatctgaaattcaaatttaactgggtgtcctgtatttttctctgctaagaccggctaccctactttcattttcctttcactcttcttggctcttttgggccttttaggaatttgggatgattcaggctctgacaggcatggtactagatttattttaggctgctcttttgctgttgtccaacaggccaaggagagatttaaatgatttatccaatatttgctaaatagtcatgtgtttcatttatcccatatatagttcagccttaatattgtttttgttttgatttgttacactagtgcatacatagagacgtgaagccagaaaatatcctcatcacgaaacattccgtgattaagctttgtgactttggatttgctcggcttttgactggaccgagtgactactatacagactacgtggctaccaggtggtaccgctcccctgagctgctggtgggggacacgcagtacggccccccggtggatgtttgggcaattggctgtgtctttgctgagctgctgtcaggagtgcctctgtggccaggaaaatcggatgtggatcagctgtatctgattaggaaga

SEQ ID NO: 3789 - DNA, 573 bp, Homo sapiens
  source 1..573: mol_type = unassigned DNA
atctggaggtggggcatgctttagagacaggaaactgaacacatcctgaaatgaaagggagtgtgagccttctaggaagtgagagaaattcagtgggtccagaaggaagttataagtgttggggctggagagcttggagtgccctcagttctaagatccaaacgtgtctggaattggtgggttcttggtctcactgacttcaagaatgaagccacagactctcgcgcaactcaagcatcccaaccttgttaacctcctggaagtcttcaggaggaaacggaggcttcacctggtgtttgaatattgtgaccacacagttctccatgagttggacagataccaaagaggggtaccagaacatctcgtgaagagcataacttggcagacactgcaagctgtaaatttttgccataaacacaattgcatacatagagacgtgaagccagaaaatatcctcatcacgaaacattccgtgattaagctttgtgactttggatttgctcggcttttgactggaccgagtgactactatacagactacgtggctaccaggtggtaccgctcccctgagct

SEQ ID NO: 3790 - DNA, 704 bp, Homo sapiens
  source 1..704: mol_type = unassigned DNA
gttgctgggactacgggcgcccatcaccacacccggctaattttttgtatctttagtagagacggagtttcagtatgttggccagactggtctcgaactcctgacctcaggtgatctgcccgcctcagcctcccaaagtgctgggattacaggcgtgagccaccattctcggctgaagatccattttaagaagatttattcctctatgatggagaagtatgaaaaaattgggaaaattggagaaggatcctatggagttgttttcaaatgtagaaacagggacacgggtcagattgtggccatcaagaagtttctggaatcagaagatgaccctgtcataaagaaaattgcccttcgggaaatccgaatgctcaagcaactcaagcatcccaaccttgttaacctcctggaagtcttcaggaggaaacggaggcttcacctggtgtttgaatattgtgaccacacagttctccatgagttggacagataccaaagaggtgaccacagcacagacttttcatatttcagaatgttaatttacatagccagagagagccaagaggacagacacctcccttcagaaagtcatcgatacagagaaattatgttttcaaaggagaaaacatttcgtatgttgatatttgatcttttgacagcttgcaagtgacacttcaattaaacttgttaatataagttactcatgg

SEQ ID NO: 3791 - DNA, 311 bp, Homo sapiens
  source 1..311: mol_type = unassigned DNA
gagctgggcggaagaaggcgaggcgggagccaggcccgtccctgaccgccgcggcgccgtgagtcccgggcgggcaaggaggcgcgggccgtccctggccaacacgtggcaccgctccatgctgcgcggcgcggctgaggaccgtgacaaacactcatcgttgggtggggctctagtgcagtccgttggtgccaatattttataagcgacgttttcaaactatgtgaagatcctttcttttcttttctttctttcttttttttttttttttttttttttttttgagacggaatctcgctctgtcgcccggg

SEQ ID NO: 3792 - DNA, 192 bp, Homo sapiens
  source 1..192: mol_type = unassigned DNA
gagccgagctgggcggaagaaggcgaggcgggagccaggcccgtccctgaccgccgcggcgccgaccgtgacaaacactcatcgttgggtggggctctagtgcagtccgttggtgccaatattttataagcgacgttttcaaactatgtgaagatcctttcttttcttttctttctttcttttttttttttt

SEQ ID NO: 3793 - DNA, 604 bp, Homo sapiens
  source 1..604: mol_type = unassigned DNA
aggaaggggatggtaggagacaggagacctctaaagaccccaggtcaccagacttctctgagccccagtttccccagcagtgtatacgggctatgtggggagtattcaggagacagacaactcactcgtcaaatcctccccttcctggccaacaaagctgctgcaaccacagggatttcttctgttcaggcgccatgtcagaaccggctggggatgtccgtcagaacccatgcggcagcaaggcctgccgccgcctcttcggcccagtggacagcgagcagctgagccgcgactgtgatgcgctaatggcgggctgcatccaggaggcccgtgagcgatggaacttcgactttgtcaccgagacaccactggagggtgacttcgcctgggagcgtgtgcggggccttggcctgcccaagctctaccttcccacggggccccggcgaggccgggatgagttgggaggaggcaggcggcctggcacctcacctgctctgctgcaggggacagcagaggaagaccatgtggacctgtcactgtcttgtacccttgtgcctcgctcaggggagcaggctgaagggtccccaggtggacctggagactc

SEQ ID NO: 3794 - DNA, 2180 bp, Homo sapiens
  source 1..2180: mol_type = unassigned DNA
gaggcgggcccgggcggggcggttgtatatcagggccgcgctgagctgcgccagctgaggtgtgagcagctgccgaagtcagttccttgtggagccggagctgggcgcggattcgccgaggcaccgaggcactcagaggaggcgccatgtcagaaccggctggggatgtccgtcagaacccatgcggcagcaaggcctgccgccgcctcttcggcccagtggacagcgagcagctgagccgcgactgtgatgcgctaatggcgggctgcatccaggaggcccgtgagcgatggaacttcgactttgtcaccgagacaccactggagggtgacttcgcctgggagcgtgtgcggggccttggcctgcccaagctctaccttcccacggggccccggcgaggccgggatgagttgggaggaggcaggcggcctggcacctcacctgctctgctgcaggggacagcagaggaagaccatgtggacctgtcactgtcttgtacccttgtgcctcgctcaggggagcaggctgaagggtccccaggtggacctggagactctcagggtcgaaaacggcggcagaccagcatgacagatttctaccactccaaacgccggctgatcttctccaagaggaagccctaatccgcccacaggaagcctgcagtcctggaagcgcgagggcctcaaaggcccgctctacatcttctgccttagtctcagtttgtgtgtcttaattattatttgtgttttaatttaaacacctcctcatgtacataccctggccgccccctgccccccagcctctggcattagaattatttaaacaaaaactaggcggttgaatgagaggttcctaagagtgctgggcatttttattttatgaaatactatttaaagcctcctcatcccgtgttctccttttcctctctcccggaggttgggtgggccggcttcatgccagctacttcctcctccccacttgtccgctgggtggtaccctctggaggggtgtggctccttcccatcgctgtcacaggcggttatgaaattcaccccctttcctggacactcagacctgaattctttttcatttgagaagtaaacagatggcactttgaaggggcctcaccgagtgggggcatcatcaaaaactttggagtcccctcacctcctctaaggttgggcagggtgaccctgaagtgagcacagcctagggctgagctggggacctggtaccctcctggctcttgatacccccctctgtcttgtgaaggcagggggaaggtggggtcctggagcagaccaccccgcctgccctcatggcccctctgacctgcactggggagcccgtctcagtgttgagccttttccctctttggctcccctgtaccttttgaggagccccagctaccctttttctccagctgggctctgcaattcccctctgctgctgtccctcccccttgtcctttcccttcagtaccctctcagctccaggtggctctgaggtgcctgtcccacccccacccccagctcaatggactggaaggggaagggacacacaagaagaagggcaccctagttctacctcaggcagctcaagcagcgaccgccccctcctctagctgtgggggtgagggtcccatgtggtggcacaggcccccttgagtggggttatctctgtgttaggggtatatgatgggggagtagatctttctaggagggagacactggcccctcaaatcgtccagcgaccttcctcatccaccccatccctccccagttcattgcactttgattagcagcggaacaaggagtcagacattttaagatggtggcagtagaggctatggacagggcatgccacgtgggctcatatggggctgggagtagttgtctttcctggcactaacgttgagcccctggaggcactgaagtgcttagtgtacttggagtattggggtctgaccccaaacaccttccagctcctgtaacatactggcctggactgttttctctcggctccccatgtgtcctggttcccgtttctccacctagactgtaaacctctcgagggcagggaccacaccctgtactgttctgtgtctttcacagctcctcccacaatgctgaatatacagcaggtgctcaataaatgattcttagtgactttacttgtaa

SEQ ID NO: 3795 - DNA, 793 bp, Homo sapiens
  source 1..793: mol_type = unassigned DNA
gagcagctgccgaagtcagttccttgtggagccggagctgggcgcggattcgccgaggcaccgaggcactcagaggagaaactgcaagttgggacttgtccctaggaaaatccagttgctgccaaggtcgtgcagtcactcagccctggagtcaagccagagcaggcaggcgccatgtcagaaccggctggggatgtccgtcagaacccatgcggcagcaaggcctgccgccgcctcttcggcccagtggacagcgagcagctgagccgcgactgtgatgcgctaatggcgggctgcatccaggaggcccgtgagcgatggaacttcgactttgtcaccgagacaccactggagggtgacttcgcctgggagcgtgtgcggggccttggcctgcccaagctctaccttcccacggggccccggcgaggccgggatgagttgggaggaggcaggcggcctggcacctcacctgctctgctgcaggggacagcagaggaagaccatgtggacctgtcactgtcttgtacccttgtgcctcgctcaggggagcaggctgaagggtccccaggtggacctggagactctcagggtcgaaaacggcggcagaccagcatgacagatttctaccactccaaacgccggctgatcttctccaagaggaagccctaatccgcccacaggaagcctgcagtcctggaagcgcgagggcctcaaaggcccgctctacatcttctgccttagtctcagtttgtgtgtcttaattattatttgtgttttaatttaaacacctcct

SEQ ID NO: 3796 - DNA, 616 bp, Homo sapiens
  source 1..616: mol_type = unassigned DNA
gctgccgaagtcagttccttgtggagccggagctgggcgcggattcgccgaggcaccgaggcactcagaggaggtgagagagcggcggcagacaacaggggaccccgggccggcggcccagagccgagccaagcgtgcccgcgtgtgtccctgcgtgtccgcgaggatgcgtgttcgcgggtgtgtgctgcgttcacaggtgtttctgcggcaggcgccatgtcagaaccggctggggatgtccgtcagaacccatgcggcagcaaggcctgccgccgcctcttcggcccagtggacagcgagcagctgagccgcgactgtgatgcgctaatggcgggctgcatccaggaggcccgtgagcgatggaacttcgactttgtcaccgagacaccactggagggtgacttcgcctgggagcgtgtgcggggccttggcctgcccaagctctaccttcccacggggccccggcgaggccgggatgagttgggaggaggcaggcggcctggcacctcacctgctctgctgcaggggacagcagaggaagaccatgtggacctgtcactgtcttgtacccttgtgcctcgctcaggggagcaggctgaagggtccccaggtg

SEQ ID NO: 3797 - DNA, 553 bp, Homo sapiens
  source 1..553: mol_type = unassigned DNA
cgccgaggcaccgaggcactcagaggaggtgagagagcggcggcagacaacaggggaccccgggccggcggcccagagccgagccaagcgtgcccgcgtgtgtccctgcgtgtccgcgaggatgcgtgttcgcgggtgtgtgctgcgttcacaggtgtttctgcggcagggtgacgcgcagccggagtggaagcagttttggcgggcgagcagcgccttgcaggaaactgactcatcactactccctccagcggtccgaggctctgcccacgcacctcccactccgcgcgtgatttcctggaggccggcgccccctcccggccctggcgggaatagcacacaggctttcccgcggagtggggctggccggcgcgaaccgccgcggctactcctgggctcatccgagatcaacccctatgccattaccaccccttcaaaggagcactccttaggttcaacagtattcactgagctcttactggaaattaaaatatggctgaagtctaaggcaggaaggccaataaaggaggctatttttaattgtttctaaaac

SEQ ID NO: 3798 - DNA, 2267 bp, Homo sapiens
  source 1..2267: mol_type = unassigned DNA; mol_type = unassigned DNA
agctgaggtgtgagcagctgccgaagtcagttccttgtggagccggagctgggcgcggattcgccgaggcaccgaggcactcagaggaggtgagagagcggcggcagacaacaggggaccccgggccggcggcccagagccgagccaagcgtgcccgcgtgtgtccctgcgtgtccgcgaggatgcgtgttcgcgggtgtgtgctgcgttcacaggtgtttctgcggcaggcgccatgtcagaaccggctggggatgtccgtcagaacccatgcggcagcaaggcctgccgccgcctcttcggcccagtggacagcgagcagctgagccgcgactgtgatgcgctaatggcgggctgcatccaggaggcccgtgagcgatggaacttcgactttgtcaccgagacaccactggagggtgacttcgcctgggagcgtgtgcggggccttggcctgcccaagctctaccttcccacggggccccggcgaggccgggatgagttgggaggaggcaggcggcctggcacctcacctgctctgctgcaggggacagcagaggaagaccatgtggacctgtcactgtcttgtacccttgtgcctcgctcaggggagcaggctgaagggtccccaggtggacctggagactctcagggtcgaaaacggcggcagaccagcatgacagatttctaccactccaaacgccggctgatcttctccaagaggaagccctaatccgcccacaggaagcctgcagtcctggaagcgcgagggcctcaaaggcccgctctacatcttctgccttagtctcagtttgtgtgtcttaattattatttgtgttttaatttaaacacctcctcatgtacataccctggccgccccctgccccccagcctctggcattagaattatttaaacaaaaactaggcggttgaatgagaggttcctaagagtgctgggcatttttattttatgaaatactatttaaagcctcctcatcccgtgttctccttttcctctctcccggaggttgggtgggccggcttcatgccagctacttcctcctccccacttgtccgctgggtggtaccctctggaggggtgtggctccttcccatcgctgtcacaggcggttatgaaattcaccccctttcctggacactcagacctgaattctttttcatttgagaagtaaacagatggcactttgaaggggcctcaccgagtgggggcatcatcaaaaactttggagtcccctcacctcctctaaggttgggcagggtgaccctgaagtgagcacagcctagggctgagctggggacctggtaccctcctggctcttgatacccccctctgtcttgtgaaggcagggggaaggtggggtcctggagcagaccaccccgcctgccctcatggcccctctgacctgcactggggagcccgtctcagtgttgagccttttccctctttggctcccctgtaccttttgaggagccccagctaccctttttctccagctgggctctgcaattcccctctgctgctgtccctcccccttgtcctttcccttcagtaccctctcagctccaggtggctctgaggtgcctgtcccacccccacccccagctcaatggactggaaggggaagggacacacaagaagaagggcaccctagttctacctcaggcagctcaagcagcgaccgccccctcctctagctgtgggggtgagggtcccatgtggtggcacaggcccccttgagtggggttatctctgtgttaggggtatatgatgggggagtagatctttctaggagggagacactggcccctcaaatcgtccagcgaccttcctcatccaccccatccctccccagttcattgcactttgattagcagcggaacaaggagtcagacattttaagatggtggcagtagaggctatggacagggcatgccacgtgggctcatatggggctgggagtagttgtctttcctggcactaacgttgagcccctggaggcactgaagtgcttagtgtacttggagtattggggtctgaccccaaacaccttccagctcctgtaacatactggcctggactgttttctctcggctccccatgtgtcctggttcccgtttctccacctagactgtaaacctctcgagggcagggaccacaccctgtactgttctgtgtctttcacagctcctcccacaatgctgaatatacagcaggtgctcaataaatgattcttagtgactttacttgt

SEQ ID NO: 3799 - DNA, 2102 bp, Homo sapiens
  source 1..2102: mol_type = unassigned DNA; mol_type = unassigned DNA
aacatgttgagctctggcatagaagaggctggtggctattttgtccttgggctgcctgttttcaggcgccatgtcagaaccggctggggatgtccgtcagaacccatgcggcagcaaggcctgccgccgcctcttcggcccagtggacagcgagcagctgagccgcgactgtgatgcgctaatggcgggctgcatccaggaggcccgtgagcgatggaacttcgactttgtcaccgagacaccactggagggtgacttcgcctgggagcgtgtgcggggccttggcctgcccaagctctaccttcccacggggccccggcgaggccgggatgagttgggaggaggcaggcggcctggcacctcacctgctctgctgcaggggacagcagaggaagaccatgtggacctgtcactgtcttgtacccttgtgcctcgctcaggggagcaggctgaagggtccccaggtggacctggagactctcagggtcgaaaacggcggcagaccagcatgacagatttctaccactccaaacgccggctgatcttctccaagaggaagccctaatccgcccacaggaagcctgcagtcctggaagcgcgagggcctcaaaggcccgctctacatcttctgccttagtctcagtttgtgtgtcttaattattatttgtgttttaatttaaacacctcctcatgtacataccctggccgccccctgccccccagcctctggcattagaattatttaaacaaaaactaggcggttgaatgagaggttcctaagagtgctgggcatttttattttatgaaatactatttaaagcctcctcatcccgtgttctccttttcctctctcccggaggttgggtgggccggcttcatgccagctacttcctcctccccacttgtccgctgggtggtaccctctggaggggtgtggctccttcccatcgctgtcacaggcggttatgaaattcaccccctttcctggacactcagacctgaattctttttcatttgagaagtaaacagatggcactttgaaggggcctcaccgagtgggggcatcatcaaaaactttggagtcccctcacctcctctaaggttgggcagggtgaccctgaagtgagcacagcctagggctgagctggggacctggtaccctcctggctcttgatacccccctctgtcttgtgaaggcagggggaaggtggggtcctggagcagaccaccccgcctgccctcatggcccctctgacctgcactggggagcccgtctcagtgttgagccttttccctctttggctcccctgtaccttttgaggagccccagctaccctttttctccagctgggctctgcaattcccctctgctgctgtccctcccccttgtcctttcccttcagtaccctctcagctccaggtggctctgaggtgcctgtcccacccccacccccagctcaatggactggaaggggaagggacacacaagaagaagggcaccctagttctacctcaggcagctcaagcagcgaccgccccctcctctagctgtgggggtgagggtcccatgtggtggcacaggcccccttgagtggggttatctctgtgttaggggtatatgatgggggagtagatctttctaggagggagacactggcccctcaaatcgtccagcgaccttcctcatccaccccatccctccccagttcattgcactttgattagcagcggaacaaggagtcagacattttaagatggtggcagtagaggctatggacagggcatgccacgtgggctcatatggggctgggagtagttgtctttcctggcactaacgttgagcccctggaggcactgaagtgcttagtgtacttggagtattggggtctgaccccaaacaccttccagctcctgtaacatactggcctggactgttttctctcggctccccatgtgtcctggttcccgtttctccacctagactgtaaacctctcgagggcagggaccacaccctgtactgttctgtgtctttcacagctcctcccacaatgctgaatatacagcaggtgctcaataaatgattcttagtgactttacttgt

SEQ ID NO: 3800 - DNA, 2104 bp, Homo sapiens
  source 1..2104: mol_type = unassigned DNA; mol_type = unassigned DNA
ggtggctattttgtccttgggctgcctgttttcagctgctgcaaccacagggatttcttctgttcaggcgccatgtcagaaccggctggggatgtccgtcagaacccatgcggcagcaaggcctgccgccgcctcttcggcccagtggacagcgagcagctgagccgcgactgtgatgcgctaatggcgggctgcatccaggaggcccgtgagcgatggaacttcgactttgtcaccgagacaccactggagggtgacttcgcctgggagcgtgtgcggggccttggcctgcccaagctctaccttcccacggggccccggcgaggccgggatgagttgggaggaggcaggcggcctggcacctcacctgctctgctgcaggggacagcagaggaagaccatgtggacctgtcactgtcttgtacccttgtgcctcgctcaggggagcaggctgaagggtccccaggtggacctggagactctcagggtcgaaaacggcggcagaccagcatgacagatttctaccactccaaacgccggctgatcttctccaagaggaagccctaatccgcccacaggaagcctgcagtcctggaagcgcgagggcctcaaaggcccgctctacatcttctgccttagtctcagtttgtgtgtcttaattattatttgtgttttaatttaaacacctcctcatgtacataccctggccgccccctgccccccagcctctggcattagaattatttaaacaaaaactaggcggttgaatgagaggttcctaagagtgctgggcatttttattttatgaaatactatttaaagcctcctcatcccgtgttctccttttcctctctcccggaggttgggtgggccggcttcatgccagctacttcctcctccccacttgtccgctgggtggtaccctctggaggggtgtggctccttcccatcgctgtcacaggcggttatgaaattcaccccctttcctggacactcagacctgaattctttttcatttgagaagtaaacagatggcactttgaaggggcctcaccgagtgggggcatcatcaaaaactttggagtcccctcacctcctctaaggttgggcagggtgaccctgaagtgagcacagcctagggctgagctggggacctggtaccctcctggctcttgatacccccctctgtcttgtgaaggcagggggaaggtggggtcctggagcagaccaccccgcctgccctcatggcccctctgacctgcactggggagcccgtctcagtgttgagccttttccctctttggctcccctgtaccttttgaggagccccagctaccctttttctccagctgggctctgcaattcccctctgctgctgtccctcccccttgtcctttcccttcagtaccctctcagctccaggtggctctgaggtgcctgtcccacccccacccccagctcaatggactggaaggggaagggacacacaagaagaagggcaccctagttctacctcaggcagctcaagcagcgaccgccccctcctctagctgtgggggtgagggtcccatgtggtggcacaggcccccttgagtggggttatctctgtgttaggggtatatgatgggggagtagatctttctaggagggagacactggcccctcaaatcgtccagcgaccttcctcatccaccccatccctccccagttcattgcactttgattagcagcggaacaaggagtcagacattttaagatggtggcagtagaggctatggacagggcatgccacgtgggctcatatggggctgggagtagttgtctttcctggcactaacgttgagcccctggaggcactgaagtgcttagtgtacttggagtattggggtctgaccccaaacaccttccagctcctgtaacatactggcctggactgttttctctcggctccccatgtgtcctggttcccgtttctccacctagactgtaaacctctcgagggcagggaccacaccctgtactgttctgtgtctttcacagctcctcccacaatgctgaatatacagcaggtgctcaataaatgattcttagtgactttacttgt

SEQ ID NO: 3801 - DNA, 1860 bp, Homo sapiens
  source 1..1860: mol_type = unassigned DNA
agcggcggaggtggagcggggagaggcgttaggccgggcggctaaaacgcgccgttaaagtgggggagagattgcgcggagcccacgcgatccctgggacgccggagacaacggggctcttgggaaggcgcggagcccggggaagccggggatgtgcgcgtgagccgtgcccgcagggtctccccgcctccgccacctttcttgggtggctctccgcctcgtcctccctccgagggccgttggtacattcctagtgactccaagcgcttaaaaggggcccgggaggatgaaccccacagatctgaacctgatttgtgtgtgcaccgcgtctccagcgatcccggatccactgcgctgccaggggcctgggggtgggtctcttgctgtctctgcgacgacatccttacgtttcggcactctaatgctgggtttgtgcgtgtgtgtctgcttagcggtctagcgggctgttaggctccctcgcccccagctccttggctcgctcagctcctccaccgcagcccagcagtgagacgcgcgcgcagccagctccccacgagatggaacagaccgaagtgctgaagccacggaccctggctgatctgatccgcatcctgcaccagctctttgccggcgatgaggtcaatgtagaggaggtgcaggccatcatggaagcctacgagagcgaccccaccgagtgggcaatgtacgccaagttcgaccagtacaggtatacccgaaatcttgtggatcaaggaaatggaaaatttaatctgatgattctctgttggggtgaaggacatggcagcagtattcatgatcataccaactcccactgctttctgaagatgctacagggaaatctaaaggagacattatttgcctggcctgacaaaaaatccaatgagatggtcaagaagtctgaaagagtcttgagggaaaaccagtgtgcctacatcaatgattccattggcttacatcgagtagagaacatcagccatacggaacctgctgtgagccttcacttgtacagtccaccttttgatacatgccatgcctttgatcaaagaacaggacataaaaacaaagtcacaatgacattccatagtaaatttggaatcagaactccaaatgcaacttcgggctcgctggagaacaactaaggggcaccaaaccctctgaggttttactttaaggttcgctgtatgtttgccttggacaaaaaggctacctaccacgtgctatccagtaatatacttaaataagccaatacttagatctactgtaaggcagatgctaattataaggcattaagtaagcaaatagtgccctcagctactgcagaagaaaagtcccactgaggaaaagaaagtcttgtgatttttaaaggcaagttttcaagtgctctcatagttctatcctctaattccattaaatccatactaggagcgtcagtgagggttttcatagcttttggaaatactttggtctctgaactgtaattagcaagaagtaaaaacagaaacgtcaaacgtcaaatgtttgctttgttacctggaggactaaatgtagatgtctttagtatactttgtatgttcttaatattggaagataattttgtgaatctgtagattttattttttcagtcttaccttacaaatttcttttctatgaataatagaggaacttacggcactctgccatttgttaatgaaaggaagtgcagaggatttagaaaagtacatgatccccagaccacaacaaaccaaaacataaactcatgtctgtgtcccatggtcatagtcaaagattttgtactgctaaaattaccaaataatttaaataaagtggatttgaacacaa

SEQ ID NO: 3802 - DNA, 752 bp, Homo sapiens
  source 1..752: mol_type = unassigned DNA; mol_type = unassigned DNA
agatctgaacctgatttgtgtgtgcaccgcgtctccagcgatcccggatccactgcgctgccaggggcctgggggtatacccgaaatcttgtggatcaaggaaatggaaaatttaatctgatgattctctgttggggtgaaggacatggcagcagtattcatgatcataccaactcccactgctttctgaagatgctacagggaaatctaaaggagacattatttgcctggcctgacaaaaaatccaatgagatggtcaagaagtctgaaagagtcttgagggaaaaccagtgtgcctacatcaatgatgcaggagtaggggtggagatggatagtgatcagggggaaggatgttgcaagtacaaggaagagcacaagtgaagattccattggcttacatcgagtagagaacatcagccatacggaacctgctgtgagccttcacttgtacagtccaccttttgatacatgccatgcctttgatcaaagaacaggacataaaaacaaagtcacaatgacattccatagtaaatttggaatcagaactccaaatgcaacttcgggctcgctggagaacaactaaggggcaccaaaccctctgaggttttactttaaggttcgctgtatgtttgccttggacaaaaaggctacctaccacgtgctatccagtaatatacttaaataagccaatacttagatctactgtaaggcagatgctaattataaggcattaagtaagcaaatagtgccct

SEQ ID NO: 3803 - DNA, 273 bp, Homo sapiens
  source 1..273: mol_type = unassigned DNA
cctagcgctgtgaaggattctgttctctgactttgggagggccagtgcagaagaatcaagacagaatatgctcccgtgtgggccaggctgtgaattctttgaaagaagctgcagagaagcaacaaagattatcctaagacttctggaggaagaattaggatccttctgcaggaactcagtttactgtgaattgaaggtatacccgaaatcttgtggatcaaggaaatggaaaatttaatctgatgattctctgttggggtgaaggacatggca

SEQ ID NO: 3804 - DNA, 557 bp, Homo sapiens
  source 1..557: mol_type = unassigned DNA
agatctgaacctgatttgtgtgtgcaccgcgtctccagcgatcccggatccactgcgctgccaggggcctgggggtgggtctcttgctgtctctgcgacgacatccttacgtttcggcactctaatgctgggtttgtgcgtgtgtgtctgcttagcggtctagcgggctgttaggctccctcgcccccagctccttggctcgctcagctcctccaccgcagcccagcagtgagacgcgcgcgcagccagctccccacgagatggaacagaccgaagtgctgaagccacggaccctggctgatctgatccgcatcctgcaccagctctttgccggcgatgaggtcaatgtagaggaggtgcaggccatcatggaagcctacgagagcgaccccaccgagtgggcaatgtacgccaagttcgaccagtacagtcgtggtcgtggtttgcagtttgttgttggtggtggcagtggtggtggttggttgtggtatacccgaaatcttgtggatcaaggaaatggaaaatttaatctgatgattctctgttggggtgaagga

SEQ ID NO: 3805 - DNA, 3419 bp, Homo sapiens
  source 1..3419: mol_type = unassigned DNA
ggagagaggacctatttctacctaaggacattcccggaaggcaatgggtttcaaacaatatcctgaagagactcatctcggggaactaagcaggtggtcatcagagaacacagagcccccggaagaattttatgacatttcaggcaagccacaggtcagcctggggaaaaagcaggaagaaaaactggcaatacgagggcccaacccaaaagttattcctgaagagaaacaacgtgtcagcaccagatgggccttcagaccccagcatctccgtgagcagtgagcaaagcggggcacagcagcctcccgctttacaggttgaaaggattgttgacaaaaggaaaaataaaaaagggaagacagagtatttggttcggtggaaaggctatgacagcgaggacgacacttgggagccggaacagcacctcgtgaactgtgaggaatacatccacgacttcaacagacgccacacggagaagcagaaggagagcacattgaccagaacaaacaggacctctcccaacaatgctaggaaacaaatctccagatccaccaacagcaacttttctaagacctctcctaaggcactcgtgattgggaaagaccacgaatccaaaaacagccagctgtttgctgccagccagaagttcaggaagaacacagctccatctctctccagccggaagaacatggacctagcgaagtcaggtatcaagatcctcgtgcctaaaagccccgttaagagcaggaccgcagtggacggctttcagagcgagagccctgagaaactggaccccgtcgagcagggtcaggaggacacagtggcacccgaagtggcagcggaaaagccggtcggagctttattgggccccggtgccgagagggccaggatggggagcaggcccaggatacacccactagtgcctcaggtgcccggccctgtgactgcagccatggccacaggcttagctgttaacgggaaaggtacatctccgttcatggatgcattaacagccaatgggacaaccaacatacagacatctgttacaggagtgactgccagcaaaaggaaatttattgacgacagaagagaccagccttttgacaagcgattgcgtttcagcgtgaggcaaacagaaagtgcctacagatacagagatattgtggtcaggaagcaggatggcttcacccacatcttgttatccacaaagtcctcagagaataactcactaaatccagaggtaatgagagaagtccagagtgctctgagcacggccgctgccgatgacagcaagctggtactgctcagcgccgttggcagcgtcttctgttgtggacttgactttatttattttatacgacgtctgacagatgacaggaaaagagaaagcactaaaatggcagaagctatcagaaacttcgtgaatactttcattcaatttaagaagcccattattgtagcagtcaatggcccagccattggtctaggagcatctatattgcctctttgcgatgtggtttgggctaatgaaaaggcttggtttcaaacaccctataccaccttcggacagagtccagatggctgttctaccgttatgtttcccaagataatgggaggagcatctgcaaacgagatgctgctcagtggacggaagctgacagcgcaggaggcgtgtggcaagggcctggtctcccaggtgttttggcccgggacgttcactcaggaagtgatggttcgcattaaggagcttgcctcgtgcaatccagttgtgcttgaggaatccaaagccctcgtgcgctgcaacatgaagatggagctggagcaggccaacgagagggagtgtgaggtgctgaagaaaatctggggctcggcccaggggatggactccatgttaaagtacttgcagaggaagatcgatgagttctgagtgtcgggctgcccactggtgacaccgggatcgggctgagcaggagaacatcaccggctccagttcccctgatccattctcacagcctgaaacaagctcacccgtagcttacgcttggaagcaggactgggaacatccacgctatttattatcgaggagttttaaagtactgtaactttaaaataaataactacaaagcttctttgtccaaacgtcattattttatacttatatacacgcaggtgtaaaagtataaaggtgagcactagactgctcttagaagctctaatttttgttttctttggctagtactgtataaaaaacagaattgtgttttattggttttggatgacagaaaagtctggaataatgtttgttttcctcatttcttccttctagaacacagaatctaaaggggtattagccagcctcgcctccctgccccacgtagagacacagagtgatgtgaggcgttggctttttctccaagaaggtacagatacctcagattcgggaaactcaaaatcaaaagacttagcttctaggataaatacttctgatgaaaaatccgctgaggagcataccccaaaccagacatatgcttaggattcatgctgagatatcaattggtttccccttctttttaaaatacgtccagttcttacccagttaacatgaagaaaccactgtctctagaagaaagcttgttttgcagtattagtgaatcactgaatagcttaagtatgactatctaagttataagttagtctttagtgggttttaaatagtttttctgacccttctgaaaaataactacataagtgcttcttgttgctgggtgagaaatactactttatagacagttttggttttctgtttgcagatatgattgatgtatttcaccaaaataaaatatttttatgtttataaagtgtaatttttaggttcacttagaatatattttatttaataagttaaaattcttttggcacactattaaatgcaaaaactcctttcaaaacaaaaaagaactaccttatattcaacatttaatgttcttggcctctgcttttatgtctatacaatatactgagttcagtatggtgtccaagagtgccctgtgtggatagacatgtgcactccttccaggagtgggtactgattccagactccagatgcctattattagttaggcttctgagcttgcaatcatattgaatgtatgaagagcgaaatcaaattcttatttttgtacagttttgaagtttatacttagaactgaccacctccccggccacgcggagagctgtacagtgtgtaaatctgcctttatcttggattgattggtacagtatttttgcatctgtgggacctaccttttcgttcagtagtttgaactatatataaactgtacaatctgtaaagtttttatagaataaatattcagctgtgaaaactggttaaataaaactaatatttcttaacacattt

SEQ ID NO: 3806 - DNA, 614 bp, Homo sapiens
  source 1..614: mol_type = unassigned DNA
cgagggcccaacccaaaagttattcctgaagagaaacaacgggcctgagcagtagcctgcctgatgatgatcaagcagagccctgcaagtttcaagaggaatgtcagtgactcttcactgaaaccccccagtgtcagcaccagatgggccttcagaccccagcatctccgtgagcagtgagcaaagcggggcacagcagcctcccgctttacaggttgaaaggattgttgacaaaaggaaaaataaaaaagggaagacagagtatttggttcggtggaaaggctatgacagcgaggacgacacttgggagccggaacagcacctcgtgaactgtgaggaatacatccacgacttcaacagacgccacacggagaagcagaaggagagcacattgaccagaacaaacaggacctctcccaacaatgctaggaaacaaatctccagatccaccaacagcaacttttctaagacctctcctaaggcactcgtgattgggaaagaccacgaatccaaaaacagccagctgtttgctgccagccagaagttcaggaagaacacagctccatctctctccagccggaagaacatggacctagcgaagtcaggtatcaaga

SEQ ID NO: 3807 - DNA, 690 bp, Homo sapiens
  source 1..690: mol_type = unassigned DNA
agacatgcctggtttggctggtgattgggaaaagaggaggatctcagatttcaggttttagttatcattctcccgagatgggaagaggctgtgattcttgatctgaagagtcttatcgtcggtagaacttgccatcgatgatcaattgtttggatttgaggaggagagaattgaattatgttggcctacaacaacgggagcaggtcaggtacatctccgttcatggatgcattaacagccaatgggacaaccaacatacagacatctgttacaggagtgactgccagcaaaaggaaatttattgacgacagaagagaccagccttttgacaagcgattgcgtttcagcgtgaggcaaacagaaagtgcctacagatacagagatattgtggtcaggaagcaggatggcttcacccacatcttgttatccacaaagtcctcagagaataactcactaaatccagaggtaatgagagaagtccagagtgctctgagcacggccgctgccgatgacagcaagctggtactgctcagcgccgttggcagcgtcttctgttgtggacttgactttatttattttatacgacgtctgacagatgacaggaaaagagaaagcactaaaatggcagaagctatcagaaacttcgtgaatactttcattcaatttaagaagcccattattgtagcagtc

SEQ ID NO: 3808 - DNA, 773 bp, Homo sapiens
  source 1..773: mol_type = unassigned DNA
tcccgagatgggaagaggctgtgattcttgatctgaagagtcttatcgtcggtagaacttgccatcgatgatcaattgtttggatttgaggaggagagaattgaattatgttggcctacaacaacgggagcaggtcaggttgaaaggattgttgacaaaaggaaaaataaaaaagggaagacagagtatttggttcggtggaaaggctatgacagcgaggacgacacttgggagccggaacagcacctcgtgaactgtgaggaatacatccacgacttcaacagacgccacacggagaagcagaaggagagcacattgaccagaacaaacaggacctctcccaacaatgctaggaaacaaatctccagatccaccaacagcaacttttctaagacctctcctaaggcactcgtgattgggaaagaccacgaatccaaaaacagccagctgtttgctgccagccagaagttcaggaagaacacagctccatctctctccagccggaagaacatggacctagcgaagtcaggtatcaagatcctcgtgcctaaaagccccgttaagagcaggaccgcagtggacggctttcagagcgagagccctgagaaactggaccccgtcgagcagggtcaggaggacacagtggcacccgaagtggcagcggaaaagccggtcggagctttattgggccccggtgccgagagggccaggatggggagcaggcccaggatacacccactagtgcctcaggtgcccggccctgtgactgcagc

SEQ ID NO: 3809 - DNA, 2184 bp, Homo sapiens
  source 1..2184: mol_type = unassigned DNA
cggagaggggagccgcgatccggccgcgccgcccgcacgccgccgcgcccgccccagcccgcccggccccgcggcggggcgcgatgagcccgagcgcgagccggcccgccggggagtgagcgcggggcgcccagggcgcgttgcgtagctgctcctgcgcacaaccccgccgcgccgccggcccgcactggccgcggagtgcaagaggctcgtccgtgcccagcgcccggccggccgcgggagcaggaagcgcaggccacgcaggacccaactgaaacaaagtgtcggccgcccggcgccggcgcccgccccgaccctgcccctcccgcccgcaactccgccgcccaccatggcttccgaggagctgtacgaggttgaaaggattgttgacaaaaggaaaaataaaaaagggaagacagagtatttggttcggtggaaaggctatgacagcgaggacgacacttgggagccggaacagcacctcgtgaactgtgaggaatacatccacgacttcaacagacgccacacggagaagcagaaggagagcacattgaccagaacaaacaggacctctcccaacaatgctaggaaacaaatctccagatccaccaacagcaacttttctaagacctctcctaaggcactcgtgattgggaaagaccacgaatccaaaaacagccagctgtttgctgccagccagaagttcaggaagaacacagctccatctctctccagccggaagaacatggacctagcgaagtcaggtatcaagatcctcgtgcctaaaagccccgttaagagcaggaccgcagtggacggctttcagagcgagagccctgagaaactggaccccgtcgagcagggtcaggaggacacagtggcacccgaagtggcagcggaaaagccggtcggagctttattgggccccggtgccgagagggccaggatggggagcaggcccaggatacacccactagtgcctcaggtgcccggccctgtgactgcagccatggccacaggcttagctgttaacgggaaaggtacatctccgttcatggatgcattaacagccaatgggacaaccaacatacagacatctgttacaggagtgactgccagcaaaaggaaatttattgacgacagaagagaccagccttttgacaagcgattgcgtttcagcgtgaggcaaacagaaagtgcctacagatacagagatattgtggtcaggaagcaggatggcttcacccacatcttgttatccacaaagtcctcagagaataactcactaaatccagaggtaatgagagaagtccagagtgctctgagcacggccgctgccgatgacagcaagctggtactgctcagcgccgttggcagcgtcttctgttgtggacttgactttatttattttatacgacgtctgacagatgacaggaaaagagaaagcactaaaatggcagaagctatcagaaacttcgtgaatactttcattcaatttaagaagcccattattgtagcagtcaatggcccagccattggtctaggagcatctatattgcctctttgcgatgtggtttgggctaatgaaaaggcttggtttcaaacaccctataccaccttcggacagagtccagatggctgttctaccgttatgtttcccaagataatgggaggagcatctgcaaacgagatgctgctcagtggacggaagctgacagcgcaggaggcgtgtggcaagggcctggtctcccaggtgttttggcccgggacgttcactcaggaagtgatggttcgcattaaggagcttgcctcgtgcaatccagttgtgcttgaggaatccaaagccctcgtgcgctgcaacatgaagatggagctggagcaggccaacgagagggagtgtgaggtgctgaagaaaatctggggctcggcccaggggatggactccatgttaaagtacttgcagaggaagatcgatgagttctgagtgtcgggctgcccactggtgacaccgggatcgggctgagcaggagaacatcaccggctccagttcccctgatccattctcacagcctgaaacaagctcacccgtagcttacgcttggaagcaggactgggaacatccacgctatttattatcgaggagttttaaagtactgtaactttaaaataaataactacaaagct

SEQ ID NO: 3810 - DNA, 1764 bp, Homo sapiens
  source 1..1764: mol_type = unassigned DNA
gggagccgcgatccggccgcgccgcccgcacgccgccgcgcccgccccagcccgcccggccccgcggcggggcgcgatgagcccgagcgcgagccggcccgccggggagtgagcgcggggcgcccagggcgcgttgcgtagctgctcctgcgcacaaccccgccgcgccgccggcccgcactggccgcggagtgcaagaggctcgtccgtgcccagcgcccggccggccgcgggagcaggaagcgcaggccacgcaggacccaactgaaacaaagtgtcggccgcccggcgccggcgcccgccccgaccctgcccctcccgcccgcaactccgccgcccaccatggcttccgaggagctgtacgaggtacatctccgttcatggatgcattaacagccaatgggacaaccaacatacagacatctgttacaggagtgactgccagcaaaaggaaatttattgacgacagaagagaccagccttttgacaagcgattgcgtttcagcgtgaggcaaacagaaagtgcctacagatacagagatattgtggtcaggaagcaggatggcttcacccacatcttgttatccacaaagtcctcagagaataactcactaaatccagaggtaatgagagaagtccagagtgctctgagcacggccgctgccgatgacagcaagctggtactgctcagcgccgttggcagcgtcttctgttgtggacttgactttatttattttatacgacgtctgacagatgacaggaaaagagaaagcactaaaatggcagaagctatcagaaacttcgtgaatactttcattcaatttaagaagcccattattgtagcagtcaatggcccagccattggtctaggagcatctatattgcctctttgcgatgtggtttgggctaatgaaaaggcttggtttcaaacaccctataccaccttcggacagagtccagatggctgttctaccgttatgtttcccaagataatgggaggagcatctgcaaacgagatgctgctcagtggacggaagctgacagcgcaggaggcgtgtggcaagggcctggtctcccaggtgttttggcccgggacgttcactcaggaagtgatggttcgcattaaggagcttgcctcgtgcaatccagttgtgcttgaggaatccaaagccctcgtgcgctgcaacatgaagatggagctggagcaggccaacgagagggagtgtgaggtgctgaagaaaatctggggctcggcccaggggatggactccatgttaaagtacttgcagaggaagatcgatgagttctgagtgtcgggctgcccactggtgacaccgggatcgggctgagcaggagaacatcaccggctccagttcccctgatccattctcacagcctgaaacaagctcacccgtagcttacgcttggaagcaggactgggaacatccacgctatttattatcgaggagttttaaagtactgtaactttaaaataaataactacaaagcttctttgtccaaacgtcattattttatacttatatacacgcaggtgtaaaagtataaaggtgagcactagactgctcttagaagctctaatttttgttttctttggctagtactgtataaaaaacagaattgtgttttattggttttggatgacagaaaagtctggaataatgtttgttttcctcatttcttccttctagaacacagaatctaaaggggtattagccagcctcgcctccctgccccacgtagaga

SEQ ID NO: 3811 - DNA, 2139 bp, Homo sapiens
  source 1..2139: mol_type = unassigned DNA
actgtctggcactccctagtgagatgaacctggtacctcagatggaaatgctgaaatcacctgtcttctgcgtcgctcacgctgggagctgtagaccggagctgttcctattcggccatcttggctcctccccaaggcttaggtttctaagtcagccacaaatgctacccaaaactacataaagaagaaaaaagttgcatagaaccaaaaagttgaaaggattgttgacaaaaggaaaaataaaaaagggaagacagagtatttggttcggtggaaaggctatgacagcgaggacgacacttgggagccggaacagcacctcgtgaactgtgaggaatacatccacgacttcaacagacgccacacggagaagcagaaggagagcacattgaccagaacaaacaggacctctcccaacaatgctaggaaacaaatctccagatccaccaacagcaacttttctaagacctctcctaaggcactcgtgattgggaaagaccacgaatccaaaaacagccagctgtttgctgccagccagaagttcaggaagaacacagctccatctctctccagccggaagaacatggacctagcgaagtcaggtatcaagatcctcgtgcctaaaagccccgttaagagcaggaccgcagtggacggctttcagagcgagagccctgagaaactggaccccgtcgagcagggtcaggaggacacagtggcacccgaagtggcagcggaaaagccggtcggagctttattgggccccggtgccgagagggccaggatggggagcaggcccaggatacacccactagtgcctcaggtgcccggccctgtgactgcagccatggccacaggcttagctgttaacgggaaaggtacatctccgttcatggatgcattaacagccaatgggacaaccaacatacagacatctgttacaggagtgactgccagcaaaaggaaatttattgacgacagaagagaccagccttttgacaagcgattgcgtttcagcgtgaggcaaacagaaagtgcctacagatacagagatattgtggtcaggaagcaggatggcttcacccacatcttgttatccacaaagtcctcagagaataactcactaaatccagaggtaatgagagaagtccagagtgctctgagcacggccgctgccgatgacagcaagctggtactgctcagcgccgttggcagcgtcttctgttgtggacttgactttatttattttatacgacgtctgacagatgacaggaaaagagaaagcactaaaatggcagaagctatcagaaacttcgtgaatactttcattcaatttaagaagcccattattgtagcagtcaatggcccagccattggtctaggagcatctatattgcctctttgcgatgtggtttgggctaatgaaaaggcttggtttcaaacaccctataccaccttcggacagagtccagatggctgttctaccgttatgtttcccaagataatgggaggagcatctgcaaacgagatgctgctcagtggacggaagctgacagcgcaggaggcgtgtggcaagggcctggtctcccaggtgttttggcccgggacgttcactcaggaagtgatggttcgcattaaggagcttgcctcgtgcaatccagttgtgcttgaggaatccaaagccctcgtgcgctgcaacatgaagatggagctggagcaggccaacgagagggagtgtgaggtgctgaagaaaatctggggctcggcccaggggatggactccatgttaaagtacttgcagaggaagatcgatgagttctgagtgtcgggctgcccactggtgacaccgggatcgggctgagcaggagaacatcaccggctccagttcccctgatccattctcacagcctgaaacaagctcacccgtagcttacgcttggaagcaggactgggaacatccacgctatttattatcgaggagttttaaagtactgtaactttaaaataaataactacaaagcttctttgtccaaacgtcattattttatacttatatacacgcaggtgtaaaagtataaaggtgagcactagactgctcttagaagctctaatttttgttttctttggctagtactgtat

SEQ ID NO: 3812 - DNA, 3241 bp, Homo sapiens
  source 1..3241: mol_type = unassigned DNA
ggttaaggagggaggggaaacaaaagcagtgtgctccaccaggctcctgcctcggctctaaggaaacagaggaaagcaaacgggaatactctggtttagtatactgcccgcttctggagtggacattgatttaaggttgaaaggattgttgacaaaaggaaaaataaaaaagggaagacagagtatttggttcggtggaaaggctatgacagcgaggacgacacttgggagccggaacagcacctcgtgaactgtgaggaatacatccacgacttcaacagacgccacacggagaagcagaaggagagcacattgaccagaacaaacaggacctctcccaacaatgctaggaaacaaatctccagatccaccaacagcaacttttctaagacctctcctaaggcactcgtgattgggaaagaccacgaatccaaaaacagccagctgtttgctgccagccagaagttcaggaagaacacagctccatctctctccagccggaagaacatggacctagcgaagtcaggtatcaagatcctcgtgcctaaaagccccgttaagagcaggaccgcagtggacggctttcagagcgagagccctgagaaactggaccccgtcgagcagggtcaggaggacacagtggcacccgaagtggcagcggaaaagccggtcggagctttattgggccccggtgccgagagggccaggatggggagcaggcccaggatacacccactagtgcctcaggtgcccggccctgtgactgcagccatggccacaggcttagctgttaacgggaaaggtacatctccgttcatggatgcattaacagccaatgggacaaccaacatacagacatctgttacaggagtgactgccagcaaaaggaaatttattgacgacagaagagaccagccttttgacaagcgattgcgtttcagcgtgaggcaaacagaaagtgcctacagatacagagatattgtggtcaggaagcaggatggcttcacccacatcttgttatccacaaagtcctcagagaataactcactaaatccagaggtaatgagagaagtccagagtgctctgagcacggccgctgccgatgacagcaagctggtactgctcagcgccgttggcagcgtcttctgttgtggacttgactttatttattttatacgacgtctgacagatgacaggaaaagagaaagcactaaaatggcagaagctatcagaaacttcgtgaatactttcattcaatttaagaagcccattattgtagcagtcaatggcccagccattggtctaggagcatctatattgcctctttgcgatgtggtttgggctaatgaaaaggcttggtttcaaacaccctataccaccttcggacagagtccagatggctgttctaccgttatgtttcccaagataatgggaggagcatctgcaaacgagatgctgctcagtggacggaagctgacagcgcaggaggcgtgtggcaagggcctggtctcccaggtgttttggcccgggacgttcactcaggaagtgatggttcgcattaaggagcttgcctcgtgcaatccagttgtgcttgaggaatccaaagccctcgtgcgctgcaacatgaagatggagctggagcaggccaacgagagggagtgtgaggtgctgaagaaaatctggggctcggcccaggggatggactccatgttaaagtacttgcagaggaagatcgatgagttctgagtgtcgggctgcccactggtgacaccgggatcgggctgagcaggagaacatcaccggctccagttcccctgatccattctcacagcctgaaacaagctcacccgtagcttacgcttggaagcaggactgggaacatccacgctatttattatcgaggagttttaaagtactgtaactttaaaataaataactacaaagcttctttgtccaaacgtcattattttatacttatatacacgcaggtgtaaaagtataaaggtgagcactagactgctcttagaagctctaatttttgttttctttggctagtactgtataaaaaacagaattgtgttttattggttttggatgacagaaaagtctggaataatgtttgttttcctcatttcttccttctagaacacagaatctaaaggggtattagccagcctcgcctccctgccccacgtagagacacagagtgatgtgaggcgttggctttttctccaagaaggtacagatacctcagattcgggaaactcaaaatcaaaagacttagcttctaggataaatacttctgatgaaaaatccgctgaggagcataccccaaaccagacatatgcttaggattcatgctgagatatcaattggtttccccttctttttaaaatacgtccagttcttacccagttaacatgaagaaaccactgtctctagaagaaagcttgttttgcagtattagtgaatcactgaatagcttaagtatgactatctaagttataagttagtctttagtgggttttaaatagtttttctgacccttctgaaaaataactacataagtgcttcttgttgctgggtgagaaatactactttatagacagttttggttttctgtttgcagatatgattgatgtatttcaccaaaataaaatatttttatgtttataaagtgtaatttttaggttcacttagaatatattttatttaataagttaaaattcttttggcacactattaaatgcaaaaactcctttcaaaacaaaaaagaactaccttatattcaacatttaatgttcttggcctctgcttttatgtctatacaatatactgagttcagtatggtgtccaagagtgccctgtgtggatagacatgtgcactccttccaggagtgggtactgattccagactccagatgcctattattagttaggcttctgagcttgcaatcatattgaatgtatgaagagcgaaatcaaattcttatttttgtacagttttgaagtttatacttagaactgaccacctccccggccacgcggagagctgtacagtgtgtaaatctgcctttatcttggattgattggtacagtatttttgcatctgtgggacctaccttttcgttcagtagtttgaactatatataaactgtacaatctgtaaagtttttatagaataaatattcagctgtgaaaactggttaaataaaactaatatttcttaacacatttgaaa

SEQ ID NO: 3813 - DNA, 732 bp, Homo sapiens
  source 1..732: mol_type = unassigned DNA
cttaacctgcatagcctataaactgttttaagaggtacatctccgttcatggatgcattaacagccaatgggacaaccaacatacagacatctgttacaggagtgactgccagcaaaaggaaatttattgacgacagaagagaccagccttttgacaagcgattgcgtttcagcgtgaggcaaacagaaagtgcctacagatacagagatattgtggtcaggaagcaggatggcttcacccacatcttgttatccacaaagtcctcagagaataactcactaaatccagaggtaatgagagaagtccagagtgctctgagcacggccgctgccgatgacagcaagctggtactgctcagcgccgttggcagcgtcttctgttgtggacttgactttatttattttatacgacgtctgacagatgacaggaaaagagaaagcactaaaatggcagaagctatcagaaacttcgtgaatactttcattcaatttaagaagcccattattgtagcagtcaatggcccagccattggtctaggagcatctatattgcctctttgcgatgtggtttgggctaatgaaaaggcttggtttcaaacaccctataccaccttcggacagagtccagatggctgttctaccgttatgtttcccaagataatgggaggagcatctgtgagtacctttttaaaaaaaaaaaaaaaaagtcattctagaaagcttcctgaagaa

SEQ ID NO: 3814 - DNA, 8159 bp, Homo sapiens
  source 1..8159: mol_type = unassigned DNA
ctgtcattctgcaaaaacacagtttactcaacacaccacacacactcgcacacacacgcgcgcacacacacgcgcacaccggaccccgcgcgcacacgcacggagggcgcgagcgagcagacgcgcacaccggcgagccaagttccgcagcctggcatggcttctggggacctttacgaggttgaaaggattgtagacaagaggaagaacaagaaaggaaaatgggagtatcttatccgatggaaaggctacgggagcaccgaggacacgtgggagccggagcaccacctcttgcactgtgaggagtttattgatgaattcaatgggttgcacatgtccaaggacaagaggatcaagtcagggaagcagtccagtacctccaagctgctgcgtgacagtcgaggcccgtcggttgagaaactgtcccacagaccttcagatcctggaaagagcaaggggacctcccataaacggaagcgaattaaccctcccctggccaagccaaaaaaagggtattcaggcaagccctcttcaggaggtgacagggccaccaagacggtgtcttacaggactacccccagtggtttgcaaataatgcccctgaaaaagtctcagaacgggatggaaaatggggacgccggctctgagaaggatgagaggcactttggaaatgggtcccatcagcctggcttggatttgaatgatcatgttggagagcaagatatgggtgaatgtgacgtgaatcacgctacactggcggagaacgggctcggctctgctctgaccaacgggggattgaacctgcacagtccagtgaagaggaagctggaagcggagaaggactacgtctttgacaaaaggctcagatacagtgtccgccagaatgaaagcaactgtcggtttcgagacatcgttgtgcggaaggaagaagggttcacgcacatcctgctgtccagtcagacctcggataacaatgccctgacacctgagatcatgaaagaagtccggcgagcgctctgcaacgcagccacagacgacagcaaactgctgctcctcagcgcagtggggagcgtgttctgcagcggcctggattattcctacctaattggccggttgtccagcgaccggcgaaaggagagcactcggattgcagaagccatcagggactttgtgaaggcctttatccagtttaagaagcctatcgtggtggccatcaatgggccggccctgggcctgggtgcctccatcctgcccctctgtgacatcgtgtgggccagtgagaaggcctggttccagacgccctacgccaccatccgcctcacgcctgctggctgctcctcctacaccttcccccagatcctgggcgtcgcgctggccaatgagatgctgttctgtgggcggaagctcaccgcccaggaggcctgcagcagggggctggtgtcgcaggtcttctggcccaccacgttcagccaggaggtcatgctgcgggtcaaggagatggcatcctgcagtgccgtggtgttagaggagtccaaatgcctcgtgcggagcttcctgaaatcagtgctggaagacgtgaacgagaaggaatgcctcatgctcaagcagctctggagctcctccaaaggccttgactcccttttcagctacctgcaggacaaaatttatgaagtctgaggggccccagctcacgggcccccaacttccagctctgccctgtgtttcggaaaccagagcacagtgtctgccccggccaaggagtttgtcaaggtgtctctttatacgtagggttgtgtccatttcctcgtgtcctttggttgctcctccttggtttgattttgtgtaatggatggaaaacgcagcatacttggcctcccccacctccctgcccttcctggccagagagctgtccaaggctgtatcttcccagggctccgccaagcaccgctgtcctttccccacttgctgaaatgcaccatgacggtccaggaaggggaagaccactttcacattcttctgactcaggctgtgtctacacagtgcctctgacttggagacttggccatcatggctctctctggttgtatttagatcgggtgtcagaggacgaccaatcttagggaatttccagaccaatgagcaaaatgattgtgcacacctggcctcagtctcctttccgacgcaaatctgtgtgactattagggcttggtcttaaaacccaattgagtgatttgcaaacccagatattgtacatttagaaatgttttgttaaatatatatttttaaaacaatgtaagtggaaattctgataatttatgtgtattatatgtaaagctagttttgcaaaaacaaactactagggaaatgttttttctttccttggacttgttttatttatttatttttgtttatatattgtgatgtctgttgttcacacagatactattttcatactaccctggaccaaatcccacacaaggttcatgccgtttggtgcattctagcaatgaaccatgtagaaataaagtttagagagatgaaaacagaaggatttctgtggacaaaaggaatagcgctgcacctctgtgtaaaacggttctcagctgtaataatagaatactagttccttaggtttgtccttaggagacatcttgggagagttttttcttccctctgctgtctttaaggagttaaagggccctcttagcctgaatgatcctgaaacagacccagtcccaaattgcgtgatgttgggcaggagtggggataggccctacctgagaatagcatactgtctagaataagacttctttctttggggcaaatgactgaacttggatcctgcagtctgttgcttccatgtgatcagtgatttctggtattggccagggggatggggaagagttcccactctgctgagctgtctggaggtctgaatcttttccctccagaagctgaaatgactcatctgttttctagtttttttatgtacatagggagcaatgaccaggaatgagatctccttgcccctgtgcccctgggctgcaaggggactccagcagctgtgttagaccatcagattcaagtccctggattaactacagagaaggagggattgggggttgtggttttgagtggtgaggagaaagttcaggaaaacctgaagttgagagcagacaaatggaagggatgtgttctgcgtgaggtttaaaccatgggtcaagcacccagaaaaagctagattctcagattctcaggatggagggatttttttccgtttctatcacagcccctgcgtattcctggaggcccttggccctccccttcttcccctttcctgttgggcaccagcctttcttggcccttctttgaagagagtggaataaggcagcaagaagtgggcacagcttatggaggtgaggcaggcttagaagagagagttctggtgacagttctctaactctctgtggtcctttatcttttcctggcaatcaggtgcactgggcagggcaggtggaatgtattcgtggccctgagctttgagtttcaaagaacacgttgatagtctacaccagatctagagacatggtcctttaagcagtgaccctcaagttaatctggactgctggtccttctgatgaccttggttccctccctggaaagcgtgtctcctttaagagttcatgagggtcaggaaggaggggaaacctctccttcagccagaggaggatggaattaaagtcctgtgcaccctcccctttgtccatgtaggatcctgtaaggacttcggacctgtcctacagggagttactatagggagacacctgcttttgcccaaatgcctgttgtcacagctctatctggatcttatctcctcctttgagaaagcaaatgtgagctttccaaaacccttagatgaccctggttcttacatattgtggcagacagtgtcttcactactgctaaattttcattagaaagagccccctcttttctgttgaacttctgattgggcgcagttatattcagcatcggttgaagtggggtcaggattctccttggacatggaaggggatgtttagaaattcctttagatcagtgtccaccttcattccctgcttgaaagaactagaaatgcttcagctttggatgtactatcaaatccaaacttctaaacatttcaaggatctctgaagattaaggtaggaatgtgaaaccatttctaaggtggaaatcttgctgttaagtcacaggtcctgggtgtaacgggggtggtgaaagtctgtattttggttgtttccatacagtcagttccaccaattgggtgaaagcaggtgaaatctttttgctgcagggtggactgaatttttcactttctgggtagttgttttgatcatgtgtaggcgaattccaggtaacttacagcaaatagatttgggatggaaaataccagacctctggttgtgtcagggtttatcctaatagctttcctgagacagagctcagactttcatttttgatcttccaccccagggccccctctctgtctatgggatcctttctcccctctctctaccattttcccgtaccttcccccataagtcactcccaagagcctgggcaggtctttgaggaattgcggctcattttggcagccccgtcctgcaattacctttgggtttgaaagaatagctgtgggtgggcaattgaggacacctctttagtcagggacctttctagcaatccactccctcccatcctgttagccatgcagtggaactctccttccctctctgccccaaccccggtgatggctcactctcagcatcttatgggaccatctgagttaacaaccctgttccaagaagactttgtgcagaacttttgttagggtggtcataccttctcaccaccatttggaagacacagcctaatgctgatgtacttaatgtgccccttccggcatagaaataatgtctgggtaacagccatcaaaatcactaagaatgacattggatagctatgagaaagtagtagagaattgatttaaaatatcattcttgtttggtatagattaaactaggaaatgttctctctgaagcatgaaaatgtttttcccatgtgaagtttagtacaaggatggaaaaataataatcacagtagactttgaacaatgcaactgtatctctgaatatccacatttaaaaatagccttcactgaatgctgaattgcatttcccattaatttttggttttaaaaattttgtaaactttttttttatttggaatttagtcacatccattaaattttccaatctagtttctgtggaaattttttaacagagagaaacaaatagaaacatcttcaaatcttcctaagtgaatatttaaaatgcagaattgcttatcttctgtttttctgtattcagacacttatatctgttgtatatattagtttagacactctcactaatatacacagtatttaagactctaaatgagatttcttaagtattttattttattctctgtaaatggttttgtataatctttaaacatctacactttgcctttgtagatatttaagggaaaccatttggggttgtcttgcatgtatatttttgttgtagataagtgttgcttagttatttctgcaaattttggttgaaatgcttacagactttaatacagtatatattttcaaaatataaacttttatatttctgtgataagttaggatatgcgttttaggcaatatttttcattaatatcacttgttcttttgaaaaatagcatactggtttggtgccaattttttcattagaatataatgctcttatattgttggagagcaggttaatcttttttcgaagtaattgcgtttgaagtataatttcaaaatgtattgaatttgtgaataagccttaccattaggatcagtaaatttttcaactttgcaactacataagtagtttaagatctccccgtaaattctcactgtgtggcagttgatggagtttgtgaacagagccttaagcttgttgcaaaaaaatttaaaaagggtaatacgggttgtttcctccatgcaacgtaagccatgctgatggactgaatgcagtctgtaattcatggctaatccgaagagtttgattgagttgatggcggcagggaccagatagacaccttggtgattgtctttggccataagaatagaccaaggataggttttccagagacaccttcatactgtaaacatggtttagacacggtcatagggaaggctgctggtccatcatttgttctgaacaaatggcatttcctgctcctgaccctggcagttggccccagattccttgtcgatgacttggaaacgtccattctgggtaaggtcagcactccctgagagatgttaacaaagtttacctatgagtcttactgtgtagacaatctgaagtcaattttagttacacaatcagcattcccatgtgtcctcagtgtcttatcaatgaactatgtgtatcaagccatactaaactggagtttagcaggacaaaggcaaactaaatgtagaacataacatatcagctgaatatgtctatccaggactgtttttctagaacataaatcatggagctccttgacagtgtatccactgtttttggggtttaataaaaccaactagaatttagacttaaaaagaaattattattccttttggttgtccacataaagtagtccagggctatcatatggctaaaatcaagttatttggttcatctctggtatgtatttataaagtcaacttatcagccattaagatggagatttgctttaaatttttgcagtgtgtgtggcagtcagaaaaacccatatctagttttcaacttcacctctggtgtttttatggcttaaccttatatcattgatccaacatctagcctgatgctggagctcttatttctagcctgatgctggagctcttatatctagcctgatgctggagctcttgaagctgactcttggaagtttggagggtgtagagtttcccatctagtatttaatttgtccctgtgccattagtcccagcttgaagtcatttgccagtgtcgatgttgacaggattgtgacaatattgcctttcataaaaccgagaaccaaagaattccattattctaacaaagcctgagtttcatagattgtgggcacatctagacagatatgtgcatgcttgatggtgcagagaaactgctgacttccaccaacctcatgctccccctggctggccatacagagggattcgttgtcatattgaaaaggctctgaaagatgagtttctaattgaagctcactatctcaggttggtgtttctactgtgtagtcccaagcctgtatccatatcataaaagtggaggcctggtactcctccaggttatctggccagtgtagactcctccatctgaatatgaacctccagggtaagaatttttcagacatgtctatactgaacagtaggatcctgcactttccaaatgtctgcctccttttgttcttcattgacccattctaattcctgttaggtgtgagaagaattgtcttcagttctctctccattctcattcatgatggaatcattgatccattgaccagttgagaaatgattgatgctgaagaagtggtattctattggtaaggcttattaccaaacttccgataatgaagcaggctaccaaaaacttatccagcccaccctaggagtgtttggatttgatcatggatgtagcatacaccaaaatccaccgagacctttgcaaaattaggctacttgttttattttgccagattatcatgggagagtctttaactagttctgaatatttgtaagtctgagtacttcatagaattataaagaaggtacagctgaccccttctcaccatgttgtaaatatttactgagactgggtgcagtactgagggataataatcttctgatttatcaaatcctgactgtctagagcaaattgtacactctctttgtgaatggtcctgtaacgtgtatgaacacatttctgggtgccttagaagttgtatttttcatgtgtgctaatatgcagtatttatacattgtgagaagctgctttgaataaaaaggttgaaacttc

SEQ ID NO: 3815 - DNA, 2086 bp, Homo sapiens
  source 1..2086: mol_type = unassigned DNA
cacacgcgcacaccggaccccgcgcgcacacgcacggagggcgcgagcgagcagacgcgcacaccggcgagccaagttccgcagcctggcatggcttctggggacctttacgaggttgaaaggattgtagacaagaggaagaacaagaaaggaaaatgggagtatcttatccgatggaaaggctacgggagcaccgaggacacgtgggagccggagcaccacctcttgcactgtgaggagtttattgatgaattcaatgggttgcacatgtccaaggacaagaggatcaagtcagggaagcagtccagtacctccaagctgctgcgtgacagtcgaggcccgtcggttgagaaactgtcccacagaccttcagatcctggaaagagcaaggggacctcccataaacggaagcgaattaaccctcccctggccaagccaaaaaaagggtattcaggcaagccctcttcaggaggtgacagggccaccaagacggtgtcttacaggactacccccagtggtttgcaaataatgcccctgaaaaagtctcagaacgggatggaaaatggggacgccggctctgagaaggatgagaggcactttggaaatgggtcccatcagcctggcttggatttgaatgatcatgttggagagcaagatatgggtgaatgtgacgtgaatcacgctacactggcggagaacgggctcggtggctctgctctgaccaacgggggattgaacctgcacagtccagtgaagaggaagctggaagcggagaaggactacgtctttgacaaaaggctcagatacagtgtccgccagaatgaaagcaactgtcggtttcgagacatcgttgtgcggaaggaagaagggttcacgcacatcctgctgtccagtcagacctcggataacaatgccctgacacctgagatcatgaaagaagtccggcgagcgctctgcaacgcagccacagacgacagcaaactgctgctcctcagcgcagtggggagcgtgttctgcagcggcctggattattcctacctaattggccggttgtccagcgaccggcgaaaggagagcactcggattgcagaagccatcagggactttgtgaaggcctttatccagtttaagaagcctatcgtggtggccatcaatgggccggccctgggcctgggtgcctccatcctgcccctctgtgacatcgtgtgggccagtgagaaggcctggttccagacgccctacgccaccatccgcctcacgcctgctggctgctcctcctacaccttcccccagatcctgggcgtcgcgctggccaatgagatgctgttctgtgggcggaagctcaccgcccaggaggcctgcagcagggggctggtgtcgcaggtcttctggcccaccacgttcagccaggaggtcatgctgcgggtcaaggagatggcatcctgcagtgccgtggtgttagaggagtccaaatgcctcgtgcggagcttcctgaaatcagtgctggaagacgtgaacgagaaggaatgcctcatgctcaagcagctctggagctcctccaaaggccttgactcccttttcagctacctgcaggacaaaatttatgaagtctgaggggccccagctcacgggcccccaacttccagctctgccctgtgtttcggaaaccagagcacagtgtctgccccggccaaggagtttgtcaaggtgtctctttatacgtagggttgtgtccatttcctcgtgtcctttggttgctcctccttggtttgattttgtgtaatggatggaaaacgcagcatacttggcctcccccacctccctgcccttcctggccagagagctgtccaaggctgtatcttcccagggctccgccaagcaccgctgtcctttccccacttgctgaaatgcaccatgacggtccaggaaggggaagaccactttcacattcttctgactcaggctgtgtctacacagtgcctctgacttggagacttggccatcatggctctctctggttgtatttagatcgggtgtcagaggacgaccaatcttagggaatttccagaccaatgagcaaaatgat

SEQ ID NO: 3816 - DNA, 2086 bp, Homo sapiens; identical to SEQ ID NO: 3815
  source 1..2086: mol_type = unassigned DNA

SEQ ID NO: 3817 - DNA, 2086 bp, Homo sapiens; identical to SEQ ID NO: 3815
  source 1..2086: mol_type = unassigned DNA

SEQ ID NO: 3818 - DNA, 655 bp, Homo sapiens
  source 1..655: mol_type = unassigned DNA
gattcaagactgtttttcttacctcttcggtgcttctttcagcaatatgaagttaaaaccgggtcctgctctgctctgaccaacgggggattgaacctgcacagtccagtgaagaggaagctggaagcggagaaggactacgtctttgacaaaaggctcagatacagtgtccgccagaatgaaagcaactgtcggtttcgagacatcgttgtgcggaaggaagaagggttcacgcacatcctgctgtccagtcagacctcggataacaatgccctgacacctgagatcatgaaagaagtccggcgagcgctctgcaacgcagccacagacgacagcaaactgctgctcctcagcgcagtggggagcgtgttctgcagcggcctggattattcctacctaattggccggttgtccagcgaccggcgaaaggagagcactcggattgcagaagccatcagggactttgtgaaggcctttatccagtttaagaagcctatcgtggtggccatcaatgggccggccctgggcctgggtgcctccatcctgcccctctgtgacatcgtgtgggccagtgagaaggcctggttccagacgccctacgccaccatccgcctcacgcctgctggctgctcctcctacaccttcccccagatcc

SEQ ID NO: 3819 - DNA, 453 bp, Homo sapiens
  source 1..453: mol_type = unassigned DNA
gaagcggagaaggactacgtctttgacaaaaggctcagatacagtgtccgccagaatgaaagcaactgtcggtttcgagacatcgttgtgcggaaggaagaagggttcacgcacatcctgctgtccagtcagacctcggataacaatgccctgacacctgagggagctgaggatggtaactagcgtgcataaaaacttgactgcagcgcgcaatttgctcatcattttacatacattatcccatttgatctttatgaccgtgtaatgataccctctcatcttatggatgaagaccatggggagagggactcactgaactgatcgtggacacagacttagccaaggggcagacccagaatccaaacatcacatcttgggcttttccagctaaactttgttgtcatcagcatgtcatatttgttggccgcagatataattcactcagttaatgta

SEQ ID NO: 3820 - DNA, 557 bp, Homo sapiens
  source 1..557: mol_type = unassigned DNA
gagaagttctcacccttgagggtggacagaggttgaaaggattgtagacaagaggaagaacaagaaaggaaaatgggagtatcttatccgatggaaaggctacgggagcaccgaggacacgtgggagccggagcaccacctcttgcactgtgaggagtttattgatgaattcaatgggttgcacatgtccaaggacaagaggatcaagtcagggaagcagtccagtacctccaagctgctgcgtgacagtcgaggcccgtcggttgagaaactgtcccacagaccttcagatcctggaaagagcaaggggacctcccataaacggaagcgaattaaccctcccctggccaagccaaaaaaagggtattcaggcaagccctcttcaggaggtgacagggccaccaagacggtgtcttacaggactacccccagtggtttgcaaataatgcccctgaaaaagtctcagaacgggatggaaaatggggacgccggctctgagaaggatgagaggcactttggaaatgggtcccatcagcctggcttggatttgaatgatc

SEQ ID NO: 3821 - DNA, 1956 bp, Homo sapiens
  source 1..1956: mol_type = unassigned DNA
gtccttcgcgtcccggcggcgcggcgggaggggccggcgtgacgcagcggttgctacgggccgcccttataaataaccgggctcaggagaaactttagcgagtcagagccgcgcacgggactgggaaggggacccacccgagggtccagccaccagccccctcactaatagcggccaccccggcagcggcggcagcagcagcagcgacgcagcggcgacagctcagagcagggaggccgcgccacctgcgggccggccggagcgggcagccccaggccccctccccgggcacccgcgttcatgcaacgcctggtggcctgggacccagcatgtctccccctgccgccgccgccgcctgcctttaaatccatggaagtggccaacttctactacgaggcggactgcttggctgctgcgtacggcggcaaggcggcccccgcggcgccccccgcggccagacccgggccgcgcccccccgccggcgagctgggcagcatcggcgaccacgagcgcgccatcgacttcagcccgtacctggagccgctgggcgcgccgcaggccccggcgcccgccacggccacggacaccttcgaggcggctccgcccgcgcccgcccccgcgcccgcctcctccgggcagcaccacgacttcctctccgacctcttctccgacgactacgggggcaagaactgcaagaagccggccgagtacggctacgtgagcctggggcgcctgggggccgccaagggcgcgctgcaccccggctgcttcgcgcccctgcacccaccgcccccgccgccgccgccgcccgccgagctcaaggcggagccgggcttcgagcccgcggactgcaagcggaaggaggaggccggggcgccgggcggcggcgcaggcatggcggcgggcttcccgtacgcgctgcgcgcttacctcggctaccaggcggtgccgagcggcagcagcgggagcctctccacgtcctcctcgtccagcccgcccggcacgccgagccccgctgacgccaaggcgcccccgaccgcctgctacgcgggggccgcgccggcgccctcgcaggtcaagagcaaggccaagaagaccgtggacaagcacagcgacgagtacaagatccggcgcgagcgcaacaacatcgccgtgcgcaagagccgcgacaaggccaagatgcgcaacctggagacgcagcacaaggtcctggagctcacggccgagaacgagcggctgcagaagaaggtggagcagctgtcgcgcgagctcagcaccctgcggaacttgttcaagcagctgcccgagcccctgctcgcctcctccggccactgctagcgcggcccccgcgcgcgtccccctgccggccggggctgagactccggggagcgcccgcgcccgcgccctcgcccccgcccccggcggcgccggcaaaactttggcactggggcacttggcagcgcggggagcccgtcggtaattttaatattttattatatatatatatctatatttttgtccaaaccaaccgcacatgcagatggggctcccgcccgtggtgttatttaaagaagaaacgtctatgtgtacagatgaatgataaactctctgcttctccctctgcccctctccaggcgccggcgggcgggccggtttcgaagttgatgcaatcggtttaaacatggctgaacgcgtgtgtacacgggactgacgcaacccacgtgtaactgtcagccgggccctgagtaatcgcttaaagatgttcctacgggcttgttgctgttgatgttttgttttgttttgttttttggtctttttttgtattataaaaaataatctatttctatgagaaaagaggcgtctgtatattttgggaatcttttccgtttcaagcattaagaacacttttaataaacttttttttgagaatggttacaaagccttttgggggcagta

SEQ ID NO: 3822 - DNA, 7226 bp, Homo sapiens
  source 1..7226: mol_type = unassigned DNA
aaaagcggcctctcggctgagggccggggagctagcgctcaagcagagcccagcgcggtgctatcggacagagcctggcgagcgcaagcggcgcggggagccagcggggctgagcgcggccagggtctgaacccagatttcccagactagctaccactccgcttgcccacgccccgggagctcgcggcgcctggcggtcagcgaccagacgtccggggccgctgcgctcctggcccgcgaggcgtgacactgtctcggctacagacccagagggagcacactgccaggatgggagctgctgggaggcaggacttcctcttcaaggccatgctgaccatcagctggctcactctgacctgcttccctggggccacatccacagtggctgctgggtgccctgaccagagccctgagttgcaaccctggaaccctggccatgaccaagaccaccatgtgcatatcggccagggcaagacactgctgctcacctcttctgccacggtctattccatccacatctcagagggaggcaagctggtcattaaagaccacgacgagccgattgttttgcgaacccggcacatcctgattgacaacggaggagagctgcatgctgggagtgccctctgccctttccagggcaatttcaccatcattttgtatggaagggctgatgaaggtattcagccggatccttactatggtctgaagtacattggggttggtaaaggaggcgctcttgagttgcatggacagaaaaagctctcctggacatttctgaacaagacccttcacccaggtggcatggcagaaggaggctatttttttgaaaggagctggggccaccgtggagttattgttcatgtcatcgaccccaaatcaggcacagtcatccattctgaccggtttgacacctatagatccaagaaagagagtgaacgtctggtccagtatttgaacgcggtgcccgatggcaggatcctttctgttgcagtgaatgatgaaggttctcgaaatctggatgacatggccaggaaggcgatgaccaaattgggaagcaaacacttcctgcaccttggatttagacacccttggagttttctaactgtgaaaggaaatccatcatcttcagtggaagaccatattgaatatcatggacatcgaggctctgctgctgcccgggtattcaaattgttccagacagagcatggcgaatatttcaatgtttctttgtccagtgagtgggttcaagacgtggagtggacggagtggttcgatcatgataaagtatctcagactaaaggtggggagaaaatttcagacctctggaaagctcacccaggaaaaatatgcaatcgtcccattgatatacaggccactacaatggatggagttaacctcagcaccgaggttgtctacaaaaaaggccaggattataggtttgcttgctacgaccggggcagagcctgccggagctaccgtgtacggttcctctgtgggaagcctgtgaggcccaaactcacagtcaccattgacaccaatgtgaacagcaccattctgaacttggaggataatgtacagtcatggaaacctggagataccctggtcattgccagtactgattactccatgtaccaggcagaagagttccaggtgcttccctgcagatcctgcgcccccaaccaggtcaaagtggcagggaaaccaatgtacctgcacatcggggaggagatagacggcgtggacatgcgggcggaggttgggcttctgagccggaacatcatagtgatgggggagatggaggacaaatgctacccctacagaaaccacatctgcaatttctttgacttcgatacctttgggggccacatcaagtttgctctgggatttaaggcagcacacttggagggcacggagctgaagcatatgggacagcagctggtgggtcagtacccgattcacttccacctggccggtgatgtagacgaaaggggaggttatgacccacccacatacatcagggacctctccatccatcatacattctctcgctgcgtcacagtccatggctccaatggcttgttgatcaaggacgttgtgggctataactctttgggccactgcttcttcacggaagatgggccggaggaacgcaacacttttgaccactgtcttggcctccttgtcaagtctggaaccctcctcccctcggaccgtgacagcaagatgtgcaagatgatcacagaggactcctacccggggtacatccccaagcccaggcaagactgcaatgctgtgtccaccttctggatggccaatcccaacaacaacctcatcaactgtgccgctgcaggatctgaggaaactggattttggtttatttttcaccacgtaccaacgggcccctccgtgggaatgtactccccaggttattcagagcacattccactgggaaaattctataacaaccgagcacattccaactaccgggctggcatgatcatagacaacggagtcaaaaccaccgaggcctctgccaaggacaagcggccgttcctctcaatcatctctgccagatacagccctcaccaggacgccgacccgctgaagccccgggagccggccatcatcagacacttcattgcctacaagaaccaggaccacggggcctggctgcgcggcggggatgtgtggctggacagctgccggtttgctgacaatggcattggcctgaccctggccagtggtggaaccttcccgtatgacgacggctccaagcaagagataaagaacagcttgtttgttggcgagagtggcaacgtggggacggaaatgatggacaataggatctggggccctggcggcttggaccatagcggaaggaccctccctataggccagaattttccaattagaggaattcagttatatgatggccccatcaacatccaaaactgcactttccgaaagtttgtggccctggagggccggcacaccagcgccctggccttccgcctgaataatgcctggcagagctgcccccataacaacgtgaccggcattgcctttgaggacgttccgattacttccagagtgttcttcggagagcctgggccctggttcaaccagctggacatggatggggataagacatctgtgttccatgacgtcgacggctccgtgtccgagtaccctggctcctacctcacgaagaatgacaactggctggtccggcacccagactgcatcaatgttcccgactggagaggggccatttgcagtgggtgctatgcacagatgtacattcaagcctacaagaccagtaacctgcgaatgaagatcatcaagaatgacttccccagccaccctctttacctggagggggcgctcaccaggagcacccattaccagcaataccaaccggttgtcaccctgcagaagggctacaccatccactgggaccagacggcccccgccgaactcgccatctggctcatcaacttcaacaagggcgactggatccgagtggggctctgctacccgcgaggcaccacattctccatcctctcggatgttcacaatcgcctgctgaagcaaacgtccaagacgggcgtcttcgtgaggaccttgcagatggacaaagtggagcagagctaccctggcaggagccactactactgggacgaggactcagggctgttgttcctgaagctgaaagctcagaacgagagagagaagtttgctttctgctccatgaaaggctgtgagaggataaagattaaagctctgattccaaagaacgcaggcgtcagtgactgcacagccacagcttaccccaagttcaccgagagggctgtcgtagacgtgccgatgcccaagaagctctttggttctcagctgaaaacaaaggaccatttcttggaggtgaagatggagagttccaagcagcacttcttccacctctggaacgacttcgcttacattgaagtggatgggaagaagtaccccagttcggaggatggcatccaggtggtggtgattgacgggaaccaagggcgcgtggtgagccacacgagcttcaggaactccattctgcaaggcataccatggcagcttttcaactatgtggcgaccatccctgacaattccatagtgcttatggcatcaaagggaagatacgtctccagaggcccatggaccagagtgctggaaaagcttggggcagacaggggtctcaagttgaaagagcaaatggcattcgttggcttcaaaggcagcttccggcccatctgggtgacactggacactgaggatcacaaagccaaaatcttccaagttgtgcccatccctgtggtgaagaagaagaagttgtgaggacagctgccgcccggtgccacctcgtggtagactatgacggtgactcttggcagcagaccagtgggggatggctgggtcccccagcccctgccagcagctgcctgggaaggccgtgtttcagccctgatgggccaagggaaggctatcagagaccctggtgctgccacctgcccctactcaagtgtctacctggagcccctggggcggtgctggccaatgctggaaacattcactttcctgcagcctcttgggtgcttctctcctatctgtgcctcttcagtgggggtttggggaccatatcaggagacctgggttgtgctgacagcaaagatccactttggcaggagccctgacccagctaggaggtagtctggagggctggtcattcacagatccccatggtcttcagcagacaagtgagggtggtaaatgtaggagaaagagccttggccttaaggaaatctttactcctgtaagcaagagccaacctcacaggattaggagctggggtagaactggctatccttggggaagaggcaagccctgcctctggccgtgtccacctttcaggagactttgagtggcaggtttggacttggactagatgactctcaaaggcccttttagttctgagattccagaaatctgctgcatttcacatggtacctggaacccaacagttcatggatatccactgatatccatgatgctgggtgccccagcgcacacgggatggagaggtgagaactaatgcctagcttgaggggtctgcagtccagtagggcaggcagtcaggtccatgtgcactgcaatgccaggtggagaaatcacagagaggtaaaatggaggccagtgccatttcagaggggaggctcaggaaggcttcttgcttacaggaatgaaggctgggggcattttgctggggggagatgaggcagcctctggaatggctcagggattcagccctccctgccgctgcctgctgaagctggtgactacggggtcgccctttgctcacgtctctctggcccactcatgatggagaagtgtggtcagaggggagcaatgggctttgctgcttatgagcacagaggaattcagtccccaggcagccctgcctctgactccaagagggtgaagtccacagaagtgagctcctgccttagggcctcatttgctcttcatccagggaactgagcacagggggcctccaggagaccctagatgtgctcgtactccctcggcctgggatttcagagctggaaatatagaaaatatctagcccaaagccttcattttaacagatggggaaagtgagcccccaagatgggaaagaaccacacagctaagggagggcctggggagccccaccctagcccttgctgccacaccacattgcctcaacaaccggccccagagtgcccaggcactcctgaggtagcttctggaaatggggacaagtcccctcgaaggaaaggaaatgactagagtagaatgacagctagcagatctcttccctcctgctcccagcgcacacaaacccgccctccccttggtgttggcggtccctgtggccttcactttgttcactacctgtcagcccagcctgggtgcacagtagctgcaactccccattggtgctacctggctctcctgtctctgcagctctacaggtgaggcccagcagagggagtagggctcgccatgtttctggtgagccaatttggctgatcttgggtgtctgaacagctattgggtccaccccagtccctttcagctgctgcttaatgccctgctctctccctggcccaccttatagagagcccaaagagctcctgtaagagggagaactctatctgtggtttataatcttgcacgaggcaccagagtctccctgggtcttgtgatgaactacatttatcccctttcctgccccaaccacaaactctttccttcaaagagggcctgcctggctccctccacccaactgcacccatgagactcggtccaagagtccattccccaggtgggagccaactgtcagggaggtctttcccaccaaacatctttcagctgctgggaggtgaccatagggctctgcttttaaagatatggctgcttcaaaggccagagtcacaggaaggacttcttccagggagattagtggtgatggagaggagagttaaaatgacctcatgtccttcttgtccacggttttgttgagttttcactcttctaatgcaagggtctcacactgtgaaccacttaggatgtgatcactttcaggtggccaggaatgttgaatgtctttggctcagttcatttaaaaaagatatctatttgaaagttctcagagttgtacatatgtttcacagtacaggatctgtacataaaagtttctttcctaaaccattcaccaagagccaatatctaggcattttcttggtagcacaaattttcttattgcttagaaaattgtcctccttgttatttctgtttgtaagacttaagtgagttaggtctttaaggaaagcaacgctcctctgaaatgcttgtcttttttctgttgccgaaatagctggtcctttttcgggagttagatgtatagagtgtttgtatgtaaacatttcttgtaggcatcaccatgaacaaagatatattttctatttatttattatatgtgcacttcaagaagtcactgtcagagaaataaagaattgtcttaaatgtcatgattggagatgtcctttgcattgcttggaaggggtgtacctagagccaaggaaattggctctggtttggaaaaattttgctgttattatagtaaacatacaaaggatgtcatcatc

SEQ ID NO: 3823 - DNA, 7357 bp, Homo sapiens
  source 1..7357: mol_type = unassigned DNA
gagctagcgctcaagcagagcccagcgcggtgctatcggacagagcctggcgagcgcaagcggcgcggggagccagcggggctgagcgcggccagggtctgaacccagatttcccagactagctaccactccgcttgcccacgccccgggagctcgcggcgcctggcggtcagcgaccagacgtccggggccgctgcgctcctggcccgcgaggcgtgacactgtctcggctacagacccagagagaaaagcttcattctggaggggaaggagttttgagtgccaaggatgaaattccacccatcactcggtctctgagctgcaggacacaggcaggacaacggtaggattttcatgccccgatctgcctggccttgagttgtggcagctggggaagccactgggagcacactgccaggatgggagctgctgggaggcaggacttcctcttcaaggccatgctgaccatcagctggctcactctgacctgcttccctggggccacatccacagtggctgctgggtgccctgaccagagccctgagttgcaaccctggaaccctggccatgaccaagaccaccatgtgcatatcggccagggcaagacactgctgctcacctcttctgccacggtctattccatccacatctcagagggaggcaagctggtcattaaagaccacgacgagccgattgttttgcgaacccggcacatcctgattgacaacggaggagagctgcatgctgggagtgccctctgccctttccagggcaatttcaccatcattttgtatggaagggctgatgaaggtattcagccggatccttactatggtctgaagtacattggggttggtaaaggaggcgctcttgagttgcatggacagaaaaagctctcctggacatttctgaacaagacccttcacccaggtggcatggcagaaggaggctatttttttgaaaggagctggggccaccgtggagttattgttcatgtcatcgaccccaaatcaggcacagtcatccattctgaccggtttgacacctatagatccaagaaagagagtgaacgtctggtccagtatttgaacgcggtgcccgatggcaggatcctttctgttgcagtgaatgatgaaggttctcgaaatctggatgacatggccaggaaggcgatgaccaaattgggaagcaaacacttcctgcaccttggatttagacacccttggagttttctaactgtgaaaggaaatccatcatcttcagtggaagaccatattgaatatcatggacatcgaggctctgctgctgcccgggtattcaaattgttccagacagagcatggcgaatatttcaatgtttctttgtccagtgagtgggttcaagacgtggagtggacggagtggttcgatcatgataaagtatctcagactaaaggtggggagaaaatttcagacctctggaaagctcacccaggaaaaatatgcaatcgtcccattgatatacaggccactacaatggatggagttaacctcagcaccgaggttgtctacaaaaaaggccaggattataggtttgcttgctacgaccggggcagagcctgccggagctaccgtgtacggttcctctgtgggaagcctgtgaggcccaaactcacagtcaccattgacaccaatgtgaacagcaccattctgaacttggaggataatgtacagtcatggaaacctggagataccctggtcattgccagtactgattactccatgtaccaggcagaagagttccaggtgcttccctgcagatcctgcgcccccaaccaggtcaaagtggcagggaaaccaatgtacctgcacatcggggaggagatagacggcgtggacatgcgggcggaggttgggcttctgagccggaacatcatagtgatgggggagatggaggacaaatgctacccctacagaaaccacatctgcaatttctttgacttcgatacctttgggggccacatcaagtttgctctgggatttaaggcagcacacttggagggcacggagctgaagcatatgggacagcagctggtgggtcagtacccgattcacttccacctggccggtgatgtagacgaaaggggaggttatgacccacccacatacatcagggacctctccatccatcatacattctctcgctgcgtcacagtccatggctccaatggcttgttgatcaaggacgttgtgggctataactctttgggccactgcttcttcacggaagatgggccggaggaacgcaacacttttgaccactgtcttggcctccttgtcaagtctggaaccctcctcccctcggaccgtgacagcaagatgtgcaagatgatcacagaggactcctacccggggtacatccccaagcccaggcaagactgcaatgctgtgtccaccttctggatggccaatcccaacaacaacctcatcaactgtgccgctgcaggatctgaggaaactggattttggtttatttttcaccacgtaccaacgggcccctccgtgggaatgtactccccaggttattcagagcacattccactgggaaaattctataacaaccgagcacattccaactaccgggctggcatgatcatagacaacggagtcaaaaccaccgaggcctctgccaaggacaagcggccgttcctctcaatcatctctgccagatacagccctcaccaggacgccgacccgctgaagccccgggagccggccatcatcagacacttcattgcctacaagaaccaggaccacggggcctggctgcgcggcggggatgtgtggctggacagctgccggtttgctgacaatggcattggcctgaccctggccagtggtggaaccttcccgtatgacgacggctccaagcaagagataaagaacagcttgtttgttggcgagagtggcaacgtggggacggaaatgatggacaataggatctggggccctggcggcttggaccatagcggaaggaccctccctataggccagaattttccaattagaggaattcagttatatgatggccccatcaacatccaaaactgcactttccgaaagtttgtggccctggagggccggcacaccagcgccctggccttccgcctgaataatgcctggcagagctgcccccataacaacgtgaccggcattgcctttgaggacgttccgattacttccagagtgttcttcggagagcctgggccctggttcaaccagctggacatggatggggataagacatctgtgttccatgacgtcgacggctccgtgtccgagtaccctggctcctacctcacgaagaatgacaactggctggtccggcacccagactgcatcaatgttcccgactggagaggggccatttgcagtgggtgctatgcacagatgtacattcaagcctacaagaccagtaacctgcgaatgaagatcatcaagaatgacttccccagccaccctctttacctggagggggcgctcaccaggagcacccattaccagcaataccaaccggttgtcaccctgcagaagggctacaccatccactgggaccagacggcccccgccgaactcgccatctggctcatcaacttcaacaagggcgactggatccgagtggggctctgctacccgcgaggcaccacattctccatcctctcggatgttcacaatcgcctgctgaagcaaacgtccaagacgggcgtcttcgtgaggaccttgcagatggacaaagtggagcagagctaccctggcaggagccactactactgggacgaggactcagggctgttgttcctgaagctgaaagctcagaacgagagagagaagtttgctttctgctccatgaaaggctgtgagaggataaagattaaagctctgattccaaagaacgcaggcgtcagtgactgcacagccacagcttaccccaagttcaccgagagggctgtcgtagacgtgccgatgcccaagaagctctttggttctcagctgaaaacaaaggaccatttcttggaggtgaagatggagagttccaagcagcacttcttccacctctggaacgacttcgcttacattgaagtggatgggaagaagtaccccagttcggaggatggcatccaggtggtggtgattgacgggaaccaagggcgcgtggtgagccacacgagcttcaggaactccattctgcaaggcataccatggcagcttttcaactatgtggcgaccatccctgacaattccatagtgcttatggcatcaaagggaagatacgtctccagaggcccatggaccagagtgctggaaaagcttggggcagacaggggtctcaagttgaaagagcaaatggcattcgttggcttcaaaggcagcttccggcccatctgggtgacactggacactgaggatcacaaagccaaaatcttccaagttgtgcccatccctgtggtgaagaagaagaagttgtgaggacagctgccgcccggtgccacctcgtggtagactatgacggtgactcttggcagcagaccagtgggggatggctgggtcccccagcccctgccagcagctgcctgggaaggccgtgtttcagccctgatgggccaagggaaggctatcagagaccctggtgctgccacctgcccctactcaagtgtctacctggagcccctggggcggtgctggccaatgctggaaacattcactttcctgcagcctcttgggtgcttctctcctatctgtgcctcttcagtgggggtttggggaccatatcaggagacctgggttgtgctgacagcaaagatccactttggcaggagccctgacccagctaggaggtagtctggagggctggtcattcacagatccccatggtcttcagcagacaagtgagggtggtaaatgtaggagaaagagccttggccttaaggaaatctttactcctgtaagcaagagccaacctcacaggattaggagctggggtagaactggctatccttggggaagaggcaagccctgcctctggccgtgtccacctttcaggagactttgagtggcaggtttggacttggactagatgactctcaaaggcccttttagttctgagattccagaaatctgctgcatttcacatggtacctggaacccaacagttcatggatatccactgatatccatgatgctgggtgccccagcgcacacgggatggagaggtgagaactaatgcctagcttgaggggtctgcagtccagtagggcaggcagtcaggtccatgtgcactgcaatgccaggtggagaaatcacagagaggtaaaatggaggccagtgccatttcagaggggaggctcaggaaggcttcttgcttacaggaatgaaggctgggggcattttgctggggggagatgaggcagcctctggaatggctcagggattcagccctccctgccgctgcctgctgaagctggtgactacggggtcgccctttgctcacgtctctctggcccactcatgatggagaagtgtggtcagaggggagcaatgggctttgctgcttatgagcacagaggaattcagtccccaggcagccctgcctctgactccaagagggtgaagtccacagaagtgagctcctgccttagggcctcatttgctcttcatccagggaactgagcacagggggcctccaggagaccctagatgtgctcgtactccctcggcctgggatttcagagctggaaatatagaaaatatctagcccaaagccttcattttaacagatggggaaagtgagcccccaagatgggaaagaaccacacagctaagggagggcctggggagccccaccctagcccttgctgccacaccacattgcctcaacaaccggccccagagtgcccaggcactcctgaggtagcttctggaaatggggacaagtcccctcgaaggaaaggaaatgactagagtagaatgacagctagcagatctcttccctcctgctcccagcgcacacaaacccgccctccccttggtgttggcggtccctgtggccttcactttgttcactacctgtcagcccagcctgggtgcacagtagctgcaactccccattggtgctacctggctctcctgtctctgcagctctacaggtgaggcccagcagagggagtagggctcgccatgtttctggtgagccaatttggctgatcttgggtgtctgaacagctattgggtccaccccagtccctttcagctgctgcttaatgccctgctctctccctggcccaccttatagagagcccaaagagctcctgtaagagggagaactctatctgtggtttataatcttgcacgaggcaccagagtctccctgggtcttgtgatgaactacatttatcccctttcctgccccaaccacaaactctttccttcaaagagggcctgcctggctccctccacccaactgcacccatgagactcggtccaagagtccattccccaggtgggagccaactgtcagggaggtctttcccaccaaacatctttcagctgctgggaggtgaccatagggctctgcttttaaagatatggctgcttcaaaggccagagtcacaggaaggacttcttccagggagattagtggtgatggagaggagagttaaaatgacctcatgtccttcttgtccacggttttgttgagttttcactcttctaatgcaagggtctcacactgtgaaccacttaggatgtgatcactttcaggtggccaggaatgttgaatgtctttggctcagttcatttaaaaaagatatctatttgaaagttctcagagttgtacatatgtttcacagtacaggatctgtacataaaagtttctttcctaaaccattcaccaagagccaatatctaggcattttcttggtagcacaaattttcttattgcttagaaaattgtcctccttgttatttctgtttgtaagacttaagtgagttaggtctttaaggaaagcaacgctcctctgaaatgcttgtcttttttctgttgccgaaatagctggtcctttttcgggagttagatgtatagagtgtttgtatgtaaacatttcttgtaggcatcaccatgaacaaagatatattttctatttatttattatatgtgcacttcaagaagtcactgtcagagaaataaagaattgtcttaaatgtcatgattggagatgtcctttgcattgcttggaaggggtgtacctagagccaaggaaattggctctggtttggaaaaattttgctgttattatagtaaacatacaaaggatgtcatcatc

SEQ ID NO: 3824 - DNA, 7297 bp, Homo sapiens
  source 1..7297: mol_type = unassigned DNA
gagctagcgctcaagcagagcccagcgcggtgctatcggacagagcctggcgagcgcaagcggcgcggggagccagcggggctgagcgcggccagggtctgaacccagatttcccagactagctaccactccgcttgcccacgccccgggagctcgcggcgcctggcggtcagcgaccagacgtccggggccgctgcgctcctggcccgcgaggcgtgacactgtctcggctacagacccagagagaaaagcttcattctggaggggaaggagttttgagtgccaaggatgaaattccacccatcactcggtctctgagctgcaggacacaggcaggacaacgggagcacactgccaggatgggagctgctgggaggcaggacttcctcttcaaggccatgctgaccatcagctggctcactctgacctgcttccctggggccacatccacagtggctgctgggtgccctgaccagagccctgagttgcaaccctggaaccctggccatgaccaagaccaccatgtgcatatcggccagggcaagacactgctgctcacctcttctgccacggtctattccatccacatctcagagggaggcaagctggtcattaaagaccacgacgagccgattgttttgcgaacccggcacatcctgattgacaacggaggagagctgcatgctgggagtgccctctgccctttccagggcaatttcaccatcattttgtatggaagggctgatgaaggtattcagccggatccttactatggtctgaagtacattggggttggtaaaggaggcgctcttgagttgcatggacagaaaaagctctcctggacatttctgaacaagacccttcacccaggtggcatggcagaaggaggctatttttttgaaaggagctggggccaccgtggagttattgttcatgtcatcgaccccaaatcaggcacagtcatccattctgaccggtttgacacctatagatccaagaaagagagtgaacgtctggtccagtatttgaacgcggtgcccgatggcaggatcctttctgttgcagtgaatgatgaaggttctcgaaatctggatgacatggccaggaaggcgatgaccaaattgggaagcaaacacttcctgcaccttggatttagacacccttggagttttctaactgtgaaaggaaatccatcatcttcagtggaagaccatattgaatatcatggacatcgaggctctgctgctgcccgggtattcaaattgttccagacagagcatggcgaatatttcaatgtttctttgtccagtgagtgggttcaagacgtggagtggacggagtggttcgatcatgataaagtatctcagactaaaggtggggagaaaatttcagacctctggaaagctcacccaggaaaaatatgcaatcgtcccattgatatacaggccactacaatggatggagttaacctcagcaccgaggttgtctacaaaaaaggccaggattataggtttgcttgctacgaccggggcagagcctgccggagctaccgtgtacggttcctctgtgggaagcctgtgaggcccaaactcacagtcaccattgacaccaatgtgaacagcaccattctgaacttggaggataatgtacagtcatggaaacctggagataccctggtcattgccagtactgattactccatgtaccaggcagaagagttccaggtgcttccctgcagatcctgcgcccccaaccaggtcaaagtggcagggaaaccaatgtacctgcacatcggggaggagatagacggcgtggacatgcgggcggaggttgggcttctgagccggaacatcatagtgatgggggagatggaggacaaatgctacccctacagaaaccacatctgcaatttctttgacttcgatacctttgggggccacatcaagtttgctctgggatttaaggcagcacacttggagggcacggagctgaagcatatgggacagcagctggtgggtcagtacccgattcacttccacctggccggtgatgtagacgaaaggggaggttatgacccacccacatacatcagggacctctccatccatcatacattctctcgctgcgtcacagtccatggctccaatggcttgttgatcaaggacgttgtgggctataactctttgggccactgcttcttcacggaagatgggccggaggaacgcaacacttttgaccactgtcttggcctccttgtcaagtctggaaccctcctcccctcggaccgtgacagcaagatgtgcaagatgatcacagaggactcctacccggggtacatccccaagcccaggcaagactgcaatgctgtgtccaccttctggatggccaatcccaacaacaacctcatcaactgtgccgctgcaggatctgaggaaactggattttggtttatttttcaccacgtaccaacgggcccctccgtgggaatgtactccccaggttattcagagcacattccactgggaaaattctataacaaccgagcacattccaactaccgggctggcatgatcatagacaacggagtcaaaaccaccgaggcctctgccaaggacaagcggccgttcctctcaatcatctctgccagatacagccctcaccaggacgccgacccgctgaagccccgggagccggccatcatcagacacttcattgcctacaagaaccaggaccacggggcctggctgcgcggcggggatgtgtggctggacagctgccggtttgctgacaatggcattggcctgaccctggccagtggtggaaccttcccgtatgacgacggctccaagcaagagataaagaacagcttgtttgttggcgagagtggcaacgtggggacggaaatgatggacaataggatctggggccctggcggcttggaccatagcggaaggaccctccctataggccagaattttccaattagaggaattcagttatatgatggccccatcaacatccaaaactgcactttccgaaagtttgtggccctggagggccggcacaccagcgccctggccttccgcctgaataatgcctggcagagctgcccccataacaacgtgaccggcattgcctttgaggacgttccgattacttccagagtgttcttcggagagcctgggccctggttcaaccagctggacatggatggggataagacatctgtgttccatgacgtcgacggctccgtgtccgagtaccctggctcctacctcacgaagaatgacaactggctggtccggcacccagactgcatcaatgttcccgactggagaggggccatttgcagtgggtgctatgcacagatgtacattcaagcctacaagaccagtaacctgcgaatgaagatcatcaagaatgacttccccagccaccctctttacctggagggggcgctcaccaggagcacccattaccagcaataccaaccggttgtcaccctgcagaagggctacaccatccactgggaccagacggcccccgccgaactcgccatctggctcatcaacttcaacaagggcgactggatccgagtggggctctgctacccgcgaggcaccacattctccatcctctcggatgttcacaatcgcctgctgaagcaaacgtccaagacgggcgtcttcgtgaggaccttgcagatggacaaagtggagcagagctaccctggcaggagccactactactgggacgaggactcagggctgttgttcctgaagctgaaagctcagaacgagagagagaagtttgctttctgctccatgaaaggctgtgagaggataaagattaaagctctgattccaaagaacgcaggcgtcagtgactgcacagccacagcttaccccaagttcaccgagagggctgtcgtagacgtgccgatgcccaagaagctctttggttctcagctgaaaacaaaggaccatttcttggaggtgaagatggagagttccaagcagcacttcttccacctctggaacgacttcgcttacattgaagtggatgggaagaagtaccccagttcggaggatggcatccaggtggtggtgattgacgggaaccaagggcgcgtggtgagccacacgagcttcaggaactccattctgcaaggcataccatggcagcttttcaactatgtggcgaccatccctgacaattccatagtgcttatggcatcaaagggaagatacgtctccagaggcccatggaccagagtgctggaaaagcttggggcagacaggggtctcaagttgaaagagcaaatggcattcgttggcttcaaaggcagcttccggcccatctgggtgacactggacactgaggatcacaaagccaaaatcttccaagttgtgcccatccctgtggtgaagaagaagaagttgtgaggacagctgccgcccggtgccacctcgtggtagactatgacggtgactcttggcagcagaccagtgggggatggctgggtcccccagcccctgccagcagctgcctgggaaggccgtgtttcagccctgatgggccaagggaaggctatcagagaccctggtgctgccacctgcccctactcaagtgtctacctggagcccctggggcggtgctggccaatgctggaaacattcactttcctgcagcctcttgggtgcttctctcctatctgtgcctcttcagtgggggtttggggaccatatcaggagacctgggttgtgctgacagcaaagatccactttggcaggagccctgacccagctaggaggtagtctggagggctggtcattcacagatccccatggtcttcagcagacaagtgagggtggtaaatgtaggagaaagagccttggccttaaggaaatctttactcctgtaagcaagagccaacctcacaggattaggagctggggtagaactggctatccttggggaagaggcaagccctgcctctggccgtgtccacctttcaggagactttgagtggcaggtttggacttggactagatgactctcaaaggcccttttagttctgagattccagaaatctgctgcatttcacatggtacctggaacccaacagttcatggatatccactgatatccatgatgctgggtgccccagcgcacacgggatggagaggtgagaactaatgcctagcttgaggggtctgcagtccagtagggcaggcagtcaggtccatgtgcactgcaatgccaggtggagaaatcacagagaggtaaaatggaggccagtgccatttcagaggggaggctcaggaaggcttcttgcttacaggaatgaaggctgggggcattttgctggggggagatgaggcagcctctggaatggctcagggattcagccctccctgccgctgcctgctgaagctggtgactacggggtcgccctttgctcacgtctctctggcccactcatgatggagaagtgtggtcagaggggagcaatgggctttgctgcttatgagcacagaggaattcagtccccaggcagccctgcctctgactccaagagggtgaagtccacagaagtgagctcctgccttagggcctcatttgctcttcatccagggaactgagcacagggggcctccaggagaccctagatgtgctcgtactccctcggcctgggatttcagagctggaaatatagaaaatatctagcccaaagccttcattttaacagatggggaaagtgagcccccaagatgggaaagaaccacacagctaagggagggcctggggagccccaccctagcccttgctgccacaccacattgcctcaacaaccggccccagagtgcccaggcactcctgaggtagcttctggaaatggggacaagtcccctcgaaggaaaggaaatgactagagtagaatgacagctagcagatctcttccctcctgctcccagcgcacacaaacccgccctccccttggtgttggcggtccctgtggccttcactttgttcactacctgtcagcccagcctgggtgcacagtagctgcaactccccattggtgctacctggctctcctgtctctgcagctctacaggtgaggcccagcagagggagtagggctcgccatgtttctggtgagccaatttggctgatcttgggtgtctgaacagctattgggtccaccccagtccctttcagctgctgcttaatgccctgctctctccctggcccaccttatagagagcccaaagagctcctgtaagagggagaactctatctgtggtttataatcttgcacgaggcaccagagtctccctgggtcttgtgatgaactacatttatcccctttcctgccccaaccacaaactctttccttcaaagagggcctgcctggctccctccacccaactgcacccatgagactcggtccaagagtccattccccaggtgggagccaactgtcagggaggtctttcccaccaaacatctttcagctgctgggaggtgaccatagggctctgcttttaaagatatggctgcttcaaaggccagagtcacaggaaggacttcttccagggagattagtggtgatggagaggagagttaaaatgacctcatgtccttcttgtccacggttttgttgagttttcactcttctaatgcaagggtctcacactgtgaaccacttaggatgtgatcactttcaggtggccaggaatgttgaatgtctttggctcagttcatttaaaaaagatatctatttgaaagttctcagagttgtacatatgtttcacagtacaggatctgtacataaaagtttctttcctaaaccattcaccaagagccaatatctaggcattttcttggtagcacaaattttcttattgcttagaaaattgtcctccttgttatttctgtttgtaagacttaagtgagttaggtctttaaggaaagcaacgctcctctgaaatgcttgtcttttttctgttgccgaaatagctggtcctttttcgggagttagatgtatagagtgtttgtatgtaaacatttcttgtaggcatcaccatgaacaaagatatattttctatttatttattatatgtgcacttcaagaagtcactgtcagagaaataaagaattgtcttaaatgtcatgattggagatgtcctttgcattgcttggaaggggtgtacctagagccaaggaaattggctctggtttggaaaaattttgctgttattatagtaaacatacaaaggatgtcatcatc

SEQ ID NO: 3825 - DNA, 648 bp, Homo sapiens
  source 1..648: mol_type = unassigned DNA
ggagaggggccatttgcagtgggtgctatgcacagatgtacattcaagcctacaagaccagtaacctgcgaatgaagatcatcaagaatgacttccccagccaccctctttacctggagggggcgctcaccaggagcacccattaccagcaataccaaccggttgtcaccctgcagaagggctacaccatccactgggaccagacggcccccgccgaactcgccatctggctcatcaacttcaacaagggcgactggatccgagtggggctctgctacccgcgaggcaccacattctccatcctctcggatgttcacaatcgcctgctgaagcaaacgtccaagacgggcgtcttcgtgaggaccttgcagatggacaaagtggagcagagctaccctggcaggagccactactactgggacgaggactcagggtgagcaggcgcccacttggctgcaggaaagtggctcaacctcatcttgtccccttggcctttccaataagtctaagaacagccatgtagttaatgccaattaatgtaagacacctttctaggcattttgactctaaggctgactgtcccatacattaacgacatttttaaagctattaagctttaaaagtaaaataaacaccctattaaatata

SEQ ID NO: 3826 - DNA, 385 bp, Homo sapiens
  source 1..385: mol_type = unassigned DNA
catcaacttcaacaagggcgactggatccgagtggggctctgctacccgcgaggcaccacattctccatcctctcggatgttcacaatcgcctgctgaagcaaacgtccaagacgggcgtcttcgtgaggaccttgcagatggacaaagtggagcagagctaccctggcaggagccactactactgggacgaggactcaggaaaacaaaggaccatttcttggaggtgaagatggagagttccaagcagcacttcttccacctctggaacgacttcgcttacattgaagtggatgggaagaagtaccccagttcggaggatggcatccaggtggtggtgattgacgggaaccaagggcgcgtggtgagccacacgagcttcagga

SEQ ID NO: 3827 - DNA, 488 bp, Homo sapiens
  source 1..488: mol_type = unassigned DNA
aattggtttcttctcacacagttccatagtgcttatggcatcaaagggaagatacgtctccagaggcccatggaccagagtgctggaaaagcttggggcagacaggggtctcaagttgaaagagcaaatggcattcgttggcttcaaaggcagcttccggcccatctgggtgacactggacactgaggatcacaaagccaaaatcttccaagttgtgcccatccctgtggtgaagaagaagaagttgtgaggacagctgccgcccggtgccacctcgtggtagactatgacggtgactcttggcagcagaccagtgggggatggctgggtcccccagcccctgccagcagctgcctgggaaggccgtgtttcagccctgatgggccaagggaaggctatcagagaccctggtgctgccacctgcccctactcaagtgtctacctggagcccctggggcggtgctggccaatgctggaaacattcactt

SEQ ID NO: 3828 - DNA, 7039 bp, Homo sapiens
  source 1..7039: mol_type = unassigned DNA; mol_type = unassigned DNA
gtcggttgttgtcaagatggcggctgcagggttgctgccgccccatctgctattgcccggcgaggtcgccgctgcctcagctgccatcgccgctacaggcaccagtgccgctgcgcgggagctagggctgtcgaggccaacccttccgcgcccgtgacgcggggcctgagagacggagtgtagggaggggccgagcaggaggaggaggaagccggagctgccatgagggaggttctgggggcgagcagacaggcggcgctgaagtgaaggatgctggcggggaggcccggaacccggagcgcggtcggggaactgggcactgaatcatcggacaacctcgacagagcccccctcggccctcgggagagcggcgggcatcaccgacctggctcttacctagatatgaaaatccatctggagaaaaatttagaagaagagcgccagatattactgcagcaacaaaaaatatgtcgaaatcgagcacgtaaatattttgtggagtcaaatcggagaaaaaaagcttttgaggagaaacgaaaagaacaggaagaaaaagaacaccaaattagagaacaaatacttcaacaaagaaaacagaagtttgaagaagttactgaaaaattccagcgtgcccatgttcctctttcacagcggaggaaagcagtttcccgaaaaccagttcctccattagaagaggccctcaaacaaattcaggaatccaacttaaaatcagaagtaaaccttcccttttcccgtagaccaacaataaactggagagctatagattctgccttgccttccgcattatcaaaaaatgatcacaagcatcagaaacaactcttatccaaaatcaattgtgagaaagaaatgaatgaaaacatgagggcaaccttggctactagcaaaaatgtgttccagcttaaactggaggaaactcagaaactcctcgaagatcaacatctaagcaatttgcaaaaattttgtgatgaagttaatcagataaccaattctgaaaccctctcaagtatagacagtcttgaggctacagagcatgaagaaatatatttaacacttaataaggagcattccacatccatccagcggaataccatttccctcaaaccagcaaatatgcaatcaactaatctcagctgctttgatgaagataaactggcattctctaaaactcaacatataaataattggcttacaaatttagatgcttcaaatactcagaatgtcacagctttctcagatattttaagtaaatctaatgttctgccttcatgggaatattttaatagtaaagaacaaaatccatctcctttgaatggaacagtggaaagagccacaaatactgctaataattcagtaccctttgtatctagcccacccatgtttgtactagataaaaaatgtgaaaagacctctgaaactagcactatgaggacaactgactccacttctggagcattcaaaagagagagaccattagttactgagagcccaacatttaaatttagcaaatcccaaagcacttcagattctctaacccaggaagtggctacatttccagaccaagagaaatattctgaattaaatcaagaaaatggaactacttcaattcctacttcatgtgtaccagtggcaacgcctttagttttgccatctaatatacagtcagctagaccttcagcaaagaacagtatacacataaaagaaattgatgcagtgcagtgttctgataagttagatgaattgaaagatggtaaagaagaagagataaaatattttaattgcaataaggaagagttgcctttattttcagacagttttcaagatgcctatatacctcacaatcctgattcaaaagatgaaaaacaaaaattagctgaaacatcatccttgtctaatgtaacttctaattatgactttgttggccagcataagaaaatgaaatacaacatccatgagagaaatggtgtgagatttcttaaaagtattttaaagaaagaatctaaatatgaacatggttatcttaaggcattaattataaatcagagctttaagtttggaaatcaaaaagcagcagctatcagagatagtattgaattaacaaaggaaaaaggtgcagaaattccaaagaccattaaaaaactgaggtggtttgatgaaactagcaatatagaaaacaatgctgaaaacagtcattcactgaagaataaaacaggaacaactcaacagcattctcaacaattccacattcaaagtggtgctggaagcaacataattagtgtttctacttgtgctgtaaattctgctgatacaaagaagtccagggaggattctatctctgaaaatgttacgactttaggaggatctggagcagaccatatgcctttgaactgttttataccttcaggttataactttgctaaacatgcctggccagcctcaaaaaaagaagaaagtaaaatccctgtacatgatgattctaaaactaagcaaggtaagccacaaagaggtagagcaaaaataattagaaaaccaggatctgcaaaagtccaatcaggctttatatgtacaaacagaaaaggcgctgtcattcaaccacagtctgcaagcaaagtcaacatatttacacaagctcagggaaaattaattataccttgtcctcctcctcaatctacatcaaatattagaagtggtaaaaatatacaagtgtctcagtgtcaaccagtaactcctgaaaatcctcaaaacattattacacataactcttttaattcaaaacatgtgcttccaacagaacacagtttgaatcagtggaatcaggaaagtagttctccactctcaaatgcttgttctgacctagtcactgtgataccatcactgccatcatattgttcttcagagtgccaaactttcgcaaaaataaatcattcaaatggcactcaagcagttgcccggcaagatgcgacattatattgcacccaaagaagtcctgtttgtgaagaaagttatccgtctgtgactctaagaactgctgaagaagaatcagttcccttatggaaaagaggtcctaatgtcctgcatcaaaataagagggctacagggtctactgttatgagaagaaaacgaattgctgaaactaagcggagaaatattttagagcagaaaagacaaaaccctggatctgtaggacagaagtacagtgagcaaattaataattttggacaaagtgtcctgctaagttcaagtgagccaaaacaaactacaaggggtacttcttatattgaagaagtttcagatagtacttctgagtttttgatggctgaaaacttagtgaaagcatcagtgccggaggatgagattctgactgtcttgaatagcaaacagatacagaaatcaaatctacctttaaataaaactcaacaattcaacatctgcacactgtcagctgaagaacagaagatcctagagtcccttaatgatctcagtgaaagactacattatatacaagaatccatttgcaaaaacccatccatcaaaaatactttacaaataataccacttctggagaagagagaagatagaaccagcagctgcagagacaagagataattccagcagaatccgtctaagaagacctttcatgtacttccctaggactagatgcataccgttttgtgaaaaccagccataggaaaacatgtgagcaacaacccccatgaacatttgtcctaactcagattttgtgagcagtgaagtttaacagagcagtgacatttaacaaagcagtgaagtttaacagagttctgagaataccatgaaagacattatgcctgcctaaacaaaaagcaggacataacctagctctgaatacatgccacaaggatgaagcttgtgagtagagcaaacaaacgtttttccaaagaattcacagtgctcctttgcaatttatagatttcatgttgaaatatatgttaaataaaatttctgtttattgaacctctttattaaacctctaacttactgataagatgtttatgaagtatggcatattttgatttttttaattgtaataaatattcttaaagttaccacatcccacaaaatggcccttggtggcagcaatagagcaaaggttacctttttgtatggtgaagggaggccttcctatggctgtacaattacatcgattcttccaaatttcatatttcatacatggcactttggcataccgaaaaaacatgaaatttttcattaaaatgccatgaatcaagccagggccgttggcttatgcctgtaatcccagcactttgcaggccgaggtagacagatggcttgagctcaggagttcgtgaccagcctgggcaaccctgtctctacaaaaaatacaaaaattaaccaggcatggtggcatgcacctgtagtcccagctacttggggtgctgaggcgggaggattacttgagcccaggaggattacttcaacctgggaggttgaggctgcagtgagctgtgtttcgccactgcacaccagcctgggtgacagtgtgagacccagcctcaaaaaaaaaaaaaaaaaagtgatgaatcaaaattagaaattaagagttttaagaaaacatgtggccttttattaataacactactaaattttggttcctccatagaattagttttgaaacacttgatgtagtgagaaatgcattaacatgttgaatgcctaccatgtaccaaattttgtgcatatattttttatttaatctgaccagccacccaaaccatgggtatttttgtctccactttagagatgagaaactgagccaaggccacatagctacctacagtgacagaatcaaaattcaaactcaggtttatctagttccaaaacccatgttctttctgccacaccatgttagtagaaatggaaactattggatgaaatgaggaaaaacaggaaaagaattcactttttaaatgaagaaattagtgaaaaaattgacctaatgaaggaaacatttgtgctttcctatatttttaattttaagaataggatttcggaaggcgacagaaaatttagttcttagacatttaaatagaaagttgtgtgcccctatagaaaatatttgagaatttcttatactatcaagaaaaaattctgtgaattaagatgtaatttataaaataacatttcaatgggggtaaacaggccagaagagtgtgccaagttgtttgtgaatcattccaagcacctcagatgaaaactcacttttattaaaaaaaaaaaagacaagggtttatattcatatacactagtatatatgtacacagcagcatcctgcatgccaaagtagcttcaccgttagtaatccctcactttaatacctcttaggaaccaaagaatgcctctacaagcaaaaagatagttgaaaatagttaagatccaaagtcagaataggccaaaaaaaaaaaaaaaaaaagcctaaatagtaagctggtgaaacaagataagatttgcattttactagaacttgcacattatgatattgtccttttatgaaactgtcatatgaccagaattcttctgtaattctgcccatgactcctccagaattttagtagatacagggtgggttcattaagagtgataaaagtgggaagacataaagagcctttgtgaattaaagtggaagagaataacactttgcatgctataaacgtgaaaactaacatttttggccagacacagtggctcatgcatgtaattctagcactttggaggccaaggcaggaggactgcttgagcccaggagtttgagaccagcctgggcaatgtagcaagaccccatctctatataaaatataaaaatgttggctgtgcacggtagcttatgcctgtaatctcagcactttgggaggccaaggcaggcagatcatgaggtcaagagatcaagaccatcctggccaacatggtgaaaccctgtctctactaaaaatacaaaaatagctgggcatggtggcacgcacctctactcccagctactaggaggctgaggcaggagaatcgtttgaacccaggaggtagaggttgcagtgagctgagattgcaccactgcaccagcctggcaacagagcaagactccgtctcacaaaaatgaataaataaaataaaaataaaaatgttactttttaaaaagtaacttttttaataatataagaaagaaaaatgccctttcacactgaatcttcaagttctaaggaagaaaagagtctcctttcgaatgtgaagaagtaaatttagaggaaatcaaacaagcatcactttcctcagtggaaaaacttatgaaacttcttataagagagagtaatctcaggccggacatgctggctcatacctgtaatcccagaactttgggaggccgaggcaggtggatcatttgagctcaggaattcaagaccagcctgggtaatatggcaagagcccaactctactaaaaatacaaaaagaaaagaaaacagccaagcttggtggtatgtgcctgtggtcccagctactggggaggctgaggtgggaggatcgtttgagcctgggaggcagaggttgcagtgatcaggaattgtgccactgcactccaacctgagtgacagagcaacactctgtcttaaaagaaaaaaaaaaaagagagagatagtaatctcttgggcaaaaggtatcaaataattgaaagaaaagtttaaacacatttccgagaggcagggcaactaataactggtcagaaaaatttagacggtcttcattttaaaattggcatcaggaaggattaccatgaacttattttaaatccatattgtaccagaatgactatgtctgtgtttcttaggaatgttgaagctttttgtgaaaactgtactgtatacatatataaatatacacacacttacatgtatgtattttgatagatattacatggactaaattttgtcaatttcatgtaatttaccctttgcaataaaaatgattcattaaatat

SEQ ID NO: 3829 - DNA, 4533 bp, Homo sapiens
  source 1..4533: mol_type = unassigned DNA
gtgcccatgttcctctttcacagcggaggaaagcagtttcccgaaaaccagttcctccattagaagaggccctcaaacaaattcaggaatccaacttaaaatcagaagtaaaccttcccttttcccgtagaccaacaataaactggagatccattcctgcctgtccagctgtctccacacctgacccctacttacctgatcaactgtctcctccacgggtcccattgcggtcccaccacttccaaattcttcctagctacccaactgtttctcctgcccgccagccccatatactgcctatccatccatctgtaccctctactcttccaaagacctttgcaccagtcccattactgccttacccaattaaatatcatccttgtcctccaaccccggctacttccagcatttctagcagtttccctcgtctaccagcaccaattccttcttgcccacctggccatccaccccacgcaccccagagttctccaatcattcctgaccctgagtcacagcacaagttattttacaaaactttcagacccaaacatttccttccagcacagcattctactgcagccactctaatgcctacccttgttcgtcgttcccttccagctccactggttgtttccccaacccctttggaacctctccctgttttgaagccttcctgtttatccagtcaccccccttatccaccagtccccactctttcttatgtcactccgttgcctgcacatcctgctagcttggatccttttcagtcagtccagcaatctgttccacaagccacagcattgtcaaatcagcccgaggcctttgcagatcatccaccagcctcagttctctcccttgcatctccctgtcattctccatcttcttctttgccttcatctccttctacttccacatccttttcttcagcctgtatactgttttcttcctcctcatctattctttcctcttcttcgacttcctgttctacttctccatccttacctccttcatctatccctcttttttcctctcctttgcattcatcttcctctccaggtttgcctccaacttatttagcttttccctctccagtttctcctgtttcttcttcctttatgatttcctcttcctttccccctattcttcactctccttctgtttctacctccccatctccttttattcctatccaccccttcaatcctcctcattgggggaagaaagtagagaagagaagagaagaaagtggagtagagaagaaaggaatagagaagaaagttgagacacgacaactttaaagagctatagattctgccttgccttccgcattatcaaaaaatgatcacaagcatcagaaacaactcttatccaaaatcaattgtgagaaagaaatgaatgaaaacatgagggcaaccttggctactagcaaaaatgtgttccagcttaaactggaggaaactcagaaactcctcgaagatcaacatctaagcaatttgcaaaaattttgtgatgaagttaatcagataaccaattctgaaaccctctcaagtatagacagtcttgaggctacagagcatgaagaaatatatttaacacttaataaggagcattccacatccatccagcggaataccatttccctcaaaccagcaaatatgcaatcaactaatctcagctgctttgatgaagataaactggcattctctaaaactcaacatataaataattggcttacaaatttagatgcttcaaatactcagaatgtcacagctttctcagatattttaagtaaatctaatgttctgccttcatgggaatattttaatagtaaagaacaaaatccatctcctttgaatggaacagtggaaagagccacaaatactgctaataattcagtaccctttgtatctagcccacccatgtttgtactagataaaaaatgtgaaaagacctctgaaactagcactatgaggacaactgactccacttctggagcattcaaaagagagagaccattagttactgagagcccaacatttaaatttagcaaatcccaaagcacttcagattctctaacccaggaagtggctacatttccagaccaagagaaatattctgaattaaatcaagaaaatggaactacttcaattcctacttcatgtgtaccagtggcaacgcctttagttttgccatctaatatacagtcagctagaccttcagcaaagaacagtatacacataaaagaaattgatgcagtgcagtgttctgataagttagatgaattgaaagatggtaaagaagaagagataaaatattttaattgcaataaggaagagttgcctttattttcagacagttttcaagatgcctatatacctcacaatcctgattcaaaagatgaaaaacaaaaattagctgaaacatcatccttgtctaatgtaacttctaattatgactttgttggccagcataagaaaatgaaatacaacatccatgagagaaatggtgtgagatttcttaaaagtattttaaagaaagaatctaaatatgaacatggttatcttaaggcattaattataaatcagagctttaagtttggaaatcaaaaagcagcagctatcagagatagtattgaattaacaaaggaaaaaggtgcagaaattccaaagaccattaaaaaactgaggtggtttgatgaaactagcaatatagaaaacaatgctgaaaacagtcattcactgaagaataaaacaggaacaactcaacagcattctcaacaattccacattcaaagtggtgctggaagcaacataattagtgtttctacttgtgctgtaaattctgctgatacaaagaagtccagggaggattctatctctgaaaatgttacgactttaggaggatctggagcagaccatatgcctttgaactgttttataccttcaggttataactttgctaaacatgcctggccagcctcaaaaaaagaagaaagtaaaatccctgtacatgatgattctaaaactaagcaaggtaagccacaaagaggtagagcaaaaataattagaaaaccaggatctgcaaaagtccaatcaggctttatatgtacaaacagaaaaggcgctgtcattcaaccacagtctgcaagcaaagtcaacatatttacacaagctcagggaaaattaattataccttgtcctcctcctcaatctacatcaaatattagaagtggtaaaaatatacaagtgtctcagtgtcaaccagtaactcctgaaaatcctcaaaacattattacacataactcttttaattcaaaacatgtgcttccaacagaacacagtttgaatcagtggaatcaggaaagtagttctccactctcaaatgcttgttctgacctagtcactgtgataccatcactgccatcatattgttcttcagagtgccaaactttcgcaaaaataaatcattcaaatggcactcaagcagttgcccggcaagatgcgacattatattgcacccaaagaagtcctgtttgtgaagaaagttatccgtctgtgactctaagaactgctgaagaagaatcagttcccttatggaaaagaggtcctaatgtcctgcatcaaaataagagggctacagggtctactgttatgagaagaaaacgaattgctgaaactaagcggagaaatattttagagcagaaaagacaaaaccctggatctgtaggacagaagtacagtgagcaaattaataattttggacaaagtgtcctgctaagttcaagtgagccaaaacaaactacaaggggtacttcttatattgaagaagtttcagatagtacttctgagtttttgatggctgaaaacttagtgaaagcatcagtgccggaggatgagattctgactgtcttgaatagcaaacagatacagaaatcaaatctacctttaaataaaactcaacaattcaacatctgcacactgtcagctgaagaacagaagatcctagagtcccttaatgatctcagtgaaagactacattatatacaagaatccatttgcaaaaacccatccatcaaaaatactttacaaataataccacttctggagaagagagaagatagaaccagcagctgcagagacaagagataattccagcagaatccgtctaagaagacctttcatgtacttccctaggactagatgcataccgttttgtgaaaaccagccataggaaaacatgtgagcaacaacccccatgaacatttgtcctaactcagattttgtgagcagtgaagtttaacagagcagtgacatttaacaaagcagtgaagtttaacagagttctgagaataccatgaaagacattatgcctgcctaaacaaaaagcaggacataacctagctctgaatacatgccacaaggatgaagcttgtgagtagagcaaacaaacgtttttccaaagaattcacagtgctcctttgcaatttatagatttcatgttgaaatatatgttaaataaaatttctgtttattg

SEQ ID NO: 3830 - DNA, 631 bp, Homo sapiens
  source 1..631: mol_type = unassigned DNA
agagcagaaaagacaaaaccctggatctgtaggacagaagtacagtgagcaaattaataattttggacaaagtgtcctgctaagttcaagtgagccaaaacaaactacaaggggtacttcttatattgaagaagatatacaagaatccatttgcaaaaacccatccatcaaaaatactttacaaataataccacttctggagaagagagaagatagaaccagcagctgcagagacaagagataattccagcagaatccgtctaagaagacctttcatgtacttccctaggactagatgcataccgttttgtgaaaaccagccataggaaaacatgtgagcaacaacccccatgaacatttgtcctaactcagattttgtgagcagtgaagtttaacagagcagtgacatttaacaaagcagtgaagtttaacagagttctgagaataccatgaaagacattatgcctgcctaaacaaaaagcaggacataacctagctctgaatacatgccacaaggatgaagcttgtgagtagagcaaacaaacgtttttccaaagaattcacagtgctcctttgcaatttatagatttcatgttgaaatatatgttaaataaaatttctgtttattgaa

SEQ ID NO: 3831 - DNA, 2380 bp, Homo sapiens
  source 1..2380: mol_type = unassigned DNA
agtcgctcctaacgctccctggcccggccggggccgcgcagttagggcatctgaggcggggagaagcggcggggagacgccggctgccagcatgtcgctgcctccggagaaagcctccgagctgaagcagctcatccaccagcagctgagcaagatggatgtccatggtagaataagagaaatccttgctgagactatacgggaagaattggcacctgatcaacagcatttatcaacagaagatttgatcaaagcccttagacgtcgaggaatcattgacgatgtgatgaaagaacttaattttgttacttgttgagcaagaactcccttcctctccaaaacaacctatttgttttgatagacaatcgacattaaaaaaaactaatattgatccaacacggaggtatctttaccttcaggttttgggtggaaaagctttcttggaacatctgcaagaacctgagcctttacctggacaagtttgttcaacgtttactttatgtttacattatcgaaaccaacgttttcgttctaaacctgttccatgtgcctgtgaaccagattttcatgatggctttttacttgaagtacacagagaaagcttgggtgatggaactagaatggctgattcaacaacaatgttatcaataagtgatccaattcatatggtgctaatcaaaacagacatatttggtgagacgactttagtagcatcatattttctggaatggcgatcggttttgggctcagaaaatggagtgaccagtctgactgtggaacttatgggtgtaggcacagaatcaaaagtttctgtgggaattttaaatataaaacttgaaatgtatccaccactcaatcaaacgttatctcaagaagtagtgaacacacagcttgctttggaacgtcagaaaactgcagagaaagagcgattatttcttgtatatgctaagcagtggtggagagaatatttgcaaattcgaccctcacacaactcacgactggttaagatttttgcacaggatgaaaatgggataaatagaccagtctgttcctatgttaaaccacttcgagctggacggcttcttgatactccaaggcaagcagcaagatttgttaatgtccttggttatgaacgagcccctgttattggaggaggaggtaaacaggagcagtggtgcactctgctggcctttctctgtagaaacaagggtgactgtgaagatcacgctaaccttctgtgcagccttcttcttggatatggattagaagcctttgtttgtgttgggaccaaggcaaaaggagtacctcatgcatgggttatgacttgtggaactgatggggccatcactttttgggagagtttaacaggacacaggtacatccataaacctaccaatcctgatgaacctccagttgctgaacagcccaaaccactgtacccatatcgaacaattggttgtgttttcaaccatcagatgttcctgggaaattgtcaaccctctgatgcagtagaaacctgtgtatttgatttgaacgatgaatccaaatggaaacccatgagtgaggaagcaattaaatctgtgtgtgctcctggagctacaacatcccttcctccctttccacctctgtgtgcatccacaattgacgcgtcagtaacaagtaatgaaattgaaatgcagctgaggctcctggtgtcagaacacaggaaggatcttggcctcactactgtttgggaagaccagctctcctaccttttatcaccagctttggcttcttatgaatttgagcgtacaacaagtatatcagcaggcaatgaagaatttcaagatgccataagaagggctgtacctgatggtcacacatttaaagggttcccaatacattttgtgtatagaaatgcaagacgtgcatttgccacatgtcttcgatctcctttctgtgaagaaataatctgttgccgtggagaccaagtgcgactggcagttcgtgtccgagtatttacttaccctgaatctgcatgtgctgtttggatcatgtttgcttgtgaatgtgcctcttaggagcacttgtccagaagtgtctgggaaaagcttgggctgcacagtgatggtgctccctgaaagactcagagcagcacagccagtacctccagagtatgaagcatgaagtacacttattctacaagaataagaagtaaatataaaaaaagtcaaggattcaatttttaataaagtaacaaaatcaacaaaacaaaatcatattcagagtaacatggacttcacagcactttgaaaaagacatttaaatgttgatttgagttgttcagacattttaaatatgaagtcatagagtaaaaatacaatcaatgactgaaattggg

SEQ ID NO: 3832 - DNA, 2939 bp, Homo sapiens
  source 1..2939: mol_type = unassigned DNA
gtttgtccgccactgtttgaaaacagttggcgccgccgccgccggggcctcatttccaggtcagcccccggcctgacgcggcgttgcgtcccccgggagctgcgctaggcgaacggctgcggcgctttgtgctccagtcgctcctaacgctccctggcccggccggggccgcgcagttagggcatctgaggcggggagaagcggcggggagacgccggctgccagcatgtcgctgcctccggagaaagcctccgagctgaagcagctcatccaccagcagctgagcaagatggatgtccatggtagaataagagaaatccttgctgagactatacgggaagaattggcacctgatcaacagcatttatcaacagaagatttgatcaaagcccttagacgtcgaggaatcattgacgatgtgatgaaagaacttaattttgttactgacagtgttgagcaagaactcccttcctctccaaaacaacctatttgttttgatagacaatcgacattaaaaaaaactaatattgatccaacacggaggtatctttaccttcaggttttgggtggaaaagctttcttggaacatctgcaagaacctgagcctttacctggacaagtttgttcaacgtttactttatgtttacattatcgaaaccaacgttttcgttctaaacctgttccatgtgcctgtgaaccagattttcatgatggctttttacttgaagtacacagagaaagcttgggtgatggaactagaatggctgattcaacaacaatgttatcaataagtgatccaattcatatggtgctaatcaaaacagacatatttggtgagacgactttagtagcatcatattttctggaatggcgatcggttttgggctcagaaaatggagtgaccagtctgactgtggaacttatgggtgtaggcacagaatcaaaagtttctgtgggaattttaaatataaaacttgaaatgtatccaccactcaatcaaacgttatctcaagaagtagtgaacacacagcttgctttggaacgtcagaaaactgcagagaaagagcgattatttcttgtatatgctaagcagtggtggagagaatatttgcaaattcgaccctcacacaactcacgactggttaagatttttgcacaggatgaaaatgggataaatagaccagtctgttcctatgttaaaccacttcgagctggacggcttcttgatactccaaggcaagcagcaagatttgttaatgtccttggttatgaacgagcccctgttattggaggaggaggtaaacaggagcagtggtgcactctgctggcctttctctgtagaaacaagggtgactgtgaagatcacgctaaccttctgtgcagccttcttcttggatatggattagaagcctttgtttgtgttgggaccaaggcaaaaggagtacctcatgcatgggttatgacttgtggaactgatggggccatcactttttgggagagtttaacaggacacaggtacatccataaacctaccaatcctgatgaacctccagttgctgaacagcccaaaccactgtacccatatcgaacaattggttgtgttttcaaccatcagatgttcctgggaaattgtcaaccctctgatgcagtagaaacctgtgtatttgatttgaacgatgaatccaaatggaaacccatgagtgaggaagcaattaaatctgtgtgtgctcctggagctacaacatcccttcctccctttccacctctgtgtgcatccacaattgacgcgtcagtaacaagtaatgaaattgaaatgcagctgaggctcctggtgtcagaacacaggaaggatcttggcctcactactgtttgggaagaccagctctcctaccttttatcaccagctttggcttcttatgaatttgagcgtacaacaagtatatcagcaggcaatgaagaatttcaagatgccataagaagggctgtacctgatggtcacacatttaaagggttcccaatacattttgtgtatagaaatgcaagacgtgcatttgccacatgtcttcgatctcctttctgtgaagaaataatctgttgccgtggagaccaagtgcgactggcagttcgtgtccgagtatttacttaccctgaatctgcatgtgctgtttggatcatgtttgcttgtaaatatcgctcggtattatagggccaatatttatataagatttatacctgtgtttaattggaattttacacattgtacattacttagctatttagaggtttgttattttaaaatcacaatctggcttgaatggcatacttcaattttgtatatacttgactggtaatgtttaaaaaaaatcatgcattcctttaaaaattaaggctgaaaaacttgtataaatctccctggaatttagtataaattaagtgtatattctattttaataaatgctactttgtttacagttatcagtagtttaaatattaatataaaatgcattcagttttctttacacaaacaggtaatcaaagagatgtttgtctaagggtttgagccctagacaaatcagtatgatcattacttttcacaggttaatggaattattttatacagattaggagaaattaacctcatgacagatttatttattgcattggtgaaaataaatgttaatgaattaccacttttgtggtttattcgtggtccttgggatatttgagactgtccagaaatttatggttggaccttgaagcaagagtaggaaaaaactaataccagaaaagcataaatattaataacctcatatgaaagtacatgaatcatttagaaatatttatcactgtgatttgttgtaaaaatgaattgggtattttagaaaaactttattatacctctttgttatgatactgataaattgtgatcttgcagtcga

SEQ ID NO: 3833 - DNA, 2197 bp, Homo sapiens
  source 1..2197: mol_type = unassigned DNA
tttccaggtcagcccccggcctgacgcggcgttgcgtcccccgggagctgcgctaggcgaacggctgcggcgctttgtgctccagtcgctcctaacgctccctggcccggccggggccgcgcagttagggcatctgaggcggggagaagcggcggggagacgccggctgccagcatgtcgctgcctccggagaaagcctccgagctgaagcagctcatccaccagcagctgagcaagatggatgtccatggtagaataagagaaatccttgctgagactatacgggaagaattggcacctgatcaacagcatttatcaacagaagatttgatcaaagcccttagacgtcgaggaatcattgacgatgtgatgaaagaacttaattttgttactgacagtgttgagcaagaactcccttcctctccaaaacaacctatttgttttgatagacaatcgacattaaaaaaaagtgatggaactagaatggctgattcaacaacaatgttatcaataagtgatccaattcatatggtgctaatcaaaacagacatatttggtgagacgactttagtagcatcatattttctggaatggcgatcggttttgggctcagaaaatggagtgaccagtctgactgtggaacttatgggtgtaggcacagaatcaaaagtttctgtgggaattttaaatataaaacttgaaatgtatccaccactcaatcaaacgttatctcaagaagtagtgaacacacagcttgctttggaacgtcagaaaactgcagagaaagagcgattatttcttgtatatgctaagcagtggtggagagaatatttgcaaattcgaccctcacacaactcacgactggttaagatttttgcacaggatgaaaatgggataaatagaccagtctgttcctatgttaaaccacttcgagctggacggcttcttgatactccaaggcaagcagcaagatttgttaatgtccttggttatgaacgagcccctgttattggaggaggaggtaaacaggagcagtggtgcactctgctggcctttctctgtagaaacaagggtgactgtgaagatcacgctaaccttctgtgcagccttcttcttggatatggattagaagcctttgtttgtgttgggaccaaggcaaaaggagtacctcatgcatgggttatgacttgtggaactgatggggccatcactttttgggagagtttaacaggacacaggtacatccataaacctaccaatcctgatgaacctccagttgctgaacagcccaaaccactgtacccatatcgaacaattggttgtgttttcaaccatcagatgttcctgggaaattgtcaaccctctgatgcagtagaaacctgtgtatttgatttgaacgatgaatccaaatggaaacccatgagtgaggaagcaattaaatctgtgtgtgctcctggagctacaacatcccttcctccctttccacctctgtgtgcatccacaattgacgcgtcagtaacaagtaatgaaattgaaatgcagctgaggctcctggtgtcagaacacaggaaggatcttggcctcactactgtttgggaagaccagctctcctaccttttatcaccagctttggcttcttatgaatttgagcgtacaacaagtatatcagcaggcaatgaagaatttcaagatgccataagaagggctgtacctgatggtcacacatttaaagggttcccaatacattttgtgtatagaaatgcaagacgtgcatttgccacatgtcttcgatctcctttctgtgaagaaataatctgttgccgtggagaccaagtgcgactggcagttcgtgtccgagtatttacttaccctgaatctgcatgtgctgtttggatcatgtttgcttgtaaatatcgctcggtattatagggccaatatttatataagatttatacctgtgtttaattggaattttacacattgtacattacttagctatttagaggtttgttattttaaaatcacaatctggcttgaatggcatacttcaattttgtatatacttgactggtaatgtttaaaaaaaatcatgcattcctttaaaaattaaggctgaaaaacttgtataaatctccctggaatttagtataaattaagtgtatattctattttaataaatgctactttgtttacagtt

SEQ ID NO: 3834 - DNA, 817 bp, Homo sapiens
  source 1..817: mol_type = unassigned DNA
tcctcccagtgcacaggctggttggagtttctctggggacccctttccacctggctgtctcacttctttcttcatggaacattctctttccttagcttcttttttatcattgtctttcaatatttattattcctctctggctgttcttagtttttccttcatcttgtctttaaatgtgtgtgttctagaggcccagccctgggccctcttttcattcccgagtcctctttctccctggttgataatcatgcctaataatgttttggtacatccataaacctaccaatcctgatgaacctccagttgctgaacagcccaaaccactgtacccatatcgaacaattggttgtgttttcaaccatcagatgttcctgggaaattgtcaaccctctgatgcagtagaaacctgtgtatttgatttgaacgatgaatccaaatggaaacccatgagtgaggaagcaattaaatctgtgtgtgctcctggagctacaacatcccttcctccctttccacctctgtgtgcatccacaattgacgcgtcagtaacaagtaatgaaattgaaatgcagctgaggctcctggtgtcagaacacaggaaggatcttggcctcactactgtttgggaagaccagctctcctaccttttatcaccagctttggcttcttatgaatttgagcgtacaacaagtatatcagcaggcaatgaagaatttcaagatgccataagaagggctgtacctgatggtcacacatttaaagggttcccaatacattttgtgtatagaaatgcaagacgtgcatttgccacatgtcttcg

SEQ ID NO: 3835 - DNA, 534 bp, Homo sapiens
  source 1..534: mol_type = unassigned DNA
aatataaaacttgaaatgtatccaccactcaatcaaacgttatctcaagaagtagtgaacacacaggatgaaaatgggataaatagaccagtctgttcctatgttaaaccacttcgagctggacggcttcttgatactccaaggcaagcagcaagatttgttaatgtccttggttatgaacgagcccctgttattggaggaggaggtaaacaggagcagtggtgcactctgctggcctttctctgtagaaacaagggtgactgtgaagatcacgctaaccttctgtgcagccttcttcttggatatggattagaagcctttgtttgtgttgggaccaaggcaaaaggagtacctcatgcatgggttatgacttgtggaactgatggggccatcactttttgggagagtttaacaggacacaggtacatccataaacctaccaatcctgatgaacctccagttgctgaacagcccaaaccactgtacccatatcgaacaattggttgtgttttcaaccatcagatgttcctggga

SEQ ID NO: 3836 - DNA, 3309 bp, Homo sapiens
  source 1..3309: mol_type = unassigned DNA
ggcgaacggctgcggcgctttgtgctccagtcgctcctaacgctccctggcccggccggggccgcgcagttagggcatctgaggcggggagaagcggcggggagacgccggctgccagcatgtcgctgcctccggagaaagcctccgagctgaagcagctcatccaccagcagctgagcaagatggatgtccatggtagaataagagaaatccttgctgagactatacgggaagaattggcacctgatcaacagcatttatcaacagaagatttgatcaaagcccttagacgtcgaggaatcattgacgatgtgatgaaagaacttaattttgttacttgttgagcaagaactcccttcctctccaaaacaacctatttgttttgatagacaatcgacattaaaaaaaagttttgggtggaaaagctttcttggaacatctgcaagaacctgagcctttacctggacaagtttgttcaacgtttactttatgtttacattatcgaaaccaacgttttcgttctaaacctgttccatgtgcctgtgaaccagattttcatgatggctttttacttgaagtacacagagaaagcttgggtgatggaactagaatggctgattcaacaacaatgttatcaataagtgatccaattcatatggtgctaatcaaaacagacatatttggtgagacgactttagtagcatcatattttctggaatggcgatcggttttgggctcagaaaatggagtgaccagtctgactgtggaacttatgggtgtaggcacagaatcaaaagtttctgtgggaattttaaatataaaacttgaaatgtatccaccactcaatcaaacgttatctcaagaagtagtgaacacacagatagagtctcactctatcgcccagggtggagcacggtggcatgaactcggctcactgcaacctctgcctcccgggttcaagcaattctcctgcctcagcctcccgagtagctgggattacaggcatgtaccaccatccccagctacttgctttggaacgtcagaaaactgcagagaaagagcgattatttcttgtatatgctaagcagtggtggagagaatatttgcaaattcgaccctcacacaactcacgactggttaagatttttgcacaggatgaaaatgggataaatagaccagtctgttcctatgttaaaccacttcgagctggacggcttcttgatactccaaggcaagcagcaagatttgttaatgtccttggttatgaacgagcccctgttattggaggaggaggtaaacaggagcagtggtgcactctgctggcctttctctgtagaaacaaggtattatacacacataatagaattaagtagcagtatatcatagttactctgaatttgtaatccatttgtaaaagaatgccttagaaaaatgcacatatagtcaaccctctgtacccacaggttctgtatctgtagattcaaccaactgcagatcaaaaatacttacaaaagtaaaaaattacaataataaaaaatagtacaaattaaaaaatggtgtgtaacaacgtttatgtagcatttacattgtattgagatttttaaacaatttagaggtgatttaaagtatataggaggatgtgcttaggttatatataaaatactataccattttggctggccgcagtggctcatgcctgtatcccagcattttgggaggctgaggcaggtggatcacctgaggtcaggagttcaagaccagtctgggcaacatggtgaaaccctatctctactaaaatacaaaaaattatctgggcatggtgtcgtgtgcctgtaatcccagctactcaggaggctgaggcaggagaatcacttggaccctggaggcggaggttgcagtgagctgagatcgcaccattgcactctagcctgaggacagagcaagacacgtctcaaaaaaaaaaaaaatactattttatataagccttgagtatccacggattttgttttgcaagggtcctggaactaaccgctttggggtgctatcagcttgaccacgtcagaaccttgttctgtttttcataacatttaaatatcaatacacaaaaaactcagcatctttattttctcatgtagtttcttatttattgtgatttctgtgatgtagggacctacaagtactaaaatgtcagaaatcaagttgcagaatgaattaggaacagcaccaggaccagaccatggctttctggtactactgatgtgttgcaatttgctcagataatacatctttaaaaaagagaaaataaggctgggcgtggtggctcatgcctgtaatcccagcactttgggaggcagaggtgggtggatcacctgaggtcaggagttcaagaccagtctgaccaacgtggagaaactccgtctccactaaaagtacaaaattagcgtggtgtggtggcacgtgcctgtaatcttagctactgaggaggctgaggcaggagaattgcttgaacctgggaggcggaggttgtggtgagctgagatcgcgccattgcactccagcctgggcaacgagcgaaactccataaaaaaaaaagagaaaatggcagtacaaaattaatatagaaaaaatattaaaatagaaaaaaatcttgaattgcatgctatttagtttgtttagtttgtatttaaatacaaatgtatatttaattacactttttgaatgacttgattttagtaaactaattttatagattatgggatatttcctaatctgtgttctaaaaatgttgatagtatgataacaaacaagtaaaactatctttaggccaggcgcggtggctcacgcctgtaatcccagcactttgggaggccggggagggtggatcacctgtggtcgggagttctagaacagcctggctaacatggagaaactccatctctactgaaaaaatacaaaaattagccagccatggtggcgggctcctgtaatcccagctacttgggaggctgaggcaggagaatcacttgaacctgggaggtggaggttgcagtgagccgagatcacgccatcgcactccagtgtgggcaataagagcaaaactccatctcaaaaaaaaaaaacaaaaaactatctttagcctgggtgacagagcgagactctgtctcaaaaaaaataaataaaggtgacagcaggccaggcatggtggctcatgcccgcaattccagcacttgggtaggccaaggtgggcaaatcacttgagcccagaagttccagacaaacctgggcaacatggcaaaatccctctctcta

SEQ ID NO: 3837 - DNA, 413 bp, Homo sapiens
  source 1..413: mol_type = unassigned DNA
aatggcgatcggttttgggctcagaaaatggagtgaccagtctgactgtggaacttatgggcacagaatcaaaagtttctgtgggaattttaaatataaaacttgaaatgtatccaccactcaatcaaacgttatctcaagaagtagtgaacacacagcttgctttggaacgtcagaaaactgcagagaaagagcgattatttcttgtatatgctaagcagtggtggagagaatatttgcaaattcgaccctcacacaactcacgactggttaagatttttgcacaggtttgtaaattatattagaataattttatgcctgtatttgagatttactgttatgtgtgtaaatttcatttaatatttatttgtaaaatgtattccaaaaaataaaagtgtatttgtaaaataaaa

SEQ ID NO: 3838 - DNA, 684 bp, Homo sapiens
  source 1..684: mol_type = unassigned DNA
gagcctttacctggacaagtttgttcaacgtttactttatgtttacattatcgaaaccaacgttttcgttctaaacctgttccatgtgcctgtgaaccagattttcatgatggctttttacttgaagtacacagagaaagcttgggtgatggaactagaatggctgattcaacaacaatgttatcaataagtgatccaattcatatggtgctaatcaaaacagacatatttggtgagacgactttagtagcatcatattttctggaatggcgatcggttttgggctcagaaaatggagtgaccagtctgactgtggaacttatgggtgtaggcacagaatcaaaagtttctgtgggaattttaaatataaaacttgaaatgtatccaccactcaatcaaacgttatctcaagaagtagtgaacacacagcttgctttggaacgtcagaaaactgcagagaaagagcgattatttcttgtatatgctaagcagtggtggagagaatatttgcaaattcgaccctcacacaactcacgactggttaagatttttgcacaggtttgtaaattatattagaataattttatgcctgtatttgagatttactgttatgtgtgtaaatttcatttaatatttatttgtaaaatgtattccaaaaaataaaagtgtatttgtaaaataaaa

SEQ ID NO: 3839 - DNA, 831 bp, Homo sapiens
  source 1..831: mol_type = unassigned DNA
taatacaatagggaataagtattttaatacagcacctttttttggtttttgaagtttatgaacccgtttgttataaaaattgacctaataacagcttctactctgtgatgacactttattaaaatcagctcatagtggaattataagccaactgttacataaggtttacagaaagtttaaccttgttgaaggacagtgttgagcaagaactcccttcctctccaaaacaacctatttgttttgatagacaatcgacattaaaaaaaactaatattgatccaacacggaggtatctttaccttcaggttttgggtggaaaagctttcttggaacatctgcaagaacctgagcctttacctggacaagtttgttcaacgtttactttatgtttacattatcgaaaccaacgttttcgttctaaacctgttccatgtgcctgtgaaccagattttcatgatggctttttacttgaagtacacagagaaagcttgggtgatggaactagaatggctgattcaacaacaatgttatcaataagtgatccaattcatatggtgctaatcaaaacagacatatttggtgagacgactttagtagcatcatattttctggaatggcgatcggttttgggctcagaaaatggagtgaccagtctgactgtggaacttatgggtgtaggcacagaatcaaaagtttctgtgggaattttaaatataaaacttgaaatgtatccaccactcaatcaaacgttatctcaagaagtagtgaacacacagcttgctttggaacgtcagaaaactgcagagaaagagcgattatttcttgtatatg

SEQ ID NO: 3840 - DNA, 550 bp, Homo sapiens
  source 1..550: mol_type = unassigned DNA
aatacaatagggaataagtattttaatacagcacctttttttggtttttgaagtttatgaacccgtttgttataaaaattgacctaataacagcttctactctgtgatgacactttattaaaatcagctcatagtggaattataagccaactgttacataaggtttacagaaagtttaaccttgttgaaggacagtgttgagcaagaactcccttcctctccaaaacaacctatttgttttgatagacaatcgacattaaaaaaaagttttgggtggaaaagctttcttggaacatctgcaagaacctgagcctttacctggacaagtttgttcaacgtttactttatgtttacattatcgaaaccaacgttttcgttctaaacctgttccatgtgcctgtgaaccagattttcatgatggctttttacttgaagtacacagagaaagcttgggtgatggaactagaatggctgattcaacaacaatgttatcaataagtgatccaattcatatggtgctaatcaaaacagacatatttggtgagacgac

SEQ ID NO: 3841 - DNA, 787 bp, Homo sapiens
  source 1..787: mol_type = unassigned DNA
gaaaacagttggcgccgccgccgccggggcctcatttccaggtcagcccccggcctgacgcggcgttgcgtcccccgggagctgcgctaggcgaacggctgcggcgctttgtgctccagtcgctcctaacgctccctggcccggccggggccgcgcagttagggcatctgaggcggggagaagcggcggggagacgccggctgccagcatgtcgctgcctccggagaaagcctccgagctgaagcagctcatccaccagcagctgagcaagatggatgtccatggtagaataagagaaatccttgctgagactatacgggaagaattggcacctgatcaacagcatttatcaacagaagatttgatcaaagcccttagacgtcgaggaatcattgacgatgtgatgaaagaacttaattttgttactgacagtgttgagcaagaactcccttcctctccaaaacaacctatttgttttgatagacaatcgacattaaaaaaaagttttgggtggaaaagctttcttggaacatctgcaagaacctgagcctttacctggacaagtttgttcaacgtttactttatgtttacattatcgaaaccaacgttttcgttctaaacctgttccatgtgcctgtgaaccagattttcatgatggctttttacttgaagtacacagagaaagcttgggtgatggaactagaatggctgattcaacaacaatgttatcaataagtgatccaattcatatggtgctaatcaaaacagacatatttggtgagacgac

SEQ ID NO: 3842 - DNA, 897 bp, Homo sapiens
  source 1..897: mol_type = unassigned DNA
cctgtttgtccgccactgtttgaaaacagttggcgccgccgccgccggggcctcatttccaggtcagcccccggcctgacgcggcgttgcgtcccccgggagctgcgctaggcgaacggctgcggcgctttgtgctccagtcgctcctaacgctccctggcccggccggggccgcgcagttagggcatctgaggcggggagaagcggcggggagacgccggctgccagcatgtcgctgcctccggagaaagcctccgagctgaagcagctcatccaccagcagctgagcaagatggatgtccatggtagaataagagaaatccttgctgagactatacgggaagaattggcacctgatcaacagcatttatcaacagaagatttgatcaaagcccttagacgtcgaggaatcattgacgatgtgatgaaagaacttaattttgttactgacagtgttgagcaagaactcccttcctctccaaaacaacctatttgttttgatagacaatcgacattaaaaaaaagttttgggtggaaaagctttcttggaacatctgcaagaacctgagcctttacctggacaagtttgttcaacgtttactttatgtttacattatcgaaaccaacgttttcgttctaaacctgttccatgtgcctgtgaaccagattttcatgatggctttttacttgaagtacacagagaaagcttgggtaagaaacagtaataaattgtcatttaattgagtaaatctttgttatgttttattgtgaaacaataataatgactttttctgtaaggagagatttataatggaggaatctctattttgtttcccactgctcttttcaatttaaactactatccaccttcttgcaatattctgtttgctattcatt

SEQ ID NO: 3843 - DNA, 1957 bp, Homo sapiens
  source 1..1957: mol_type = unassigned DNA
cgaagcactaggccgtttgaggatctccgctccgctttgcctgggaccaggaaaagacgcgagagacggaactcggcatcaggcactgcttggggcaggaggagagtaggggaaaccaaggaagagaacagaaaggtaagcaccagccacaaaaacctacaaaagaagggaaattactgtctttaaatattaaaaaaaaacaagatccatgagtgggcatcgatcaacaaggaaaagatgtggagattctcacccggagtccccagtgggcttcgggcatatgagtactacaggatgtgtattaaataaattgtttcagttaccaacaccaccattgtcaagacaccaactaaagcggctagaagaacacagatatcaaagtgctggacggtccctgcttgagcccttaatgcaagggtattgggaatggctcgttagaagagttccctcctggattgccccaaatctcatcaccatcattggactgtcaataaacatctgtacaactattttattagtcttctactgccctacagctacagagcaggcacctctgtgggcatatattgcttgtgcctgtggccttttcatttaccagtctttggatgctattgatgggaaacaggcaagaagaaccaatagtagttctcctctgggagaactttttgatcatggctgtgattcactatcaacagtttttgtggttcttggaacttgtattgcagtgcagctggggacaaaccctgattggatgtttttttgttgttttgcggggacatttatgttctattgtgcgcactggcaaacgtatgtttctggaacattgcgatttggaataattgatgtgactgaagtgcaaatcttcataataatcatgcatttgctggcagtgattggaggaccacctttttggcaatctatgattccagtgctgaatattcaaatgaaaatttttcctgcactttgtactgtagcagggaccatattttcctgtacaaattacttccgtgtaatcttcacaggtggtgttggcaaaaatggatcaacaatagcaggaacaagtgtcctttctccttttctccatattggatcagtgattacattagctgcaatgatctacaagaaatctgcagttcagctttttgaaaagcatccctgtctttatatactgacatttggttttgtgtctgctaaaatcactaataagcttgtggttgcacacatgacgaaaagtgaaatgcatttgcatgacacagcattcataggtccggcacttttgtttctggaccagtattttaacagctttattgatgaatatattgtactttggattgccctggttttctctttctttgatttgatccgctactgtgtcagtgtttgcaatcagattgcgtctcacctgcacatacatgtcttcagaatcaaggtctctacagctcattctaatcatcattaatgatgtaattggtatataggaacatcatgttttctgcaggaaagaaagtaacatattaaggagaatgggggtggataagaacaaatataatttataataatcaatgttgtataacttttattctttattattggtaacacgccctaactatcctgtgtgagaatgggaatttcaagtcccatcttgtaaattgtatatgttgtcatgcagggtttgggccaagaaagcatgcagaaaaaaatgccatgtgattgtaattatcctggattcagaataatactgtgatggggagccagatccgcagtggtggagagttctaatgttgactgtttgcaggccaaaagatgattgctttataattttaacaaatcattgtcttttagtaacatccttgtttagtgtcttctcaagctttctttactgaggaattcagcttgtgacacagatacatcccactagcttgtgaggtggaactagtaataaagaccttgaatttgg

SEQ ID NO: 3844 - DNA, 2110 bp, Homo sapiens
  source 1..2110: mol_type = unassigned DNA
gctccgctttgcctgggaccaggaaaagacgcgagagacggaactcggcatcaggcactgcttggggcaggaggagagtaggggaaaccaaggaagagaacagaaaggtaagcaccagccacaaaaacctacaaaagaagggaaattactgtctttaaatattaaaaaaaaacaagatccatgagtgggcatcgatcaacaaggaaaagatgtggagattctcacccggagtccccagtgggcttcgggcatatgagtactacaggatgtgtattaaataaattgtttcagttaccaacaccaccattgtcaagacaccaactaaagcggctagaagaacacagatatcaaagtgctggacggtccctgcttgagcccttaatgcaagggtattgggaatggctcgttagaagagttccctcctggattgccccaaatctcatcaccatcattggactgtcaataaacatctgtacaactattttattagtcttctactgccctacagctacagagcaggcacctctgtgggcatatattgcttgtgcctgtggccttttcatttaccagtctttggatgctattgatgggaaacaggcaagaagaaccaatagtagttctcctctgggagaactttttgatcatggctgtgattcactatcaacaggtattgttgatttttttaatgttattgattattaacaatggttaaaccagtgtgctaagcagtgttagaatacatgtttagtcatgagaataagtaattttgtattaaattttagtatttctcaaaagactatgaacctagttaatatttgttcattattggtagtgttaggaaatttagaaattactttctgcttgttatttttagccccaaatattgttttggcatcttttgtttttaaaagcttggggcataattgtcaccatcaaaactcttatgaactaaatgagagtacagtggtgggagactagttaggtaatttgtggtcttcatatatttaaatgaatgttatgtagacattcagaattatgttaatggacttggattataactacgtcataagaagctcagagaaagactatgacaaattaggagtatcgttaatattgcattgtgtactggaaatttgctaagagagtacattttagatgcttttaccacaggagaaaaaaggtaactatgggacatgatggataggttaatttgcttaactatagtaatcatttatatatatggcatgttttacacctcatatacaatttttaaaagaaacactaaagtgctagcaataactgagttactctgtttggattataagtgatatctctttatttgcactgttttgcaagtttttaaaatagtagtttattatgtttttagagaggaaaaagacacttaaaatctaaatgacagtttttcagctagtctttctgacaggaactcatccctcccctcttttatttttgttttatttagtttctcaattattttcttgtttgacatggcacttaaaatatttaaaaagaaactaacaaaaaccccttatagttttacctcctgaatccacatttacaggtataggtgcatatcaaaatcattgcttcattgtatcccaacagcagcttatttagtagaggaggagaagcaactaaggtcatataattttttaagagtcaaatcaagaaatactcaaaacttctgttgaataaatggtagttggctgtcttgaaaggcaacaaccagctgactgcaggatggcaggatggcaggcttcctattatttattttaaattgcagtcatttttgcgttgtagtttgaggtctagacttttataggaagtctttttctatgtatgtcacccataacaatatctgtttaaaaaaaaaaagacagttatcaatctgaagcaagtaagtcggtccgtctggggattatatagcccctttgtttttcttttttggctgtctgccttgtaatgatttgctgatcattagtactagtgtctctaagtcaggaaaatactcgaagaaatgttgaagtattttagttgccttcaagaactttgcttccactaagtgatttggtaaaaaaaaaaaaaaaaa

SEQ ID NO: 3845 - DNA, 783 bp, Homo sapiens
  source 1..783: mol_type = unassigned DNA
aggggaaaccaaggaagagaacagaaaggtagggcacggggagctgagcccagctgcactcatccccgcccccggaaacccccgcagctcccgccccaaccagcccccctctggcgcctggcataaggtagcccccggaggcaatgagggccagcaggagtctcgcgcgcctgcgacgcgggtaagcaccagccacaaaaacctacaaaagaagggaaattactgtctttaaatattaaaaaaaaacaagatccatgagtgggcatcgatcaacaaggaaaagatgtggagattctcacccggagtccccagtgggcttcgggcatatgagtactacaggatgtgtattaaataaattgtttcagttaccaacaccaccattgtcaagacaccaactaaagcggctagaagaacacagatatcaaagtgctggacggtccctgcttgagcccttaatgcaagggtattgggaatggctcgttagaagagttccctcctggattgccccaaatctcatcaccatcattggactgtcaataaacatctgtacaactattttattagtcttctactgccctacagctacagagcaggcacctctgtgggcatatattgcttgtgcctgtggccttttcatttaccagtctttggatgctattgatgggaaacaggcaagaagaaccaatagtagttctcctctgggagaactttttgatcatggctgtgattcactatcaacagtttttgtggttcttggaacttgtattgcagtgcagctgggga

SEQ ID NO: 3846 - DNA, 2198 bp, Homo sapiens
  source 1..2198: mol_type = unassigned DNA
gtgaacgtgctgccgccgatcagtcacccagtcggctggagtcggaggcgatatttctaggggtgtacttgttggggtcagggtaagcaccagccacaaaaacctacaaaagaagggaaattactgtctttaaatattaaaaaaaaacaagatccatgagtgggcatcgatcaacaaggaaaagatgtggagattctcacccggagtccccagtgggcttcgggcatatgagtactacaggatgtgtattaaataaattgtttcagttaccaacaccaccattgtcaagacaccaactaaagcggctagaagaacacagatatcaaagtgctggacggtccctgcttgagcccttaatgcaagggtattgggaatggctcgttagaagagttccctcctggattgccccaaatctcatcaccatcattggactgtcaataaacatctgtacaactattttattagtcttctactgccctacagctacagagcaggcacctctgtgggcatatattgcttgtgcctgtggccttttcatttaccagtctttggatgctattgatgggaaacaggcaagaagaaccaatagtagttctcctctgggagaactttttgatcatggctgtgattcactatcaacagtttttgtggttcttggaacttgtattgcagtgcagctggggacaaaccctgattggatgtttttttgttgttttgcggggacatttatgttctattgtgcgcactggcaaacgtatgtttctggaacattgcgatttggaataattgatgtgactgaagtgcaaatcttcataataatcatgcatttgctggcagtgattggaggaccacctttttggcaatctatgattccagtgctgaatattcaaatgaaaatttttcctgcactttgtactgtagcagggaccatattttcctgtacaaattacttccgtgtaatcttcacaggtggtgttggcaaaaatggatcaacaatagcaggaacaagtgtcctttctccttttctccatattggatcagtgattacattagctgcaatgatctacaagaaatctgcagttcagctttttgaaaagcatccctgtctttatatactgacatttggttttgtgtctgctaaaatcactaataagcttgtggttgcacacatgacgaaaagtgaaatgcatttgcatgacacagcattcataggtccggcacttttgtttctggaccagtattttaacagctttattgatgaatatattgtactttggattgccctggttttctctttctttgatttgatccgctactgtgtcagtgtttgcaatcagattgcgtctcacctgcacatacatgtcttcagaatcaaggtctctacagctcattctaatcatcattaatgatgtaattggtatataggaacatcatgttttctgcaggaaagaaagtaacatattaaggagaatgggggtggataagaacaaatataatttataataatcaatgttgtataacttttattctttattattggtaacacgccctaactatcctgtgtgagaatgggaatttcaagtcccatcttgtaaattgtatatgttgtcatgcagggtttgggccaagaaagcatgcagaaaaaaatgccatgtgattgtaattatcctggattcagaataatactgtgatggggagccagatccgcagtggtggagagttctaatgttgactgtttgcaggccaaaagatgattgctttataattttaacaaatcattgtcttttagtaacatccttgtttagtgtcttctcaagctttctttactgaggaattcagcttgtgacacagatacatcccactagcttgtgaggtggaactagtaataaagaccttgaatttggattgaaaagtttcctatctttacattgttgaggaagtccttttttttttttttttttttttaattgctcaagaaatgattctctcacaggcttgggaaatcctgttagcatgcagaataatgtggtaactttgtcaatttcccattttatttttttaaataaatatatgatctaaaagccaactttttctcagttttactcagtggaaagataaactaagttttaatgttatttttttaaatttaagcaaaatttatttctgttctttaataaataagaaaatgtggtccactg

SEQ ID NO: 3847 - DNA, 851 bp, Homo sapiens
  source 1..851: mol_type = unassigned DNA
tggagacattggggtggcggagcgccggcgcgggagccggggggctgttgtgtgggagcccaaggtaagcaccagccacaaaaacctacaaaagaagggaaattactgtctttaaatattaaaaaaaaacaagatccatgagtgggcatcgatcaacaaggaaaagatgtggagattctcacccggagtccccagtgggcttcgggcatatgagtactacaggatgtgtattaaataaattgtttcagttaccaacaccaccattgtcaagacaccaactaaagcggctagaagaacacagatatcaaagtgctggacggtccctgcttgagcccttaatgcaagggtattgggaatggctcgttagaagagttccctcctggattgccccaaatctcatcaccatcattggactgtcaataaacatctgtacaactattttattagtcttctactgccctacagctacagagcaggcacctctgtgggcatatattgcttgtgcctgtggccttttcatttaccagtctttggatgctattgatgggaaacaggcaagaagaaccaatagtagttctcctctgggagaactttttgatcatggctgtgattcactatcaacagtttttgtggttcttggaacttgtattgcagtgcagctggggacaaaccctgattggatgtttttttgttgttttgcggggacatttatgttctattgtgcgcactggcaaacgtatgtttctggaacattgcgatttggaataattgatgtgactgaagtgcaaatcttcataataatcatgcatttgctggcagtgattggaggaccacctttttggcaatctatg

SEQ ID NO: 3848 - DNA, 2175 bp, Homo sapiens
  source 1..2175: mol_type = unassigned DNA
ggagctgggatcatgtcagcctcattcactgcatttatatgttggctgaatgcattggaaactgcaccagccacaaaaacctacaaaagaagggaaattactgtctttaaatattaaaaaaaaacaagatccatgagtgggcatcgatcaacaaggaaaagatgtggagattctcacccggagtccccagtgggcttcgggcatatgagtactacaggatgtgtattaaataaattgtttcagttaccaacaccaccattgtcaagacaccaactaaagcggctagaagaacacagatatcaaagtgctggacggtccctgcttgagcccttaatgcaagggtattgggaatggctcgttagaagagttccctcctggattgccccaaatctcatcaccatcattggactgtcaataaacatctgtacaactattttattagtcttctactgccctacagctacagagcaggcacctctgtgggcatatattgcttgtgcctgtggccttttcatttaccagtctttggatgctattgatgggaaacaggcaagaagaaccaatagtagttctcctctgggagaactttttgatcatggctgtgattcactatcaacagtttttgtggttcttggaacttgtattgcagtgcagctggggacaaaccctgattggatgtttttttgttgttttgcggggacatttatgttctattgtgcgcactggcaaacgtatgtttctggaacattgcgatttggaataattgatgtgactgaagtgcaaatcttcataataatcatgcatttgctggcagtgattggaggaccacctttttggcaatctatgattccagtgctgaatattcaaatgaaaatttttcctgcactttgtactgtagcagggaccatattttcctgtacaaattacttccgtgtaatcttcacaggtggtgttggcaaaaatggatcaacaatagcaggaacaagtgtcctttctccttttctccatattggatcagtgattacattagctgcaatgatctacaagaaatctgcagttcagctttttgaaaagcatccctgtctttatatactgacatttggttttgtgtctgctaaaatcactaataagcttgtggttgcacacatgacgaaaagtgaaatgcatttgcatgacacagcattcataggtccggcacttttgtttctggaccagtattttaacagctttattgatgaatatattgtactttggattgccctggttttctctttctttgatttgatccgctactgtgtcagtgtttgcaatcagattgcgtctcacctgcacatacatgtcttcagaatcaaggtctctacagctcattctaatcatcattaatgatgtaattggtatataggaacatcatgttttctgcaggaaagaaagtaacatattaaggagaatgggggtggataagaacaaatataatttataataatcaatgttgtataacttttattctttattattggtaacacgccctaactatcctgtgtgagaatgggaatttcaagtcccatcttgtaaattgtatatgttgtcatgcagggtttgggccaagaaagcatgcagaaaaaaatgccatgtgattgtaattatcctggattcagaataatactgtgatggggagccagatccgcagtggtggagagttctaatgttgactgtttgcaggccaaaagatgattgctttataattttaacaaatcattgtcttttagtaacatccttgtttagtgtcttctcaagctttctttactgaggaattcagcttgtgacacagatacatcccactagcttgtgaggtggaactagtaataaagaccttgaatttggattgaaaagtttcctatctttacattgttgaggaagtccttttttttttttttttttttttaattgctcaagaaatgattctctcacaggcttgggaaatcctgttagcatgcagaataatgtggtaactttgtcaatttcccattttatttttttaaataaatatatgatctaaaagccaactttttctcagttttactcagtggaaagataaactaagttttaatgttatttttttaaatttaagcaaaatttatttctgttctttaataaataagaaaatgtggtccactg

SEQ ID NO: 3849 - DNA, 764 bp, Homo sapiens
  source 1..764: mol_type = unassigned DNA
gttctaagatgtctaccctcctccacccaagacagaatcgatcatctttgacacctacctgcttagtctcctgaatctgctactgagtgtaattccccttattggcaacaccactcaccagaattgatgtgactgaagtgcaaatcttcataataatcatgcatttgctggcagtgattggaggaccacctttttggcaatctatgattccagtgctgaatattcaaatgaaaatttttcctgcactttgtactgtagcagggaccatattttcctgtacaaattacttccgtgtaatcttcacaggtggtgttggcaaaaatggatcaacaatagcaggaacaagtgtcctttctccttttctccatattggatcagtgattacattagctgcaatgatctacaagaaatctgcagttcagctttttgaaaagcatccctgtctttatatactgacatttggttttgtgtctgctaaaatcactaataagcttgtggttgcacacatgacgaaaagtgaaatgcatttgcatgacacagcattcataggtccggcacttttgtttctggaccagtattttaacagctttattgatgaatatattgtactttggattgccctggttttctctttctttgatttgatccgctactgtgtcagtgtttgcaatcagattgcgtctcacctgcacatacatgtcttcagaatcaaggtctctacagctcattctaatcatcattaatgatgtaattggtatatagga

SEQ ID NO: 3850 - DNA, 5300 bp, Homo sapiens
  source 1..5300: mol_type = unassigned DNA
ggaaattgccttccaaatcctcattaagttagaaggcttttactgacatttagaaagcaagtttatggtcagaacaaataaaaacagtgcagatgtcttcataaggctgattccagaagatcagctgttttgtaaaggtaagtgatttgcatctattacatatggattacccattctttcccaaattttttccccaaagagatgaatttttaccaaagattatagttattgttgttgttgtggttttccttttttttttttccaaaggaaagcagttgtcttcatgcataaaagtcagtgcttgttttatacattgcaagaaacaaaaagcatattttttgtttgttgcttccccaaaagacattccttttagaatgccttggaactatgttctatcatatcactctttaaaaaaaacaaagaagaatatattcttatttggaagagacttaatataatcaactcatggttacttttactgatgcttgagtcttttaaatgtagtaattgatcaaattgtattaagccataagggactttctggaattcagttaaggcaactaggtgagtgttactactgcaggtgaggtttcaggattcatttggtcagactgaagacgttctatgtagtataaattgattatatctcattcttgaactacaagactttaaaatgcctttacacttaaataattctgatagggtgattttcctttgtagacactgtaattatgttaacatttgctgtattttggtggaattcatttacattaaaatgatttacaaacaggcattcccacattctttggaggaaagtgtctaatctcaaaatggtactttttatttctgctctgatgtacaaagcctgtaaggacattttatcatgcttataagaaaactagtcaaaatttactaactgatattagtctgcattaatacaaactattgaaccaaaaaacatgacctttgtaatctggtaaagatactgataatttaagattttctttttctatgtctaacctttttaaaagtgaatttcattacattgttattatttggatgcataccttcatggtatgagtctggagagttttcacctggctgtaggacagacaccatggtccaaaggaattcttactcttcccaactcttaaagacttgaaacttcaagcagacctgacataaagatgtctttggtatagctctttggctatttctaaagagtggatgcactttggccacctttgataagttccaagatgatgacagaaagaaaaagattgggaaagacagaatgtgcctgttctttttgacttgagggagagagagaatgtgccaccctccttgatcttaagcgtggggtgagaatggcaacactttgtgttttttataagtagtgccaatttttaaaggatcacctggtgagacttgggattcctttgactcgagcttttccttcactttgcctcatattttcttggtagctcactttctttttcattgctaatgtgggggctagatgtttcttcatactctcccaaaacaggagttctacatagaaaggaagagaaagggagattttaatcttcatttaacaaatgtgtattgagccacctacaataaccagggctctagagagtgtacaaaatcaattcaaacaaaatccaacactcaggagcttatgttttggtgtatatagctaacatatatgacaaaagtgatgaaaaccttaagaatctatgatactttgcgcctaggtcaatagcttgcttccttactttgtggtccaagccatgtactaattttcctggcttttctaatgtttgtgtttattcttctttcaaagggcaacaatttttatgatcccaaagcaatttcaccaaattttaaatacagttatgactctcattcagttcatttatgacacagatgactattatacagagatggtactcatttagtaccctggccctaatacagggctgtccctgtaatagaataatgctttgcttcttttggaatctgagggaagtatagtattttcccttttgccagagagatcttttgtctctatggagtcaaaagtgggaggggtgggaagagaggttgggaaccaggaaactagccacagtattgagtttcagccaggtgcatcagattgagaatgtaatgtccctagtttattgaacaagagcagaaaaatctcttggagttcaaagcaaccatggtgttgattttctcctttcttgaaaacaagttttgaacttagactgtagaggttggagatttagggggagaagataaccatttaggataatccataaagtttaggacttgacttagttgacctagttaattttagaactaggttgacctagttaattttagaaaatttaacactgctacagtacaatttaaacttgaacatttgatttcaattttttttagagctgcatttttgcaagaggtaacagagttatctcaacaaagtgagttcttgagagttttgaagaaataaagtatccaaccattaagatttatgtcttccagtcttaactgaggttttctatatagtaggaagtgccacatttgctatttgattttaaaagtgtagatagatgttagccatacaaagtgtaaacagccctaattaaaatgctttcattgtgaccgggcatggtggctcacacctgtaatcccagcactttgggaggctgaggctggcagatcacttgacgtcaagagttcgagaccagcccggccaacatggtgaaaccccatctctactaaaaatacaaaaattagctgggcgcagtggcacatgcctgtaatcccagctactcaaaaggctgaggcagtagaatcacttcaacccgggaagcgggggttgcagtaaaccaggatcacaccgctgtactccagcctgggtgacagagcaagactctgtctcaattaaaaaaaaaattttttttttcattgtaagaactcatggcttattaaaccactgggggcttttggaatcttgtttctataatcatttgtttctattactagactacgtcatttattttactgttgctttcttttcaatccatattggacaaaatttgagaccaaaatttaaagggaggggtgcgaaaaagaagagactcttaaatgatttttaaaattcagtacaagtgtatttcattttaaatgatagatattgtgtttgcaaaaatgcatgacatcaatccactctgtcccccatacttcaggtaaataaacacattttcagtatactttatgaatatattattcacttttctgaaaagtacatttaaacttcaaaattttgtatgcacaatagtagaatctgtttgaatgtacttgacctgttttttcttctgcattgtgaatgccttcttaattgccttctgcttttactagctgcctgtatcctaacaatttggagttgggaactcttctgaatagaaattttatcttccattctctatactctgcagatttttatatctagtcgcaacatttctattatgattcatacttcctcacaacaattatgaatgttctacagatttagaggtagaattcaaaaacatatacaaggaaaaaggcagggtgcactccttttattaaaaggccagaacacatcctggttcactgttgcaagaccactgggatgcattaggtgaatctaacttagcttgtgacacaagttaataaagttgaatctggtttttttgttttttttaaggttgatggctgaagtgagattaatttctaaatagtctcaactcttgagacttgctatattgcttataatgaagaggaaaaggacactttcattactttacgtatttatgtaattggagggaatggaaagtttttgggaatatgaatcaaatattagactgttttcttattttagtttgtatatgttttaattgttttctctctctacccattaaagattccagtgctgaatattcaaatgaaaatttttcctgcactttgtactgtagcagggaccatattttcctgtacaaattacttccgtgtaatcttcacaggtggtgttggcaaaaatggatcaacaatagcaggaacaagtgtcctttctccttttctccatattggatcagtgattacattagctgcaatgatctacaagaaatctgcagttcagctttttgaaaagcatccctgtctttatatactgacatttggttttgtgtctgctaaaatcactaataagcttgtggttgcacacatgacgaaaagtgaaatgcatttgcatgacacagcattcataggtccggcacttttgtttctggaccagtattttaacagctttattgatgaatatattgtactttggattgccctggttttctctttctttgatttgatccgctactgtgtcagtgtttgcaatcagattgcgtctcacctgcacatacatgtcttcagaatcaaggtctctacagctcattctaatcatcattaatgatgtaattggtatataggaacatcatgttttctgcaggaaagaaagtaacatattaaggagaatgggggtggataagaacaaatataatttataataatcaatgttgtataacttttattctttattattggtaacacgccctaactatcctgtgtgagaatgggaatttcaagtcccatcttgtaaattgtatatgttgtcatgcagggtttgggccaagaaagcatgcagaaaaaaatgccatgtgattgtaattatcctggattcagaataatactgtgatggggagccagatccgcagtggtggagagttctaatgttgactgtttgcaggccaaaagatgattgctttataattttaacaaatcattgtcttttagtaacatccttgtttagtgtcttctcaagctttctttactgaggaattcagcttgtgacacagatacatcccactagcttgtgaggtggaactagtaataaagaccttgaatttggattgaaaagtttcctatctttacattgttgaggaagtccttttttttttttttttttttttaattgctcaagaaatgattctctcacaggcttgggaaatcctgttagcatgcagaataatgtggtaactttgtcaatttcccattttatttttttaaataaatatatgatctaaaagccaactttttctcagttttactcagtggaaagataaactaagttttaatgttatttttttaaatttaagcaaaatttatttctgttctttaataaataagaaaatgtggtccac

SEQ ID NO: 3851 - DNA, 511 bp, Homo sapiens
  source 1..511: mol_type = unassigned DNA
cttattcacatgttttttaaagtatgagctgctttgtaaaaataagcctggtctcttaagtgaaatcctcagtttgtgcctaatgaatttatgctgctacttttcattagctcttctagtttgtgatttatagaaattgctgcctatcaggcaccatgaggttcctgaaagtttgagttgaactgtgaactgttctgcagcagatccatgtagtatctgatgagtactgaatactattaactcttctcttcactctgtacagggaacaagtgtcctttctccttttctccatattggatcagtgattacattagctgcaatgatctacaagaaatctgcagttcagctttttgaaaagcatccctgtctttatatactgacatttggttttgtgtctgctaaaatcactaataagcttgtggttgcacacatgacgaaaagtgaaatgcatttgcatgacacagcattcataggtccggcacttttgtttctggaccagtattttaacagc

SEQ ID NO: 3852 - DNA, 2251 bp, Homo sapiens
  source 1..2251: mol_type = unassigned DNA
cgaagcactaggccgtttgaggatctccgctccgctttgcctgggaccaggaaaagacgcgagagacggaactcggcatcaggcactgcttggggcaggaggagagtaggggaaaccaaggaagagaacagaaaggtaagcaccagccacaaaaacctacaaaagaagggaaattactgtctttaaatattaaaaaaaaacaagatccatgagtgggcatcgatcaacaaggaaaagatgtggagattctcacccggagtccccagtgggcttcgggcatatgagtactacaggatgtgtattaaataaattgtttcagttaccaacaccaccattgtcaagacaccaactaaagcggctagaagaacacagatatcaaagtgctggacggtccctgcttgagcccttaatgcaagggtattgggaatggctcgttagaagagttccctcctggattgccccaaatctcatcaccatcattggactgtcaataaacatctgtacaactattttattagtcttctactgccctacagctacagagcaggcacctctgtgggcatatattgcttgtgcctgtggccttttcatttaccagtctttggatgctattgatgggaaacaggcaagaagaaccaatagtagttctcctctgggagaactttttgatcatggctgtgattcactatcaacagtttttgtggttcttggaacttgtattgcagtgcagctggggacaaaccctgattggatgtttttttgttgttttgcggggacatttatgttctattgtgcgcactggcaaacgtatgtttctggaacattgcgatttggaataattgatgtgactgaagtgcaaatcttcataataatcatgcatttgctggcagtgattggaggaccacctttttggcaatctatgattccagtgctgaatattcaaatgaaaatttttcctgcactttgtactgtagcagggaccatattttcctgtacaaattacttccgtgtaatcttcacaggtggtgttggcaaaaatggatcaacaatagcaggaacaagtgtcctttctccttttctccatattggatcagtgattacattagctgcaatgatctacaagaaatctgcagttcagctttttgaaaagcatccctgtctttatatactgacatttggttttgtgtctgctaaaatcactaataagcttgtggttgcacacatgacgaaaagtgaaatgcatttgcatgacacagcattcataggtccggcacttttgtttctggaccagtattttaacagctttattgatgaatatattgtactttggattgccctggttttctctttctttgatttgatccgctactgtgtcagtgtttgcaatcagattgcgtctcacctgcacatacatgtcttcagaatcaaggtctctacagctcattctaatcatcattaatgatgtaattggtatataggaacatcatgttttctgcaggaaagaaagtaacatattaaggagaatgggggtggataagaacaaatataatttataataatcaatgttgtataacttttattctttattattggtaacacgccctaactatcctgtgtgagaatgggaatttcaagtcccatcttgtaaattgtatatgttgtcatgcagggtttgggccaagaaagcatgcagaaaaaaatgccatgtgattgtaattatcctggattcagaataatactgtgatggggagccagatccgcagtggtggagagttctaatgttgactgtttgcaggccaaaagatgattgctttataattttaacaaatcattgtcttttagtaacatccttgtttagtgtcttctcaagctttctttactgaggaattcagcttgtgacacagatacatcccactagcttgtgaggtggaactagtaataaagaccttgaatttggattgaaaagtttcctatctttacattgttgaggaagtccttttttttttttttttttttttaattgctcaagaaatgattctctcacaggcttgggaaatcctgttagcatgcagaataatgtggtaactttgtcaatttcccattttatttttttaaataaatatatgatctaaaagccaactttttctcagttttactcagtggaaagataaactaagttttaatgttatttttttaaatttaagcaaaatttatttctgttctttaataaataagaaaatgtggtccactg

SEQ ID NO: 3853 - DNA, 1966 bp, Homo sapiens
  source 1..1966: mol_type = unassigned DNA; mol_type = unassigned DNA
aaattactgtctttaaatattaaaaaaaaacaagatccatgagtgggcatcgatcaacaaggaaaagatgtggagattctcacccggagtccccagtgggcttcgggcatatgagtactacaggatgtgtattaaataaattgtttcagttaccaacaccaccattgtcaagacaccaactaaagcggctagaagaacacagatatcaaagtgctggacggtccctgcttgagcccttaatgcaagggtattgggaatggctcgttagaagagttccctcctggattgccccaaatctcatcaccatcattggactgtcaataaacatctgtacaactattttattagtcttctactgccctacagctacagagcaggcacctctgtgggcatatattgcttgtgcctgtggccttttcatttaccagtctttggatgctattgatgggaaacaggcaagaagaaccaatagtagttctcctctgggagaactttttgatcatggctgtgattcactatcaacagtttttgtggttcttggaacttgtattgcagtgcagctggggacaaaccctgattggatgtttttttgttgttttgcggggacatttatgttctattgtgcgcactggcaaacgtatgtttctggaacattgcgatttggaataattgatgtgactgaagtgcaaatcttcataataatcatgcatttgctggcagtgattggaggaccacctttttggcaatctatgattccagtgctgaatattcaaatgaaaatttttcctgcactttgtactgtagcagggaccatattttcctgtacaaattacttccgtgtaatcttcacaggtggtgttggcaaaatggatcaacaatagcaggaacaagtgtcctttctccttttctccatattggatcagtgattacattagctgcaatgatctacaagaaatctgcagttcagctttttgaaaagcatccctgtctttatatactgacatttggttttgtgtctgctaaaatcactaataagcttgtggttgcacacatgacgaaaagtgaaatgcatttgcatgacacagcattcataggtccggcacttttgtttctggaccagtattttaacagctttattgatgaatatattgtactttggattgccctggttttctctttctttgatttgatccgctactgtgtcagtgtttgcaatcagattgcgtctcacctgcacatacatgtcttcagaatcaaggtctctacagctcattctaatcatcattaatgatgtaattggtatataggaacatcatgttttctgcaggaaagaaagtaacatattaaggagaatgggggtggataagaacaaatataatttataataatcaatgttgtataacttttattctttattattggtaacacgccctaactatcctgtgtgagaatgggaatttcaagtcccatcttgtaaattgtatatgttgtcatgcagggtttgggccaagaaagcatgcagaaaaaaatgccatgtgattgtaattatcctggattcagaataatactgtgatggggagccagatccgcagtggtggagagttctaatgttgactgtttgcaggccaaaagatgattgctttataattttaacaaatcattgtcttttagtaacatccttgtttagtgtcttctcaagctttctttactgaggaattcagcttgtgacacagatacatcccactagcttgtgaggtggaactagtaataaagaccttgaatttggattgaaaagtttcctatctttacattgttgaggaagtccttttttttttttttttttttttaattgctcaagaaatgattctctcacaggcttgggaaatcctgttagcatgcagaataatgtggtaactttgtcaatttcccattttatttttttaaataaatatatgatctaaaagcc

SEQ ID NO: 3854 - DNA, 551 bp, Homo sapiens
  source 1..551: mol_type = unassigned DNA; mol_type = unassigned DNA
aagtctaagcagaatgggcagagatgcctccagctgggctttgagggtgtcagtcttccctcaaataggaaagatgaggggcaggggaggatattggggacaagcctctgctcagccctgggtcctcttggaaccgggcttggagccggaggtggggagggtgtccaagctgagctcctggattcccatctgccgaactgcacccagaaccaggagtggggtgcgggcccatcctctggccaggatcctgggctcccttggccacaaagcaggacaggggaccagagatcccccaactcaggagacgtgaagctggcagctggtgtgccacggaccacaatgtggacaacaccacagagatgctgcaggagtggctggcggctgtgggcgatgactatgctgctgtggtctggaggcctgagggcgagcccaggttctacccagatgaagagggtcccaagcactggaccaaagaaaggcaccagtttctgatggagctgaagcaggaagccctcacctttgccaggaactggggggccgactatatcctg

SEQ ID NO: 3855 - DNA, 5201 bp, Homo sapiens
  source 1..5201: mol_type = unassigned DNA; mol_type = unassigned DNA
gggcagagatgcctccagctgggctttgagggtgtcagtcttccctcaaataggaaagatgaggggcaggggaggatattggggacaagcctctgctcagccctgggtcctcttggaaccgggcttggagccggaggtggggagggtgtccaagctgagctcctggattcccatctgccgaactgcacccagaaccaggagtggggtgcgggcccatcctctggccaggatcctgggctcccttggccacaaagcaggacaggggaccagagatcccccaactcaggagacgtgaagctggcagctgggccgctggcctagaaatggcctcaaatggaagctgccacccgatcctggtggaggctttgagctaggctagagatcaggactccagggttcagtgcgcacgtgctgcccctgcactagggccgaagcaatgcgggtgctggcgaccgacgcaaggaggtgacgcacaggggacttaaggagcggaccgccgcgggaggacgcgcccagctcagggggactccctctgcgccccccacgctgggtctccggcccacgcgtggcccggctggtctgcggagctagcgccagggccgccagagggcgcccggggcggaggatggggcgggagccggggaagcccgggaggtggtggccgagtgggcgccgcccctctgggtctgcggctcaggtcgaagagtcggctgcgtgggccggggaatccggattccgggggttcaacgcccaggggttccatgagcccctactgttctcggacgcccggccggccccgacgcactcgtcctagcacccctcccctgtccggtcctccggcccctccgccgtcgcccctccggggtccagccgggcggggctgctccagggtcgcggctggcgcgggtccccgggccctggccctccggtgccccgggccaaggagagaaaacttgagcatccacgcacaggggtggggagcaggatcccactctgagggtgcactgccccgccctctccgggtctgcctcggccccgcccgggccccaggccccgccccctcccctcggccggcccgagagctccgggggccgctgcagccgcccaagcgcccgccatgcgcgctgcccgcgccgcgccgctgctccagctgctgctcctgctggggccgtggctggaggctgcgggcgttgcggagtcgccgctgcccgccgtggtccttgccatcctggcccgcaatgccgaacactcgctgccccactacctgggcgctctggagcggctggactacccccgggccaggatggccctctggtgagagacccgggcattggcaccgagtgggcacctaacccccagcttcgcagatggcccccgcccccggcggccctgtctgctcgctccctgcccagacaccacctagacaggcccctcccctcacagacggccctgccagcccgagccgccagagaggaccccgagccccctgctgggagacgacagacctctgaggccacaggccgacgcgggacacccacccctccttctggtcccctactccttcctcttggggccttccctgggtgtaggttgggcccagccagcccttttcaccccagccttcagggcccagctcaaccccagtgggacctgtggttggctggatttgaagaggagcagacaggaacctctgaagtccactggggcccaacgtggcagggatcgaccacgctggaggcttccgggcacaggttgggggtgccatcagcactgggctccgggctgtgcaggggagtcagaccggcccccccaccgcccccgtgctggggccagctctcttggtagatcttggtagaggggcgggatcctgtcagccaagggcagtcccccttcctggagcctctcccctctggcatctctgtacccccagggcactgggatcgaaggccacaacccctggtctgtagacaccagaacagggaggagtccctggctgaggttgggggtaaactgagaaaaatgacaagccaccctcttcaacacaccacagttgggctgggggggtggagccctggcctggggaggccgcccacaattaccacagtttgggagtttgttagttcccacccctgtaagacttgacacgtagtcttcatttctggggaattggcttaaaggggcagcatcacccaaaacctgggcacttggctaaacccccacctctgttatgggggccccttccccaggagaggggaggctgtgccccatgacagcagagcttggacccatctgcattcttagggacgcttagagcatggtttggtccttattacaacctgggggtggaggaaagcagcagctcttctgtctagtccccattcagagagggacaggggctggcctgtggtcacacagccacaggtcacataggtaggtatctgcccacctaacgaaggtaaccagggaatgcaccaggtgtgatccttaaagtcgaggtacttttcatctttcaaaatgcattcgttggccaggtgtggtggctcacgcctgtaatttcagcactttgggaggccgaagtgggcagatcacctgaggtgaggagttcaagaccagcctggctaacatggtgaaaccccatctctactaaacaaacaaaaattagccgggcatggtggtgcacacctgtaatcccaggtactcaggaggctgaggcaggagaatcacttgaacccgggaggcggaggttgcagtgagtcgagatcataccactgcactacagcctgggcgacagagcaagattccatctcaaaaaaaatgcattattcttctcttatctttgtccatgacataagcaggacagcttaagttatagagggaggacgtgaagcccagagaaagatgggacttgcctgaggtcacacagcaggtcacagaactgtggtggggacctggctgtgctgcctccagcctctctgctgtagcacacctacccttcactgttccaaggagagctcgacctcaaaggtgttagtgctttggggtcaaggctgccttggggttcaatcctgtggctgtgccccctcagccttttttcttcccgtccccaggtgtgccacggaccacaatgtggacaacaccacagagatgctgcaggagtggctggcggctgtgggcgatgactatgctgctgtggtctggaggcctgagggcgagcccaggttctacccagatgaagagggtcccaagcactggaccaaagaaaggcaccagtttctgatggagctgaagcaggaagccctcacctttgccaggaactggggggccgactatatcctgtttgcagacacagacaacattctgaccaacaatcagactctgcggcttctcatggggcaggggcttccagtggtggccccaatgctggactcccagacctactactccaacttctggtgtgggatcaccccccagggctactaccgccgcacagccgagtacttccccaccaagaaccgccagcgccggggctgcttccgtgtccccatggtccactccaccttccttgcatccctgcgggctgaaggggcagaccagcttgctttctacccgccacatcccaactacacttggcctttcgacgacatcatcgtcttcgcctatgcctgccaggctgctggggtctccgtccacgtgtgcaatgagcaccgttatgggtacatgaatgtgccggtgaaatcccaccaggggctggaagacgagagggtcaacttcatccacctgatcttagaagcactagtggacggcccccgcatgcaggcctcagctcatgtgactcggccctctaagaggcccagcaagatagggtttgacgaggtctttgtcatcagcctggctcgcaggcctgaccgtcgggaacgcatgctcgcctcgctctgggagatggagatctctgggagggtggtggacgctgtggatggctggatgctcaacagcagtgccatcaggaacctcggcgtagacctgctcccgggctaccaggacccttactcgggccgcactctgaccaagggcgaggtgggctgcttcctcagccattactccatctgggaagaggtggttgccaggggcctggcccgggtcctggtgtttgaggatgacgtgcgctttgagagcaacttcagggggcggctggagcggctgatggaggatgtggaggcagagaaactgtcttgggacctgatctacctcggacggaagcaggtgaaccctgagaaggagacggccgtggaggggctgccgggcctggtggtggctgggtactcctactggacgctggcctatgccctgcgtctggcgggtgcccgcaagctgctggcctcacagcctctgcgccgcatgctgcccgtggacgagttcctgcccatcatgttcgaccagcaccccaacgagcagtacaaggcacacttctggccacgggacctggtggccttctccgcccagcccctgctcgctgcccctacccactatgccggggacgccgagtggctcagtgacacggagacatcctctccatgggatgatgacagcggccgcctcatcagctggagcggctcccaaaagaccctgcgcagcccccgcctggacctgactggcagcagcgggcacagcctccaaccccagccccgagatgagctctaggtccaggtgatgactgcaaagcagtgtccaggagcaggccactactgcccagagagcagaggaggaggttgttggcagggactgcagatcctgtcagacctggccaccaccttgggcatggccactctgccctctggacctgtctttcatcgggagaaaccactcagagatggatcccattccctaaaggtctcacagcaaaggagcaggactcccaggcccctgtaccctgcctggcctgattcagggccttgtggcccccagcttctgtttcaagctgggcagaccccaggatcccttccctccctaaggactcagctgaggggcccctctgcccccttctacctccacctcagcaccctcccccagcttgatgtttgggtctccccagcaccctcctccctggccggtgcaaagtacagggaggtaaagcaggacccttgcagacatgttgcccagcacacagtaggccctcaataaaagccatttgcactttaaatata

SEQ ID NO: 3856 - DNA, 530 bp, Homo sapiens
  source 1..530: mol_type = unassigned DNA; mol_type = unassigned DNA
aagggagaagaaatctggcatctctccagaatgcttctcattgcagggccgctggcctagaaatggcctcaaatggaagctgccacccgatcctggtggaggctttgagctaggctagagatcaggactccagggttcagtgcgcacgtgctgcccctgcactaggtgtgccacggaccacaatgtggacaacaccacagagatgctgcaggagtggctggcggctgtgggcgatgactatgctgctgtggtctggaggcctgagggcgagcccaggttctacccagatgaagagggtcccaagcactggaccaaagaaaggcaccagtttctgatggagctgaagcaggaagccctcacctttgccaggaactggggggccgactatatcctgtttgcagacacagacaacattctgaccaacaatcagactctgcggcttctcatggggcaggggcttccagtggtggccccaatgctggactcccagacctactactccaacttctggtgtgggatcaccccccagg

SEQ ID NO: 3857 - DNA, 887 bp, Homo sapiens
  source 1..887: mol_type = unassigned DNA; mol_type = unassigned DNA
ggaaagggacctgtctgaggttggtgacagacacccagttcgatcccatctgtggtgccgccaggccgctcccttttctgctcctctcccgagaggctgcagagttctttccctcccagcagggtcctaaggaccccggcggtgctccaggggagccaacatcccctgctttggaggacggacgggtcgggtcgcagtgtgccacggaccacaatgtggacaacaccacagagatgctgcaggagtggctggcggctgtgggcgatgactatgctgctgtggtctggaggcctgagggcgagcccaggttctacccagatgaagagggtcccaagcactggaccaaagaaaggcaccagtttctgatggagctgaagcaggaagccctcacctttgccaggaactggggggccgactatatcctgtttgcagacacagacaacattctgaccaacaatcagactctgcggcttctcatggggcaggggcttccagtggtggccccaatgctggactcccagacctactactccaacttctggtgtgggatcaccccccagggctactaccgccgcacagccgagtacttccccaccaagaaccgccagcgccggggctgcttccgtgtccccatggtccactccaccttccttgcatccctgcgggctgaaggggcagaccagcttgctttctacccgccacatcccaactacacttggcctttcgacgacatcatcgtcttcgcctatgcctgccaggctgctggggtctccgtccacgtgtgcaatgagcaccgttatgggtacatgaatgtgccggtgaaatcccaccaggggctggaagacgagagggtcaacttcatccacctgatcttagaagcactaggt

SEQ ID NO: 3858 - DNA, 2685 bp, Homo sapiens
  source 1..2685: mol_type = unassigned DNA; mol_type = unassigned DNA
ccggggaatccggattccgggggttcaacgcccaggggttccatgagcccctactgttctcggacgcccggccggccccgacgcactcgtcctagcacccctcccctgtccggtcctccggcccctccgccgtcgcccctccggggtccagccgggcggggctgctccagggtcgcggctggcgcgggtccccgggccctggccctccggtgccccgggccaaggagagaaaacttgagcatccacgcacaggggtggggagcaggatcccactctgagggtgcactgccccgccctctccgggtctgcctcggccccgcccgggccccaggccccgccccctcccctcggccggcccgagagctccgggggccgctgcagccgcccaagcgcccgccatgcgcgctgcccgcgccgcgccgctgctccagctgctgctcctgctggggccgtggctggaggctgcgggcgttgcggagtcgccgctgcccgccgtggtccttgccatcctggcccgcaatgccgaacactcgctgccccactacctgggcgctctggagcggctggactacccccgggccaggatggccctctggtgtgccacggaccacaatgtggacaacaccacagagatgctgcaggagtggctggcggctgtgggcgatgactatgctgctgtggtctggaggcctgagggcgagcccaggttctacccagatgaagagggtcccaagcactggaccaaagaaaggcaccagtttctgatggagctgaagcaggaagccctcacctttgccaggaactggggggccgactatatcctgtttgcagacacagacaacattctgaccaacaatcagactctgcggcttctcatggggcaggggcttccagtggtggccccaatgctggactcccagacctactactccaacttctggtgtgggatcaccccccagggctactaccgccgcacagccgagtacttccccaccaagaaccgccagcgccggggctgcttccgtgtccccatggtccactccaccttccttgcatccctgcgggctgaaggggcagaccagcttgctttctacccgccacatcccaactacacttggcctttcgacgacatcatcgtcttcgcctatgcctgccaggctgctggggtctccgtccacgtgtgcaatgagcaccgttatgggtacatgaatgtgccggtgaaatcccaccaggggctggaagacgagagggtcaacttcatccacctgatcttagaagcactagtggacggcccccgcatgcaggcctcagctcatgtgactcggccctctaagaggcccagcaagatagggtttgacgaggtctttgtcatcagcctggctcgcaggcctgaccgtcgggaacgcatgctcgcctcgctctgggagatggagatctctgggagggtggtggacgctgtggatggctggatgctcaacagcagtgccatcaggaacctcggcgtagacctgctcccgggctaccaggacccttactcgggccgcactctgaccaagggcgaggtgggctgcttcctcagccattactccatctgggaagaggtggttgccaggggcctggcccgggtcctggtgtttgaggatgacgtgcgctttgagagcaacttcagggggcggctggagcggctgatggaggatgtggaggcagagaaactgtcttgggacctgatctacctcggacggaagcaggtgaaccctgagaaggagacggccgtggaggggctgccgggcctggtggtggctgggtactcctactggacgctggcctatgccctgcgtctggcgggtgcccgcaagctgctggcctcacagcctctgcgccgcatgctgcccgtggacgagttcctgcccatcatgttcgaccagcaccccaacgagcagtacaaggcacacttctggccacgggacctggtggccttctccgcccagcccctgctcgctgcccctacccactatgccggggacgccgagtggctcagtgacacggagacatcctctccatgggatgatgacagcggccgcctcatcagctggagcggctcccaaaagaccctgcgcagcccccgcctggacctgactggcagcagcgggcacagcctccaaccccagccccgagatgagctctaggtccaggtgatgactgcaaagcagtgtccaggagcaggccactactgcccagagagcagaggaggaggttgttggcagggactgcagatcctgtcagacctggccaccaccttgggcatggccactctgccctctggacctgtctttcatcgggagaaaccactcagagatggatcccattccctaaaggtctcacagcaaaggagcaggactcccaggcccctgtaccctgcctggcctgattcagggccttgtggcccccagcttctgtttcaagctgggcagaccccaggatcccttccctccctaaggactcagctgaggggcccctctgcccccttctacctccacctcagcaccctcccccagcttgatgtttgggtctccccagcaccctcctccctggccggtgcaaagtacagggaggtaaagcaggacccttgcagacatgttgcccagcacacagtaggccctcaataaaagccatttgcactttaaa

SEQ ID NO: 3859 - DNA, 901 bp, Homo sapiens
  source 1..901: mol_type = unassigned DNA; mol_type = unassigned DNA
cggggaatccggattccgggggttcaacgcccaggggttccatgagcccctactgttctcggacgcccggccggccccgacgcactcgtcctagcacccctcccctgtccggtcctccggcccctccgccgtcgcccctccggggtccagccgggcggggctgctccagggtcgcggctggcgcgggtccccgggccctggccctccggtgccccgggccaaggagagaaaacttgagcatccacgcacaggggtggggagcaggatcccactctgagggtgcactgccccgccctctccgggtctgcctcggccccgcccgggccccaggccccgccccctcccctcggccggcccgagagctccgggggccgctgcagccgcccaagcgcccgccatgcgcgctgcccgcgccgcgccgctgctccagctgctgctcctgctggggccgtggctggaggctgcgggcgttgcggagtcgccgctgcccgccgtggtccttgccatcctggcccgcaatgccgaacactcgctgccccactacctgggcgctctggagcggctggactacccccgggccaggatggccctctgacggccctgccagcccgagccgccagagaggaccccgagccccctgctgggagacgacagacctctgaggccacaggccgacgcgggacacccacccctccttctggtcccctactccttcctcttggggccttccctgggtgtaggttgggcccagccagcccttttcaccccagccttcagggcccagctcaaccccagtgggacctgtggttggctggatttgaagaggagcagacaggaacctctgaagtccactggggcccaacgtggcagggatcgaccacgctggaggcttccgggcaca

SEQ ID NO: 3860 - DNA, 1176 bp, Homo sapiens
  source 1..1176: mol_type = unassigned DNA; mol_type = unassigned DNA
cggggaatccggattccgggggttcaacgcccaggggttccatgagcccctactgttctcggacgcccggccggccccgacgcactcgtcctagcacccctcccctgtccggtcctccggcccctccgccgtcgcccctccggggtccagccgggcggggctgctccagggtcgcggctggcgcgggtccccgggccctggccctccggtgccccgggccaaggagagaaaacttgagcatccacgcacaggggtggggagcaggatcccactctgagggtgcactgccccgccctctccgggtctgcctcggccccgcccgggccccaggccccgccccctcccctcggccggcccgagagctccgggggccgctgcagccgcccaagcgcccgccatgcgcgctgcccgcgccgcgccgctgctccagctgctgctcctgctggggccgtggctggaggctgcgggcgttgcggagtcgccgctgcccgccgtggtccttgccatcctggcccgcaatgccgaacactcgctgccccactacctgggcgctctggagcggctggactacccccgggccaggatggccctctgacggccctgccagcccgagccgccagagaggaccccgagccccctgctgggagacgacagacctctgaggccacaggccgacgcgggacacccacccctccttctggtcccctactccttcctcttggggccttccctgggtgtaggttgggcccagccagcccttttcaccccagccttcagggcccagctcaaccccagtgggacctgtggttggctggatttgaagaggagcagacaggaacctctgaagtccactggggcccaacgtggcagggatcgaccacgctggaggcttccgggcacaggtgtgccacggaccacaatgtggacaacaccacagagatgctgcaggagtggctggcggctgtgggcgatgactatgctgctgtggtctggaggcctgagggcgagcccaggttctacccagatgaagagggtcccaagcactggaccaaagaaaggcaccagtttctgatggagctgaagcaggaagccctcacctttgccaggaactggggggccgactatatcctgtttgcagacacagacaacattctgaccaacaatcagactctgcgg

SEQ ID NO: 3861 - DNA, 481 bp, Homo sapiens
  source 1..481: mol_type = unassigned DNA; mol_type = unassigned DNA
agtggctggcggctgtgggcgatgactatgctgctgtggtctggaggcctgagggcgagcccaggtggtgatctgaggggaagggtgctggggaagatggagaacagctgcagcccagagaggaaaagggacagcccagagccacagcctccaagccagggctctgtccactgccctgcagagagggaggggcatgtaccccatgggaacatctcacctctatcccctcaggttctacccagatgaagagggtcccaagcactggaccaaagaaaggcaccagtttctgatggagctgaagcaggaagccctcacctttgccaggaactggggggccgactatatcctgtttgcagacacagacaacattctgaccaacaatcagactctgcggcttctcatggggcaggggcttccagtggtggccccaatgctggactcccagacctactactccaacttctggtgtgggatcaccccc

SEQ ID NO: 3862 - DNA, 1205 bp, Homo sapiens
  source 1..1205: mol_type = unassigned DNA; mol_type = unassigned DNA
atcctaggagccacgctgggtctctggcaggaccactcagtgaactccttggggggctgcagcccaggcagggctggagcctgtgacgtcccctcctcaaagtttgcagacacagacaacattctgaccaacaatcagactctgcggcttctcatggggcaggggcttccagtggtggccccaatgctggactcccagacctactactccaacttctggtgtgggatcaccccccagggctactaccgccgcacagccgagtacttccccaccaagaaccgccagcgccggggctgcttccgtgtccccatggtccactccaccttccttgcatccctgcgggctgaaggggcagaccagcttgctttctacccgccacatcccaactacacttggcctttcgacgacatcatcgtcttcgcctatgcctgccaggctgctggggtctccgtccacgtgtgcaatgagcaccgttatgggtacatgaatgtgccggtgaaatcccaccaggggctggaagacgagagggtcaacttcatccacctgatcttagaagcactagtggacggcccccgcatgcaggcctcagctcatgtgactcggccctctaagaggcccagcaagatagggtttgacgaggtctttgtcatcagcctggctcgcaggcctgaccgtcgggaacgcatgctcgcctcgctctgggagatggagatctctgggagggtggtggacgctgtggatggctggatgctcaacagcagtgccatcaggaacctcggcgtagacctgctcccgggctaccaggacccttactcgggccgcactctgaccaagggcgaggtgggctgcttcctcagccattactccatctgggaagaggtggttgccaggggcctggcccgggtcctggtgtttgaggatgacgtgcgctttgagagcaacttcagggggcggctggagcggctgatggaggatgtggaggcagagaaactgtcttgggacctgatctacctcggacggaagcaggtgaaccctgagaaggagacggccgtggaggggctgccgggcctggtggtggctgggtactcctactggacgctggcctatgccctgcgtctggcgggtgcccgcaagctgctggcctcacagcctctgcgccgcatgctgcccgtggacgagttcctgcccatcatgttcgaccagca

SEQ ID NO: 3863 - DNA, 587 bp, Homo sapiens
  source 1..587: mol_type = unassigned DNA; mol_type = unassigned DNA
agtggtggccccaatgctggactcccagacctactactccaacttctggtgtgggatcaccccccagggctactaccgccgcacagccgagtacttccccaccaagaaccgccagcgccggggctgcttccgtgtccccatggtccactccaccttccttgcatccctgcgggctgaaggggcagaccagcttgctttctacccgccacatcccaactacacttggcctttcgacgacatcatcgtcttcgcctatgcctgccaggctgctgctactcaggaggctgaggcaggagaattgctcaaacctgggagacagaggttgtaatgagccaagatcgcaccattgcactccagcctcggtgacagagcaggactccatctcaaaaaaaaaaaaaaggggtctccgtccacgtgtgcaatgagcaccgttatgggtacatgaatgtgccggtgaaatcccaccaggggctggaagacgagagggtcaacttcatccacctgatcttagaagcactagtggacggcccccgcatgcaggcctcagctcatgtgactcggccctctaagaggcccagcaagatagg

SEQ ID NO: 3864 - DNA, 553 bp, Homo sapiens
  source 1..553: mol_type = unassigned DNA; mol_type = unassigned DNA
tgccaggctgctggggtctccgtccacgtgtgcaatgagcaccgttatgggtacatgaatgtgccggtgaaatcccaccaggggctggaagacgagagggtcaacttcatccacctgatcttagaagcactagtggacggcccccgcatgcaggcctcagctcatgtgactcggccctctaagaggcccagcaagatagggtttgacgaggtctttgtcatcagcctggctcgcaggcctgaccgtcgggaacgcatgctcgcctcgctctgggagatggagatctctgggagggtggtggacgctgtggatggctggatgctcaacagcagtgccatcaggaacctcggcgtagacctgctcccgggctaccaggacccttactcgggccgcactctgaccaagggcgaggtgggctgcttcctcagccattactccatctgggaagagcgagcagtacaaggcacacttctggccacgggacctggtggccttctccgcccagcccctgctcgctgcccctacccactatgccggggacgccgagtggctc

SEQ ID NO: 3865 - DNA, 338 bp, Homo sapiens
  source 1..338: mol_type = unassigned DNA; mol_type = unassigned DNA
gtggctcatgcctgtaatcccagcactttgggaggctgaggtgggtggatcacctgaggtcaggagttcgagaccagcctggccaacatggtgaaaccccatctctactaaaaaaaaaaaaaaaacattagctgggcacctgtaatctcagctacttgtgaggctgaggcaggaaaatcacttgaacctgggaggtagagggcgaggtgggctgcttcctcagccattactccatctgggaagaggtggttgccaggggcctggcccgggtcctggtgtttgaggatgacgtgcgctttgagagcaacttcagggggcggctggagcggctgatggag

SEQ ID NO: 3866 - DNA, 1429 bp, Homo sapiens
  source 1..1429: mol_type = unassigned DNA; mol_type = unassigned DNA
gtcaacttcatccacctgatcttagaagcactagtggacggcccccgcatgcaggcctcagctcatgtgactcggccctctaagaggcccagcaagatagggtttgacgaggtctttgtcatcagcctggctcgcaggcctgaccgtcgggaacgcatgctcgcctcgctctgggagatggagatctctgggagggtggtggacgctgtggatggctggatgctcaacagcagtgccatcaggaacctcggcgtagacctgctcccgggctaccaggacccttactcgggccgcactctgaccaagggcgaggtgggctgcttcctcagccattactccatctgggaagaggtggttgccaggggcctggcccgggtcctggtgtttgaggatgacgtgcgctttgagagcaacttcagggggcggctggagcggctgatggaggatgtggaggcagagaaactgtcttgggacctgatctacctcggacggaagcaggtgaaccctgagaaggagacggccgtggaggggctgccgggcctggtggtggctgggtactcctactggacgctggcctatgccctgcgtctggcgggtgcccgcaagctgctggcctcacagcctctgcgccgcatgctgcccgtggacgagttcctgcccatcatgttcgaccagcaccccaacgagcagtacaaggcacacttctggccacgggacctggtggccttctccgcccagcccctgctcgctgcccctacccactatgccggggacgccgagtggctcagtgacacggagacatcctctccatgggatgatgacagcggccgcctcatcagctggagcggctcccaaaagaccctgcgcagcccccgcctggacctgactggcagcagcgggcacagcctccaaccccagccccgagatgagctctaggtccaggtgatgactgcaaagcagtgtccaggagcaggccactactgcccagagagcagaggaggaggttgttggcagggactgcagatcctgtcagacctggccaccaccttgggcatggccactctgccctctggacctgtctttcatcgggagaaaccactcagagatggatcccattccctaaaggtctcacagcaaaggagcaggactcccaggcccctgtaccctgcctggcctgattcagggccttgtggcccccagcttgtttcaagctgggcagaccccaggatcccttccctccctaaggactcagctgaggggcccctctgccccttctacctccacctcagcaccctcccccagcttgatgtttgggtctccccagcaccctcctccctggccggtgcaaagtacagggaggtaaagcaggacccttgcagacatgttgcccagcacacagtaggccctcaataaaagccatttgcacttt

SEQ ID NO: 3867 - DNA, 1554 bp, Homo sapiens
  source 1..1554: mol_type = unassigned DNA; mol_type = unassigned DNA
atgctgcaggagtggctggcggctgtgggcgatgactatgctgctgtggtctggaggcctgagggcgagcccaggttctacccagatgaagagggtcccaagcactggaccaaagaaaggcaccagtttctgatggagctgaagcaggaagccctcacctttgccaggaactggggggccgactatatcctgtttgcagacacagacaacattctgaccaacaatcagactctgcggcttctcatggggcaggggcttccagtggtggccccaatgctggactcccagacctactactccaacttctggtgtgggatcaccccccagggctactaccgccgcacagccgagtacttccccaccaagaaccgccagcgccggggctgcttccgtgtccccatggtccactccaccttccttgcatccctgcgggctgaaggggcagaccagcttgctttctacccgccacatcccaactacacttggcctttcgacgacatcatcgtcttcgcctatgcctgccaggctgctggggtctccgtccacgtgtgcaatgagcaccgttatgggtacatgaatgtgccggtgaaatcccaccaggggctggaagacgagagggtcaacttcatccacctgatcttagaagcactagtggacggcccccgcatgcaggcctcagctcatgtgactcggccctctaagaggcccagcaagatagggtttgacgaggtctttgtcatcagcctggctcgcaggcctgaccgtcgggaacgcatgctcgcctcgctctgggagatggagatctctgggagggtggtggacgctgtggatgctgggatgctcaacagcagtgccatcaggaacctcggcgtagacctgctcccgggctaccaggacccttactcgggccgcactctgaccaagggcgaggtgggctgcttcctcagccattactccatctgggaagaggtggttgccaggggcctggcccgggtcctggtgtttgaggatgacgtgcgctttgagagcaacttcagggggcggctggagcggctgatggaggatgtggaggcagagaaactgtcttgggacctgatctacctcggacggaagcaggtgaaccctgagaaggagacggccgtggaggggctgccgggcctggtggtggctgggtactcctactggacgctggcctatgccctgcgtctggcgggtgcccgcaagctgctggcctcacagcctctgcgccgcatgctgcccgtggacgagttcctgcccatcatgttcgaccagcaccccaacgagcagtacaaggcacacttctggccacgggacctggtggccttctccgcccagcccctgctcgctgcccctacccactatgccggggacgccgagtggctcagtgacacggagacatcctctccatgggatgatgacagcggccgcctcatcagctggagcggctcccaaaagaccctgcgcagcccccgcctggacctgactggcagcagcgggcacagcctccaaccccagccccgagatgagctctag

SEQ ID NO: 3868 - DNA, 3208 bp, Homo sapiens
  source 1..3208: mol_type = unassigned DNA; mol_type = unassigned DNA
gcagcgctggacgcggctagagctggggctgccgcgccctccacctccttctccaaaggcctccccggacccctggctcgggcccagcctgcgactccgccatgccctggaggaggcgcaggaaccgggtgagtgccctggagggcggccgggaggaagaggcgcccccggaggctgccgctgtgcctccggcgctgttaacgtccccgcagcagacggaggcggcggccgagcggattctgctccggggcatcttcgagatcgggagggacagttgtgacgtggtgctgagcgagcgagcactgcggtggcggcccattcagcccgagcgcccggcgggtgattctaagtatgacttgctatgtaaagaagaatttattgaactcaaagacatattctctgtgaaactgaaacggcgttgttctgttaaacagcagagaagtggtactttattaggtatcacactcttcatctgcttgaaaaaggaacaaaataaactaaagaattctacacttgatcttattaatttaagtgaagaccactgtgacatatggtttagacagttcaagaaaatattggcaggctttccaaacagaccgaagtcattaaaaatactccttaacccccaaagtcacaaaaaagaagctacccaggtttattatgagaaggttgaacctctgttgaagcttgcaggaataaaaactgatgtaacaataatggaatatgaagggcacgctctgtcactgcttaaggaatgtgaactccagggatttgatggtgttgtctgtgttggtggagatggatctgctagcgaagtagcccatgctttgcttctgagagctcagaagaatgctgggatggaaacagaccgaatcctgactcctgtcagagcacagcttccacttggcttaataccagcaggatctaccaatgtattggcacattctcttcatggagttcctcatgtgataactgcaacattgcacattataatggggcatgtacagctggtcgacgtctgcaccttcagcaccgctggcaagcttcttcgctttgggttctcagccatgtttggctttggtggaagaactttggctctggcagaaaaatatcgatggatgtcccctaaccaacggagagattttgctgttgttaaggcactggcaaaacttaaggcagaagactgtgaaatatcatttttaccatttaacagctctgatgatgtgcaagaaaggagggcacagggatctcccaaatctgactgtaatgatcaatggcaaatgatccagggtcagttcttgaatgtcagcattatggcaattccttgcctgtgttcagtggcacctagaggcttggcacctaataccagattaaataatggaagtatggctcttataattgcccgaaacacttctcggccagaatttataaaacacctgaaaagatatgccagtgtaaaaaatcagttcaattttccatttgttgagacttacactgttgaggaagtaaaagttcatccaaggaataatactggtggatataatccagaggaggaggaggatgaaactgcttcagaaaattgtttcccttggaatgtagatggtgacttaatggaagttgcatcagaggtccatattagattgcatccaagacttatcagtctttatggaggaagcatggaagaaatgattccaaagtaacatgtaattgtttctaaaagaaatgtacaaactagaattttaatataaagaaatgtggccatgctttaaacctgtggtccccaccctttttgggaccagtttcatggaagacaatttttccgtggatgggggaatggtttcaggatgaactgttccacctcagatcatcaggcattagattctcttgaggaacatggcactctagatccctcacataccagttcaccatatggttcgcacttctatgagaatctaatgctgctgctgatctgacagggggaggaactcagtaatgctccattgctctaacctcctgctgtgtggccaaacggatatcctaatagaaattgatgttactaacaattagcctctagggctttaaaagtcaagatgaaatatcaattcaaattctgtttttagatatcaattcaaattcttttttttacaatgtgtttattggacacacaaaaaaactttgcaaccatcataatacatcaatatttaacctagataattctgaaataatttggattctttcatttttcaggatttgagctcatcaattatgttaaatttcctatattctgttacaaatataatacagatttcataagtctgccttgattcactgctccctaatccagagcagttaaatttcaaaatcacatagttatatagcctacctgccaaaaaagaataacccatccctgtcttcttaaagtggtagggttttaaaattcatgatacaagtaacaaagtaagttgataacaaatactattttgaactgggcaaaatctagcccaatatgtaattgtgttccccttgtatctgagaggcctgtgttggacaaccatagtactctgctttcactgtgctcagataacctgaaatatatagttgtttctgagtagttctgagtaggaaagaaccaaatgtaaatttccttagagaccatcctggagaagacagttctaaatcggggcttgatttttcatctatgatcctagatgttctcctgaaagaatgactagcctttttataacgatacaaagttttttaaaaatacataaatgtcataaagtttattcctgtgtatacacactctgggttcaggaggttttgtgcttacatttcactactcaaatgccttcgcaaatctcagaacattcctcaccatcactgcaggcctgtgaacagataactttcatcaattaggatggctggctagtggcagggacttcatataaagaaatctttcccagaattgtttttccacattgccttctaatttgatcactccctataacagatgttcaaaattcggccacagctctcttatgaaggcagagtcagataaaatgatattctgcaattatctagatcataagcataaaataaatattacaaaaatgattgtatttaaagaaattttttaaaatccagaaagtcatttaaaatagaacctcatatagtatgaacaaactataaaaatattttacatttcatg

SEQ ID NO: 3869 - DNA, 2425 bp, Homo sapiens
  source 1..2425: mol_type = unassigned DNA; mol_type = unassigned DNA
gcagcgctggacgcggctagagctggggctgccgcgccctccacctccttctccaaaggcctccccggacccctggctcgggcccagcctgcgactccgccatgccctggaggaggcgcaggaaccgggtgagtgccctggagggcggccgggaggaagaggcgcccccggaggctgccgctgtgcctccggcgctgttaacgtccccgcagcagacggaggcggcggccgagcggattctgctccggggcatcttcgagatcgggagggacagttgtgacgtggtgctgagcgagcgagcactgcggtggcggcccattcagcccgagcgcccggcgggtgattctaagtatgacttgctatgtaaagaagaatttattgaactcaaagacatattctctgtgaaactgaaacggcgttgttctgttaaacagcagagaagtggtactttattaggtatcacactcttcatctgcttgaaaaaggaacaaaataaactaaagaattctacacttgatcttattaatttaagtgaagaccactgtgacatatggtttagacagttcaagaaaatattggcagtaatggaatatgaagggcacgctctgtcactgcttaaggaatgtgaactccagggatttgatggtgggcatcggaaaccattgttcgcaatacattggagtgtacagagattgttcactggcatgcaaacgttagaaccaagtgttgtctgtgttggtggagatggatctgctagcgaagtagcccatgctttgcttctgagagctcagaagaatgctgggatggaaacagaccgaatcctgactcctgtcagagcacagcttccacttggcttaataccagcaggatctaccaatgtattggcacattctcttcatggagttcctcatgtgataactgcaacattgcacattataatggggcatgtacagctggtcgacgtctgcaccttcagcaccgctggcaagcttcttcgctttgggttctcagccatgtttggctttggtggaagaactttggctctggcagaaaaatatcgatggatgtcccctaaccaacggagagattttgctgttgttaaggcactggcaaaacttaaggcagaagactgtgaaatatcatttttaccatttaacagctctgatgatgtgcaagaaaggagggcacagggatctcccaaatctgactgtaatgatcaatggcaaatgatccagggtcagttcttgaatgtcagcattatggcaattccttgcctgtgttcagtggcacctagaggcttggcacctaataccagattaaataatggaagtatggctcttataattgcccgaaacacttctcggccagaatttataaaacacctgaaaagatatgccagtgtaaaaaatcagttcaattttccatttgttgagacttacactgttgaggaagtaaaagttcatccaaggaataatactggtggatataatccagaggaggaggaggatgaaactgcttcagaaaattgtttcccttggaatgtagatggtgacttaatggaagttgcatcagaggtccatattagattgcatccaagacttatcagtctttatggaggaagcatggaagaaatgattccaaagtaacatgtaattgtttctaaaagaaatgtacaaactagaattttaatataaagaaatgtggccatgctttaaacctgtggtccccaccctttttgggaccagtttcatggaagacaatttttccgtggatgggggaatggtttcaggatgaactgttccacctcagatcatcaggcattagattctcttgaggaacatggcactctagatccctcacataccagttcaccatatggttcgcacttctatgagaatctaatgctgctgctgatctgacagggggaggaactcagtaatgctccattgctctaacctcctgctgtgtggccaaacggatatcctaatagaaattgatgttactaacaattagcctctagggctttaaaagtcaagatgaaatatcaattcaaattctgtttttagatatcaattcaaattcttttttttacaatgtgtttattggacacacaaaaaaactttgcaaccatcataatacatcaatatttaacctagataattctgaaataatttggattctttcatttttcaggatttgagctcatcaattatgttaaatttcctatattctgttacaaatataatacagatttcataagtctgccttgattcactgctccctaatccagagcagttaaatttcaaaatcacatagttatatagcctacctgccaaaaaagaataacccatccctgtcttcttaaagtggtagggttttaaaattcatgatacaagtaacaaagtaagttgataacaaatactat

SEQ ID NO: 3870 - DNA, 1330 bp, Homo sapiens
  source 1..1330: mol_type = unassigned DNA; mol_type = unassigned DNA
atgccctggaggaggcgcaggaaccgggtgagtgccctggagggcggccgggaggaagaggcgcccccggaggctgccgctgtgcctccggcgctgttaacgtccccgcagcagacggaggcggcggccgagcggattctgctccggggcatcttcgagatcgggagggacagttgtgacgtggtgctgagcgagcgagcactgcggtggcggcccattcagcccgagcgcccggcgggtgattctaagtatgacttgctatgtaaagaagaatttattgaactcaaagacatattctctgtgaaactgaaacggcgttgttctgttaaacagcagagaagtggtactttattaggtatcacactcttcatctgcttgaaaaaggaacaaaataaactaaagaattctacacttgatcttattaatttaagtgaagaccactgtgacatatggtttagacagttcaagaaaatattggcaggatctaccaatgtattggcacattctcttcatggagttcctcatgtgataactgcaacattgcacattataatggggcatgtacagctggtcgacgtctgcaccttcagcaccgctggcaagcttcttcgctttgggttctcagccatgtttggctttggtggaagaactttggctctggcagaaaaatatcgatggatgtcccctaaccaacggagagattttgctgttgttaaggcactggcaaaacttaaggcagaagactgtgaaatatcatttttaccatttaacagctctgatgatgtgcaagaaaggagggcacagggatctcccaaatctgactgtaatgatcaatggcaaatgatccagggtcagttcttgaatgtcagcattatggcaattccttgcctgtgttcagtggcacctagaggcttggcacctaataccagattaaataatggaagtatggctcttataattgcccgaaacacttctcggccagaatttataaaacacctgaaaagatatgccagtgtaaaaaatcagttcaattttccatttgttgagacttacactgttgaggaagtaaaagttcatccaaggaataatactggtggatataatccagaggaggaggaggatgaaactgcttcagaaaattgtttcccttggaatgtagatggtgacttaatggaagttgcatcagaggtccatattagattgcatccaagacttatcagtctttatggaggaagcatggaagaaatgattccaaagtaacatgtaattgtttctaaaagaaatgtacaaactagaattttaatataaagaaatgtggccatgctttaaa

SEQ ID NO: 3871 - DNA, 1403 bp, Homo sapiens
  source 1..1403: mol_type = unassigned DNA; mol_type = unassigned DNA
atgccctggaggaggcgcaggaaccgggtgagtgccctggagggcggccgggaggaagaggcgcccccggaggctgccgctgtgcctccggcgctgttaacgtccccgcagcagacggaggcggcggccgagcggattctgctccggggcatcttcgagatcgggagggacagttgtgacgtggtgctgagcgagcgagcactgcggtggcggcccattcagcccgagcgcccggcgggtgattctaagtatgacttgctatgtaaagaagaatttattgaactcaaagacatattctctgtgaaactgaaacggcgttgttctgttaaacagcagagaagtggtactttattaggtatcacactcttcatctgcttgaaaaaggaacaaaataaactaaagaattctacacttgatcttattaatttaagtgaagaccactgtgacatatggtttagacagttcaagaaaatattggcagtgttgtctgtgttggtggagatggatctgctagcgaagtagcccatgctttgcttctgagagctcagaagaatgctgggatggaaacagaccgaatcctgactcctgtcagagcacagcttccacttggcttaataccagcaggatctaccaatgtattggcacattctcttcatggagttcctcatgtgataactgcaacattgcacattataatggggcatgtacagctggtcgacgtctgcaccttcagcaccgctggcaagcttcttcgctttgggttctcagccatgtttggctttggtggaagaactttggctctggcagaaaaatatcgatggatgtcccctaaccaacggagagattttgctgttgttaaggcactggcaaaacttaaggcagaagactgtgaaatatcatttttaccatttaacagctctgatgatgtgcaagaaaggagggcacagggatctcccaaatctgactgtaatgatcaatggcaaatgatccagggtcagttcttgaatgtcagcattatggcaattccttgcctgtgttcagtggcacctagaggcttggcacctaataccagattaaataatggaagtatggctcttataattgcccgaaacacttctcggccagaatttataaaacacctgaaaagatatgccagtgtaaaaaatcagttcaattttccatttgttgagacttacactgttgaggaagtaaaagttcatccaaggaataatactggtggatataatccagaggaggaggaggatgaaactgcttcagaaaattgtttcccttggaatgtagatggtgacttaatggaagttgcatcagaggtccatattagattgcatccaagacttatcagtctttatggaggaagcatggaagaaatgattccaaagtaa

SEQ ID NO: 3872 - DNA, 1677 bp, Homo sapiens
  source 1..1677: mol_type = unassigned DNA; mol_type = unassigned DNA
atgccctggaggaggcgcaggaaccgggtgagtgccctggagggcggccgggaggaagaggcgcccccggaggctgccgctgtgcctccggcgctgttaacgtccccgcagcagacggaggcggcggccgagcggattctgctccggggcatcttcgagatcgggagggacagttgtgacgtggtgctgagcgagcgagcactgcggtggcggcccattcagcccgagcgcccggcgggtgattctaagtatgacttgctatgtaaagaagaatttattgaactcaaagacatattctctgtgaaactgaaacggcgttgttctgttaaacagcagagaagtggtactttattaggtatcacactcttcatctgcttgaaaaaggaacaaaataaactaaagaattctacacttgatcttattaatttaagtgaagaccactgtgacatatggtttagacagttcaagaaaatattggcaggctttccaaacagaccgaagtcattaaaaatactccttaacccccaaagtcacaaaaaagaagctacccaggtttattatgagaaggttgaacctctgttgaagcttgcaggaataaaaactgatgtaacaataatggaatatgaagggcacgctctgtcactgcttaaggaatgtgaactccagggatttgatggtgggcatcggaaaccattgttcgcaatacattggagtgtacagagattgttcactggcatgcaaacgttagaaccaagtgttgtctgtgttggtggagatggatctgctagcgaagtagcccatgctttgcttctgagagctcagaagaatgctgggatggaaacagaccgaatcctgactcctgtcagagcacagcttccacttggcttaataccagcaggatctaccaatgtattggcacattctcttcatggagttcctcatgtgataactgcaacattgcacattataatggggcatgtacagctggtcgacgtctgcaccttcagcaccgctggcaagcttcttcgctttgggttctcagccatgtttggctttggtggaagaactttggctctggcagaaaaatatcgatggatgtcccctaaccaacggagagattttgctgttgttaaggcactggcaaaacttaaggcagaagactgtgaaatatcatttttaccatttaacagctctgatgatgtgcaagaaaggagggcacagggatctcccaaatctgactgtaatgatcaatggcaaatgatccagggtcagttcttgaatgtcagcattatggcaattccttgcctgtgttcagtggcacctagaggcttggcacctaataccagattaaataatggaagtatggctcttataattgcccgaaacacttctcggccagaatttataaaacacctgaaaagatatgccagtgtaaaaaatcagttcaattttccatttgttgagacttacactgttgaggaagtaaaagttcatccaaggaataatactggtggatataatccagaggaggaggaggatgaaactgcttcagaaaattgtttcccttggaatgtagatggtgacttaatggaagttgcatcagaggtccatattagattgcatccaagacttatcagtctttatggaggaagcatggaagaaatgattccaaagtaa

SEQ ID NO: 3873 - DNA, 1392 bp, Homo sapiens
  source 1..1392: mol_type = unassigned DNA; mol_type = unassigned DNA
atgccctggaggaggcgcaggaaccgggtgagtgccctggagggcggccgggaggaagaggcgcccccggaggctgccgctgtgcctccggcgctgttaacgtccccgcagcagacggaggcggcggccgagcggattctgctccggggcatcttcgagatcgggagggacagttgtgacgtggtgctgagcgagcgagcactgcggtggcggcccattcagcccgagcgcccggcgggtgattctaagtatgacttgctatgtaaagaagaatttattgaactcaaagacatattctctgtgaaactgaaacggcgttgttctgttaaacagcagagaagtggtactttattaggtatcacactcttcatctgcttgaaaaaggaacaaaataaactaaagaattctacacttgatcttattaatttaagtgaagaccactgtgacatatggtttagacagttcaagaaaatattggcaggctttccaaacagaccgaagtcattaaaaatactccttaacccccaaagtcacaaaaaagaagctacccaggtttattatgagaaggttgaacctctgttgaagcttgcaggaataaaaactgatgtaacaagatctaccaatgtattggcacattctcttcatggagttcctcatgtgataactgcaacattgcacattataatggggcatgtacagctggtcgacgtctgcaccttcagcaccgctggcaagcttcttcgctttgggttctcagccatgtttggctttggtggaagaactttggctctggcagaaaaatatcgatggatgtcccctaaccaacggagagattttgctgttgttaaggcactggcaaaacttaaggcagaagactgtgaaatatcatttttaccatttaacagctctgatgatgtgcaagaaaggagggcacagggatctcccaaatctgactgtaatgatcaatggcaaatgatccagggtcagttcttgaatgtcagcattatggcaattccttgcctgtgttcagtggcacctagaggcttggcacctaataccagattaaataatggaagtatggctcttataattgcccgaaacacttctcggccagaatttataaaacacctgaaaagatatgccagtgtaaaaaatcagttcaattttccatttgttgagacttacactgttgaggaagtaaaagttcatccaaggaataatactggtggatataatccagaggaggaggaggatgaaactgcttcagaaaattgtttcccttggaatgtagatggtgacttaatggaagttgcatcagaggtccatattagattgcatccaagacttatcagtctttatggaggaagcatggaagaaatgattccaaagtaa

SEQ ID NO: 3874 - DNA, 1535 bp, Homo sapiens
  source 1..1535: mol_type = unassigned DNA; mol_type = unassigned DNA
atgccctggaggaggcgcaggaaccgggtgagtgccctggagggcggccgggaggaagaggcgcccccggaggctgccgctgtgcctccggcgctgttaacgtccccgcagcagacggaggcggcggccgagcggattctgctccggggcatcttcgagatcgggagggacagttgtgacgtggtgctgagcgagcgagcactgcggtggcggcccattcagcccgagcgcccggcgggtgattctaagtatgacttgctatgtaaagaagaatttattgaactcaaagacatattctctgtgaaactgaaacggcgttgttctgttaaacagcagagaagtggtactttattaggtatcacactcttcatctgcttgaaaaaggaacaaaataaactaaagaattctacacttgatcttattaatttaagtgaagaccactgtgacatatggtttagacagttcaagaaaatattggcaggctttccaaacagaccgaagtcattaaaaatactccttaacccccaaagtcacaaaaaagaagctacccaggtttattatgagaaggttgaacctctgttgaagcttgcaggaataaaaactgatgtaacaatgttgtctgtgttggtggagatggatctgctagcgaagtagcccatgctttgcttctgagagctcagaagaatgctgggatggaaacagaccgaatcctgactcctgtcagagcacagcttccacttggcttaataccagcaggatctaccaatgtattggcacattctcttcatggagttcctcatgtgataactgcaacattgcacattataatggggcatgtacagctggtcgacgtctgcaccttcagcaccgctggcaagcttcttcgctttgggttctcagccatgtttggctttggtggaagaactttggctctggcagaaaaatatcgatggatgtcccctaaccaacggagagattttgctgttgttaaggcactggcaaaacttaaggcagaagactgtgaaatatcatttttaccatttaacagctctgatgatgtgcaagaaaggagggcacagggatctcccaaatctgactgtaatgatcaatggcaaatgatccagggtcagttcttgaatgtcagcattatggcaattccttgcctgtgttcagtggcacctagaggcttggcacctaataccagattaaataatggaagtatggctcttataattgcccgaaacacttctcggccagaatttataaaacacctgaaaagatatgccagtgtaaaaaatcagttcaattttccatttgttgagacttacactgttgaggaagtaaaagttcatccaaggaataatactggtggatataatccagaggaggaggaggatgaaactgcttcagaaaattgtttcccttggaatgtagatggtgacttaatggaagttgcatcagaggtccatattagattgcatccaagacttatcagtctttatggaggaagcatggaagaaatgattccaaagtaa

SEQ ID NO: 3875 - DNA, 2391 bp, Homo sapiens
  source 1..2391: mol_type = unassigned DNA; mol_type = unassigned DNA
atgccctggaggaggcgcaggaaccgggtgagtgccctggagggcggccgggaggaagaggcgcccccggaggctgccgctgtgcctccggcgctgttaacgtccccgcagcagacggaggcggcggccgagcggattctgctccggggcatcttcgagatcgggagggacagttgtgacgtggtgctgagcgagcgagcactgcggtggcggcccattcagcccgagcgcccggcgggtgattctaagtatgacttgctatgtaaagaagaatttattgaactcaaagacatattctctgtgaaactgaaacggcgttgttctgttaaacagcagagaagtggtactttattaggtatcacactcttcatctgcttgaaaaaggaacaaaataaactaaagaattctacacttgatcttattaatttaagtgaagaccactgtgacatatggtttagacagttcaagaaaatattggcaggctttccaaacagaccgaagtcattaaaaatactccttaacccccaaagtcacaaaaaagaagctacccaggtttattatgagaaggttgaacctctgttgaagcttgcaggaataaaaactgatgtaacaataatggaatatgaagggcacgctctgtcactgcttaaggaatgtgaactccagggatttgatggtgttgtctgtgttggtggagatggatctgctagcgaagtagcccatgctttgcttctgagagctcagaagaatgctgggatggaaacagaccgaatcctgactcctgtcagagcacagcttccacttggcttaataccagcaggatctaccaatgtattggcacattctcttcatggagttcctcatgtgataactgcaacattgcacattataatggggcatgtacagctggtcgacgtctgcaccttcagcaccgctggcaagcttcttcgctttgggttctcagccatgtttggctttggtggaagaactttggctctggcagaaaaatatcgatggatgtcccctaaccaacggagagattttgctgttgttaaggcactggcaaaacttaaggcagaagactgtgaaatatcatttttaccatttaacagctctgatgatgtgcaagaaaggtaggtaaaaactcaatgtaatacagataacctgtatctttaaagcataaaacattctgacaaacaattgatcagacttaggatctttggttatttttctaacatagtagtaaagaatatagaatcacagactcttacaggtcctagtaagcaaacaactactcactcagcctttttctctttttccttccttctttcctcccttccttccccctgtctctccctccctccttccgttctctttttcccttcccttcccctttctttcctttcctttgtttttttccctttctttccttttccctttcccttttcttttgagtgcctactatatgccaggcactttgaatacaacaatgcaccaaaaaatgaacaaaacacacagttttgtccctcgtgataattttggtctagtgtgtaatacaaatattaaagccatattaaagaagggttatagtctttaaagaaatagtacattattattccttataatactagtttacctttaaatgaatcaacacattatgttggcagcaacaaaattgtacgtttttacttactatctaattgaagaaagtatttaacatatataatgatgagttctctaattttctcatatttaatagatttgtgtgtgtctgtgtgtctgtgcgcgcgttatctgttttatgtctttgttttgttttctttcttttaggagggcacagggatctcccaaatctggtgagtcgaaaagtatctccttgagaactgtgccaggttctgttgacattttgttctggtgagggaaaataaccaatcactttcattacctttagactgtaatgatcaatggcaaatgatccagggtcagttcttgaatgtcagcattatggcaattccttgcctgtgttcagtggcacctagaggcttggcacctaataccagattaaataatggaagtatggctcttataattgcccgaaacacttctcggccagaatttataaaacacctgaaaagatatgccagtgtaaaaaatcagttcaattttccatttgttgagacttacactgttgaggaagtaaaagttcatccaaggaataatactggtggatataatccagaggaggaggaggatgaaactgcttcagaaaattgtttcccttggaatgtagatggtgacttaatggaagttgcatcagaggtccatattagattgcatccaagacttatcagtctttatggaggaagcatggaagaaatgattccaaagtaa

SEQ ID NO: 3876 - DNA, 1395 bp, Homo sapiens
  source 1..1395: mol_type = unassigned DNA; mol_type = unassigned DNA
ccagcctgcgactccgccatgccctggaggaggcgcaggaaccgggtgagtgccctggagggcggccgggaggaagaggcgcccccggaggctgccgctgtgcctccggcgctgttaacgtccccgcagcagacggaggcggcggccgagcggattctgctccggggcatcttcgagatcgggagggacagttgtgacgtggtgctgagcgagcgagcactgcggtggcggcccattcagcccgagcgcccggcgggtgattctaagtatgacttgctatgtaaagaagaatttattgaactcaaagacatattctctgtgaaactgaaacggcgttgttctgttaaacagcagagaagtggtactttattaggtatcacactcttcatctgcttgaaaaaggaacaaaataaactaaagaattctacacttgatcttattaatttaagtgaagaccactgtgacatatggtttagacagttcaagaaaatattggcagtgttgtctgtgttggtggagatggatctgctagcgaagtagcccatgctttgcttctgagagctcagaagaatgctgggatggaaacagaccgaatcctgactcctgtcagagcacagcttccacttggcttaataccagcaggatctaccaatgtattggcacattctcttcatggagttcctcatgtgataactgcaacattgcacattataatggggcatgtacagctggtcgacgtctgcaccttcagcaccgctggcaagcttcttcgctttgggttctcagccatgtttggctttggtggaagaactttggctctggcagaaaaatatcgatggatgtcccctaaccaacggagagattttgctgttgttaaggcactggcaaaacttaaggcagaagactgtgaaatatcatttttaccatttaacagctctgatgatgtgcaagaaagactgtaatgatcaatggcaaatgatccagggtcagttcttgaatgtcagcattatggcaattccttgcctgtgttcagtggcacctagaggcttggcacctaataccagattaaataatggaagtatggctcttataattgcccgaaacacttctcggccagaatttataaaacacctgaaaagatatgccagtgtaaaaaatcagttcaattttccatttgttgagacttacactgttgaggaagtaaaagttcatccaaggaataatactggtggatataatccagaggaggaggaggatgaaactgcttcagaaaattgtttcccttggaatgtagatggtgacttaatggaagttgcatcagaggtccatattagattgcatccaagacttatcagtctttatggaggaagcatggaagaaatgattccaaagtaa

SEQ ID NO: 3877 - DNA, 1335 bp, Homo sapiens
  source 1..1335: mol_type = unassigned DNA; mol_type = unassigned DNA
ggggaggaggggagaacggggagcgcacagcctggacgcgtgcgcaggcgtcaggcgcatagacctgctagcccctcagctagcggccccgcccgcgcttagcatcactaactgggctatataacctgagcgcccgcgcggccacgacacgaggaattcgcccacgcaggaggcgcggcgtccggaggccccagggttatgagactatcactgctcaggacctactaacaacaaaggtgattctaagtatgacttgctatgtaaagaagaatttattgaactcaaagacatattctctgtgaaactgaaacggcgttgttctgttaaacagcagagaagtggtactttattaggtatcacactcttcatctgcttgaaaaaggaacaaaataaactaaagaattctacacttgatcttattaatttaagtgaagaccactgtgacatatggtttagacagttcaagaaaatattggcaggctttccaaacagaccgaagtcattaaaaatactccttaacccccaaagtcacaaaaaagaagctacccaggtttattatgagaaggttgaacctctgttgaagcttgcaggaataaaaactgatgtaacaataatggaatatgaagggcacgctctgtcactgcttaaggaatgtgaactccagggatttgatggtgttgtctgtgttggtggagatggatctgctagcgaagtagcccatgctttgcttctgagagctcagaagaatgctgggatggaaacagaccgaatcctgactcctgtcagagcacagcttccacttggcttaataccagcaggatctaccaatgtattggcacattctcttcatggagttcctcatgtgataactgcaacattgcacattataatggggcatgtacagctggtcgacgtctgcaccttcagcaccgctggcaagcttcttcgctttgggttctcagccatgtttggctttggtggaagaactttggctctggcagaaaaatatcgatggatgtcccctaaccaacggagagattttgctgttgttaaggcactggcaaaacttaaggcagaagactgtgaaatatcatttttaccatttaacagctctgatgatgtgcaagaaaggagggcacagggatctcccaaatctgactgtaatgatcaatggcaaatgatccagggtcagttcttgaatgtcagcattatggcaattccttgcctgtgttcagtggcacctagaggcttggcacctaataccagattaaataatggaagtatggctcttataattgcccgaaacacttctcggccagaatttataaaacacct

SEQ ID NO: 3878 - DNA, 550 bp, Homo sapiens
  source 1..550: mol_type = unassigned DNA; mol_type = unassigned DNA
tgtattgctttgtctcccaggcccaagtgcagaggcacgatcttggcttactgcaatctctgcctcctgggctcaagcaatcctctcacctcagcctcccaagtagctgggactacaggtgattctaagtatgacttgctatgtaaagaagaatttattgaactcaaagacatattctctgtgaaactgaaacggcgttgttctgttaaacagcagagaagtggtactttattaggtatcacactcttcatctgcttgaaaaaggaacaaaataaactaaagaattctacacttgatcttattaatttaagtgaagaccactgtgacatatggtttagacagttcaagaaaatattggcaggctttccaaacagaccgaagtcattaaaaatactccttaacccccaaagtcacaaaaaagaagctacccaggtttattatgagaaggttgaacctctgttgaagcttgcaggaataaaaactgatgtaacaatgttgtctgtgttggtggagatggatctgctagcgaagtagcccatgctttgcttct

SEQ ID NO: 3879 - DNA, 596 bp, Homo sapiens
  source 1..596: mol_type = unassigned DNA; mol_type = unassigned DNA
attataacgctgtggtcagtaaagatacttgatattatcttaatcttttaaaatttgttaagacttgttttgtggcctaacatgtgatctctcctcaagaatgttccatgtgcatttgagaagaatgtgtatctgcagctgttggacggaatgttctgtgattctaagtatgacttgctatgtaaagaagaatttattgaactcaaagacatattctctgtgaaactgaaacggcgttgttctgttaaacagcagagaagtggtactttattaggtatcacactcttcatctgcttgaaaaaggaacaaaataaactaaagaattctacacttgatcttattaatttaagtgaagaccactgtgacatatggtttagacagttcaagaaaatattggcaggctttccaaacagaccgaagtcattaaaaatactccttaacccccaaagtcacaaaaaagaagctacccaggtttattatgagaaggttgaacctctgttgaagcttgcaggaataaaaactgatgtaacaataatggaatatgaagggcacgctctgtcactgcttaaggaatgtgaactccagggatttgatgg

SEQ ID NO: 3880 - DNA, 572 bp, Homo sapiens
  source 1..572: mol_type = unassigned DNA; mol_type = unassigned DNA
gttgctgtggcagcgctggacgcggctagagctggggctgccgcgccctccacctccttctccaaaggcctccccggacccctggctcgggcccagcctgcgactccgccatgccctggaggaggcgcaggaaccgggtgattctaagtatgacttgctatgtaaagaagaatttattgaactcaaagacatattctctgtgaaactgaaacggcgttgttctgttaaacagcagagaagtggtactttattaggtatcacactcttcatctgcttgaaaaaggaacaaaataaactaaagaattctacacttgatcttattaatttaagtgaagaccactgtgacatatggtttagacagttcaagaaaatattggcaggctttccaaacagaccgaagtcattaaaaatactccttaacccccaaagtcacaaaaaagaagctacccaggtttattatgagaaggttgaacctctgttgaagcttgcaggaataaaaactgatgtaacaataatggaatatgaagggcacgctctgtcactgcttaaggaatgtgaactccagggatttg

SEQ ID NO: 3881 - DNA, 596 bp, Homo sapiens
  source 1..596: mol_type = unassigned DNA; mol_type = unassigned DNA
gcacagcctggacgcgtgcgcaggcgtcaggcgcatagacctgctagcccctcagctagcggccccgcccgcgcttagcatcactaactgggctatataacctgagcgcccgcgcggccacgacacgaggaattcgcccacgcaggaggcgcggcgtccggaggccccagggttatgagactatcactgctcaggacctactaacaacaaagaaagtgtttaccaaatgctgctgcctcaataccagagtctgtattgtcagttgatctttcaagtaaaaagtggtgttctatgaaaaacagctagttcagctgcgactgaaatgatataagtgtttctcctggagcaaaccaccacttcgatttgtagcagaaatgctgtgattctaagtatgacttgctatgtaaagaagaatttattgaactcaaagacatattctctgtgaaactgaaacggcgttgttctgttaaacagcagagaagtggtactttattaggtatcacactcttcatctgcttgaaaaaggaacaaaataaactaaagaattctacacttgatcttattaatttaagtgaagaccactgtgacatatggtt

SEQ ID NO: 3882 - DNA, 531 bp, Homo sapiens
  source 1..531: mol_type = unassigned DNA; mol_type = unassigned DNA
attatctttcttttccaggtgtgcaaacaagctcttggagggaaggagaggagaaaataaacaggagcagctgctgtgaataaacacagaagtggagctgggggactgattagaagcctcattcagtgcacctgggccccagcaggcccagccaggcgtggaggaagaggcattgaggactttccttacctgtttttccagctcacccactgccagcagagacctcccagctaactggaacctgtgtccacagaatgctgtccagtttcaacgagtggttttggcaggacaggttctggttaccacccaatgtcacgtggacagagctagaagaccgggatggccgtgtctacccccacccccaggacttgttggcagccctgcccctggcgctggtcctcctggccatgcgccttgcctttgagagattcattggcctgcccctgagccggtggctgggtgtgagggatcagaccaggaggcaagtgaagcccaacgccacgctggagaaacacttcctcacggaagggc

SEQ ID NO: 3883 - DNA, 713 bp, Homo sapiens
  source 1..713: mol_type = unassigned DNA; mol_type = unassigned DNA
ccacggccccgccccgggctccccccactcaagccttttttcccctgctgggggccgaggcccggccaggagcagagtccggctgcctggggcgggcggcgcgtgtctgcagctgctccgggtagcccgctaggcgcgccgtccccagccccgccgccggccctcggtgcgcccggccgcctgcacccccagcctcaaatgggtctgccttccaggagcagctgctgtgaataaacacagaagtggagctgggggactgattagaagcctcattcagtgcacctgggccccagcaggcccagccaggcgtggaggaagaggcattgaggactttccttacctgtttttccagctcacccactgccagcagagaatgctgtccagtttcaacgagtggttttggcaggacaggttctggttaccacccaatgtcacgtggacagagctagaagaccgggatggccgtgtctacccccacccccaggacttgttggcagccctgcccctggcgctggtcctcctggccatgcgccttgcctttgagagattcattggcctgcccctgagccggtggctgggtgtgagggatcagaccaggaggcaagtgaagcccaacgccacgctggagaaacacttcctcacggaagggcacaggcccaaggagccccagctgtctctcctggccgcccagtgtggcctcacgctgcagcaga

SEQ ID NO: 3884 - DNA, 1803 bp, Homo sapiens
  source 1..1803: mol_type = unassigned DNA; mol_type = unassigned DNA
gccccgggctccccccactcaagccttttttcccctgctgggggccgaggcccggccaggagcagagtccggctgcctggggcgggcggcgcgtgtctgcagctgctccgggtagcccgctaggcgcgccgtccccagccccgccgccggccctcggtgcgcccggccgcctgcacccccaggagcagctgctgtgaataaacacagaagtggagctgggggactgattagaagcctcattcagtgcacctgggccccagcaggcccagccaggcgtggaggaagaggcattgaggactttccttacctgtttttccagctcacccactgccagcagaggacaggttctggttaccacccaatgtcacgtggacagagctagaagaccgggatggccgtgtctacccccacccccaggacttgttggcagccctgcccctggcgctggtcctcctggccatgcgccttgcctttgagagattcattggcctgcccctgagccggtggctgggtgtgagggatcagaccaggaggcaagtgaagcccaacgccacgctggagaaacacttcctcacggaagggcacaggcccaaggagccccagctgtctctcctggccgcccagtgtggcctcacgctgcagcagacccagcgatggttccggagacgccggaaccaggatcgaccccagctgaccaagaagttctgtgaggccagctggaggtttctcttctacctgtcctccttcgtgggcggcctctcggtcctgtaccacgagtcatggctgtgggcaccagtaatgtgctgggacaggtacccaaaccagactctgaagccatccctgtactggtggtacctcttggagctgggtttctacctctcactgctaatcaggctgccctttgatgtcaagcgcaaggatttcaaggagcaggtgatacaccacttcgtggcggtcatcctgatgaccttctcctacagtgccaacctgctgcgcattggctctctggtgctgctgttacacgattcctctgactacctgctggaggcctgtaagatggtcaactacatgcagtatcagcaagtgtgcgacgctctcttcctcatcttctcctttgtcttcttctacacccgactggtcctctttcccacccagatcctctacaccacatactacgagtccatcagcaacaggggccccttcttcggctactacttcttcaacgggcttctgatgttgctgcagctgctgcacgtgttctggtcttgcctcattctgcgcatgctctatagcttcatgaagaagggccagatggagaaggacattcgtagtgatgtagaagaatcagactccagtgaggaggcggcggcggcccaggaacctctgcagctaaagaacggggcagctggagggcccaggccagcccccactgatggccctcggagccgggtggccgggcgtctgaccaacaggcacacaacagccacatagccgggcggggctggctgtaaggggttgcccccccgccagtgccttggatatttctggggtgactggactggcgcccctgggccacctttctggagacagggagggccccacccggggtgggtgggaaggctgatgatctgtctccagccccttccttctgcccacccacccttcttccctctgggcaactggacagatctgggagccagcagctggatgctgtggctggccagagacacctccaggctgtggcctgggggctggggggagccccaggctgaaaagggtccaattaaaacaaatggagccaaa

SEQ ID NO: 3885 - DNA, 768 bp, Homo sapiens
  source 1..768: mol_type = unassigned DNA; mol_type = unassigned DNA
cccactcaagccttttttcccctgctgggggccgaggcccggccaggagcagagtccggctgcctggggcgggcggcgcgtgtctgcagctgctccgggtagcccgctaggcgcgccgtccccagccccgccgccggccctcggtgcgcccggccgcctgcacccccaggagcagctgctgtgaataaacacagaagtggagctgggggactgattagaagcctcattcagtgcacctgggccccagcaggcccagccaggcgtggaggaagaggcattgaggactttccttacctgtttttccagctcacccactgccagcagagacctcccagctaactggaacctgtgtccacagaatgctgtccagtttcaacgagtggttttggcaggacaggttctggttaccacccaatgtcacgtggacagagctagaagaccgggatggccgtgtctacccccacccccaggacttgttggcagccctgcccctggcgctggtcctcctggccatgcgccttgcctttgagagattcattggcctgcccctgagccggtggctgggtgtgagggatcagaccaggaggcaagtgaagcccaacgccacgctggagaaacacttcctcacggaagggcacaggcccaaggagccccagctgtctctcctggccgcccagtgtggcctcacgctgcagcagacccagcgatggttccggagacgccggaaccaggatcgaccccagctgaccaagaagttctgtgaggcca

SEQ ID NO: 3886 - DNA, 420 bp, Homo sapiens
  source 1..420: mol_type = unassigned DNA; mol_type = unassigned DNA
ttttcccctgctgggggccgaggcccggccaggagcagagtccggctgcctggggcgggcggcgcgtgtctgcagctgctccgggtagcccgctaggcgcgccgtccccagccccgccgccggccctcggtgcgcccggccgcctgcacccccaggagcagctgctgtgaataaacacagaagtggagctgggggactgattagaagcctcattcagtgcacctgggccccagcaggcccagccaggcgtggaggaagaggcattgaggactttccttacctgtttttccagctcacccactgccagcagagcatgtcacgtgctcccgcctgagcctctggccgcaggaatcaggtgaccccaggcagcgggccaggctgcaggggcgggatctgctccgtcacccaggctggagtgca

SEQ ID NO: 3887 - DNA, 1797 bp, Homo sapiens
  source 1..1797: mol_type = unassigned DNA; mol_type = unassigned DNA
ggggccgaggcccggccaggagcagagtccggctgcctggggcgggcggcgcgtgtctgcagctgctccgggtagcccgctaggcgcgccgtccccagccccgccgccggccctcggtgcgcccggccgcctgcacccccaggagcagctgctgtgaataaacacagaagtggagctgggggactgattagaagcctcattcagtgcacctgggccccagcaggcccagccaggcgtggaggaagaggcattgaggactttccttacctgtttttccagctcacccactgccagcagagaatgctgtccagtttcaacgagtggttttggcaggacaggttctggttaccacccaatgtcacgtggacagagctagaagaccgggatggccgtgtctacccccacccccaggacttgttggcagccctgcccctggcgctggtcctcctggccatgcgccttgcctttgagagattcattggcctgcccctgagccggtggctgggtgtgagggatcagaccaggaggcaagtgaagcccaacgccacgctggagaaacacttcctcacggaagggcacaggcccaaggagccccagctgtctctcctggccgcccagtgtggcctcacgctgcagcagacccagcgatggttccggagacgccggaaccaggatcgaccccagctgaccaagaagttctgtgaggccagctggaggtttctcttctacctgtcctccttcgtgggcggcctctcggtcctgtaccacgagtcatggctgtgggcaccagtaatgtgctgggacaggtacccaaaccagactctgaagccatccctgtactggtggtacctcttggagctgggtttctacctctcactgctaatcaggctgccctttgatgtcaagcgcaaggatttcaaggagcaggtgatacaccacttcgtggcggtcatcctgatgaccttctcctacagtgccaacctgctgcgcattggctctctggtgctgctgttacacgattcctctgactacctgctggaggcctgtaagatggtcaactacatgcagtatcagcaagtgtgcgacgctctcttcctcatcttctcctttgtcttcttctacacccgactggtcctctttcccacccagatcctctacaccacatactacgagtccatcagcaacaggggccccttcttcggctactacttcttcaacgggcttctgatgttgctgcagctgctgcacgtgttctggtcttgcctcattctgcgcatgctctatagcttcatgaagaagggccagatggagaaggacattcgtagtgatgtagaagaatcagactccagtgaggaggcggcggcggcccaggaacctctgcagctaaagaacggggcagctggagggcccaggccagcccccactgatggccctcggagccgggtggccgggcgtctgaccaacaggcacacaacagccacatagccgggcggggctggctgtaaggggttgcccccccgccagtgccttggatatttctggggtgactggactggcgcccctgggccacctttctggagacagggagggccccacccggggtgggtgggaaggctgatgatctgtctccagccccttccttctgcccacccacccttcttccctctgggcaactggacagatctgggagccagcagctggatgctgtggctggccagagacacctccaggctgtggcctgggggctggggggagccccaggctgaaaagggtccaattaaaacaaatggagccaaa

SEQ ID NO: 3888 - DNA, 1637 bp, Homo sapiens
  source 1..1637: mol_type = unassigned DNA; mol_type = unassigned DNA
gccgaggcccggccaggagcagagtccggctgcctggggcgggcggcgcgtgtctgcagctgctccgggtagcccgctaggcgcgccgtccccagccccgccgccggccctcggtgcgcccggccgcctgcacccccagaatgctgtccagtttcaacgagtggttttggcaggacaggttctggttaccacccaatgtcacgtggacagagctagaagaccgggatggccgtgtctacccccacccccaggacttgttggcagccctgcccctggcgctggtcctcctggccatgcgccttgcctttgagagattcattggcctgcccctgagccggtggctgggtgtgagggatcagaccaggaggcaagtgaagcccaacgccacgctggagaaacacttcctcacggaagggcacaggcccaaggagccccagctgtctctcctggccgcccagtgtggcctcacgctgcagcagacccagcgatggttccggagacgccggaaccaggatcgaccccagctgaccaagaagttctgtgaggccagctggaggtttctcttctacctgtcctccttcgtgggcggcctctcggtcctgtaccacgagtcatggctgtgggcaccagtaatgtgctgggacaggtacccaaaccagactctgaagccatccctgtactggtggtacctcttggagctgggtttctacctctcactgctaatcaggctgccctttgatgtcaagcgcaaggatttcaaggagcaggtgatacaccacttcgtggcggtcatcctgatgaccttctcctacagtgccaacctgctgcgcattggctctctggtgctgctgttacacgattcctctgactacctgctggaggcctgtaagatggtcaactacatgcagtatcagcaagtgtgcgacgctctcttcctcatcttctcctttgtcttcttctacacccgactggtcctctttcccacccagatcctctacaccacatactacgagtccatcagcaacaggggccccttcttcggctactacttcttcaacgggcttctgatgttgctgcagctgctgcacgtgttctggtcttgcctcattctgcgcatgctctatagcttcatgaagaagggccagatggagaaggacattcgtagtgatgtagaagaatcagactccagtgaggaggcggcggcggcccaggaacctctgcagctaaagaacggggcagctggagggcccaggccagcccccactgatggccctcggagccgggtggccgggcgtctgaccaacaggcacacaacagccacatagccgggcggggctggctgtaaggggttgcccccccgccagtgccttggatatttctggggtgactggactggcgcccctgggccacctttctggagacagggagggccccacccggggtgggtgggaaggctgatgatctgtctccagccccttccttctgcccacccacccttcttccctctgggcaactggacagatctgggagccagcagctggatgctgtggctggccagagacacctccaggctgtggcctgggggctggggggagccccaggctgaaaagggtccaattaaaacaaatggagccaaa

SEQ ID NO: 3889 - DNA, 1515 bp, Homo sapiens
  source 1..1515: mol_type = unassigned DNA; mol_type = unassigned DNA
ggagcagagtccggctgcctggggcgggcggcgcgtgtctgcagctgctccgggtagcccgctaggcgcgccgtccccagccccgccgccggccctcggtgcgcccggccgcctgcacccccaggagcagctgctgtgaataaacacagaagtggagctgggggactgattagaagcctcattcagtgcacctgggccccagcaggcccagccaggcgtggaggaagaggcattgaggactttccttacctgtttttccagctcacccactgccagcagagaatgctgtccagtttcaacgagtggttttggcaggacaggttctggttaccacccaatgtcacgtggacagagctagaagaccgggatggccgtgtctacccccacccccaggacttgttggcagccctgcccctggcgctggtcctcctggccatgcgccttgcctttgagagattcattggcctgcccctgagccggtggctgggtgtgagggatcagaccaggaggcaagtgaagcccaacgccacgctggagaaacacttcctcacggaagggcacaggcccaaggagccccagctgtctctcctggccgcccagtgtggcctcacgctgcagcagacccagcgatggttccggagacgccggaaccaggatcgaccccagctgaccaagaagttctgtgaggccagctggaggtttctcttctacctgtcctccttcgtgggcggcctctcggtcctgtaccacgagtcatggctgtgggcaccagtaatgtgctgggacaggtacccaaaccagactctgaagccatccctgtactggtggtacctcttggagctgggtttctacctctcactgctaatcaggctgccctttgatgtcaagcgcaaggatttcaaggagcaggtgatacaccacttcgtggcggtcatcctgatgaccttctcctacagtgccaacctgctgcgcattggctctctggtgctgctgttacacgattcctctgactacctgctggagatggagaaggacattcgtagtgatgtagaagaatcagactccagtgaggaggcggcggcggcccaggaacctctgcagctaaagaacggggcagctggagggcccaggccagcccccactgatggccctcggagccgggtggccgggcgtctgaccaacaggcacacaacagccacatagccgggcggggctggctgtaaggggttgcccccccgccagtgccttggatatttctggggtgactggactggcgcccctgggccacctttctggagacagggagggccccacccggggtgggtgggaaggctgatgatctgtctccagccccttccttctgcccacccacccttcttccctctgggcaactggacagatctgggagccagcagctggatgctgtggctggccagagacacctccaggctgtggcctgggggctggggggagccccaggctgaaaagggtccaattaaaacaaatggagccaaa

SEQ ID NO: 3890 - DNA, 440 bp, Homo sapiens
  source 1..440: mol_type = unassigned DNA; mol_type = unassigned DNA
agagtccggctgcctggggcgggcggcgcgtgtctgcagctgctccgggtagcccgctaggcgcgccgtccccagccccgccgccggccctcggtgcgcccggccgcctgcacccccaggagcagctgctgtgaataaacacagaagtggagctgggggactgattagaagcctcattcagtgcacctgggccccagcaggcccagccaggcgtggaggaagaggcattgaggactttccttacctgtttttccagctcacccactgccagcagagggagaaggtgatggggacaaggatgaggcttgaaggagcagctagacatctggaggaagagtgctccgggcagaaggcccagcaggtgcaaaggccctgaggctggaacaggcatggtgtgttggaggaatgcaatgaggctggggtggctggagcaaactaag

SEQ ID NO: 3891 - DNA, 1826 bp, Homo sapiens
  source 1..1826: mol_type = unassigned DNA; mol_type = unassigned DNA
ggctgcctggggcgggcggcgcgtgtctgcagctgctccgggtagcccgctaggcgcgccgtccccagccccgccgccggccctcggtgcgcccggccgcctgcacccccaggagcagctgctgtgaataaacacagaagtggagctgggggactgattagaagcctcattcagtgcacctgggccccagcaggcccagccaggcgtggaggaagaggcattgaggactttccttacctgtttttccagctcacccactgccagcagagggagaaggtgatggggacaaggatgaggcttgaaggagcagctagacatctggaggaagagtgctccgggcagaaggcccagcaggtgcaaaggccctgaggctggaacaggcatggatctgctccgtcacccaggctggagtgcagtggtgtgatcacagctcactgcagcctcaaactcctgggctcaaccagtcctctcacctcagcctcctgagtagccgggattacagattcattggcctgcccctgagccggtggctgggtgtgagggatcagaccaggaggcaagtgaagcccaacgccacgctggagaaacacttcctcacggaagggcacaggcccaaggagccccagctgtctctcctggccgcccagtgtggcctcacgctgcagcagacccagcgatggttccggagacgccggaaccaggatcgaccccagctgaccaagaagttctgtgaggccagctggaggtttctcttctacctgtcctccttcgtgggcggcctctcggtcctgtaccacgagtcatggctgtgggcaccagtaatgtgctgggacaggtacccaaaccagactctgaagccatccctgtactggtggtacctcttggagctgggtttctacctctcactgctaatcaggctgccctttgatgtcaagcgcaaggatttcaaggagcaggtgatacaccacttcgtggcggtcatcctgatgaccttctcctacagtgccaacctgctgcgcattggctctctggtgctgctgttacacgattcctctgactacctgctggaggcctgtaagatggtcaactacatgcagtatcagcaagtgtgcgacgctctcttcctcatcttctcctttgtcttcttctacacccgactggtcctctttcccacccagatcctctacaccacatactacgagtccatcagcaacaggggccccttcttcggctactacttcttcaacgggcttctgatgttgctgcagctgctgcacgtgttctggtcttgcctcattctgcgcatgctctatagcttcatgaagaagggccagatggagaaggacattcgtagtgatgtagaagaatcagactccagtgaggaggcggcggcggcccaggaacctctgcagctaaagaacggggcagctggagggcccaggccagcccccactgatggccctcggagccgggtggccgggcgtctgaccaacaggcacacaacagccacatagccgggcggggctggctgtaaggggttgcccccccgccagtgccttggatatttctggggtgactggactggcgcccctgggccacctttctggagacagggagggccccacccggggtgggtgggaaggctgatgatctgtctccagccccttccttctgcccacccacccttcttccctctgggcaactggacagatctgggagccagcagctggatgctgtggctggccagagacacctccaggctgtggcctgggggctggggggagccccaggctgaaaagggtccaattaaaacaaatggagccaaa

SEQ ID NO: 3892 - DNA, 873 bp, Homo sapiens
  source 1..873: mol_type = unassigned DNA; mol_type = unassigned DNA
gctaggcgcgccgtccccagccccgccgccggccctcggtgcgcccggccgcctgcacccccaggagcagctgctgtgaataaacacagaagtggagctgggggactgattagaagcctcattcagtgcacctgggccccagcaggcccagccaggcgtggaggaagaggcattgaggactttccttacctgtttttccagctcacccactgccagcagagattcattggcctgcccctgagccggtggctgggtgtgagggatcagaccaggaggcaagtgaagcccaacgccacgctggagaaacacttcctcacggaagggcacaggcccaaggagccccagctgtctctcctggccgcccagtgtggcctcacgctgcagcagacccagcgatggttccggagacgccggaaccaggatcgaccccagctgaccaagaagttctgtgaggccagctggaggtttctcttctacctgtcctccttcgtgggcggcctctcggtcctgtaccacgagtcatggctgtgggcaccagtaatgtgctgggacaggtacccaaaccagactctgaagccatccctgtactggtggtacctcttggagctgggtttctacctctcactgctaatcaggctgccctttgatgtcaagcgcaaggatttcaaggagcaggtgatacaccacttcgtggcggtcatcctgatgaccttctcctacagtgccaacctgctgcgcattggctctctggtgctgctgttacacgattcctctgactacctgctggaggtgggcccgacccctgcctgacccttcccagctgctgtacccagccctcccaggtgccccagagatgaggtcccattcctccca

SEQ ID NO: 3893 - DNA, 568 bp, Homo sapiens
  source 1..568: mol_type = unassigned DNA; mol_type = unassigned DNA
actgtccccctcggggcttcccatcatggccgtctccccgagctatccgcgctcccccacgagggccggggcgcaacgggtgcccgaggacgcggctgtgaaacgggctggagcgagtaggggcgatcctggcctcgtgacgcgggggaatccggatgtgtgagccgggggagcgccccgtttccccgacgtgccagggctggggacgcagctggggccctggcctcggagtccgcagcccggccgcgtagacggcttctgagaaccgcttaaacacgtcattccaagcccgagctaacccatcaggcggccggggagcagctgctgtgaataaacacagaagtggagctgggggactgattagaagcctcattcagtgcacctgggccccagcaggcccagccaggcgtggaggaagaggcattgaggactttccttacctgtttttccagctcacccactgccagcagagaatgctgtccagtttcaacgagtggttttggcaggacaggttctggttaccacccaatgtcacgtggacagagctagaagaccgggatggccgtgt

SEQ ID NO: 3894 - DNA, 758 bp, Homo sapiens
  source 1..758: mol_type = unassigned DNA; mol_type = unassigned DNA
gtgacctgggagcagcagaaatctggaaactgacagcatggacgtgctggccgcagcttccaggatctgctccgtcacccaggctggagtgcagtggtgtgatcacagctcactgcagcctcaaactcctgggctcaaccagtcctctcacctcagcctcctgagtagccgggattacagaatgctgtccagtttcaacgagtggttttggcaggacaggttctggttaccacccaatgtcacgtggacagagctagaagaccgggatggccgtgtctacccccacccccaggacttgttggcagccctgcccctggcgctggtcctcctggccatgcgccttgcctttgagagattcattggcctgcccctgagccggtggctgggtgtgagggatcagaccaggaggcaagtgaagcccaacgccacgctggagaaacacttcctcacggaagggcacaggcccaaggagccccagctgtctctcctggccgcccagtgtggcctcacgctgcagcagacccagcgatggttccggagacgccggaaccaggatcgaccccagctgaccaagaagttctgtgaggccagctggaggtttctcttctacctgtcctccttcgtgggcggcctctcggtcctgtaccacgagtcatggctgtgggcaccagtaatgtgctgggacaggtacccaaaccagactctgaagccatccctgtactggtggtacctcttggagctgggtttctacctctcac

SEQ ID NO: 3895 - DNA, 2401 bp, Homo sapiens
  source 1..2401: mol_type = unassigned DNA; mol_type = unassigned DNA
ggctcactgcaacctccgcctcccaggttcaagtgattctcctgcctcagactcctgagtagctgggattacaggcatgtgccaccacgcccagctcatttttgtatttttagtagagacagggtttcaccatgttggtcaggctgctcttgaactcctggcctcgtgatccacccaccttggccttctaaagtgctgggattacaggcgtgagcaactgcgcccggcctactactctgttttacagatgaacttgaggttcagagaggtcaagtcatttgcctgaggacacacagcccaactctgccttttaacactgaccaggcaatggagtgggagtgatgagaatgaagtggtggctcttctgggaccagaggacagttccaaagtcccaggcaaggggagttccatcttccagtcctgcctcctggttgtcaactgcgctgataggggcccgagtaggagttctgaggctccagcctctcaggccccacttgccccacccattctgcttgcagacctcccagctaactggaacctgtgtccacagaatgctgtccagtttcaacgagtggttttggcaggacaggttctggttaccacccaatgtcacgtggacagagctagaagaccgggatggccgtgtctacccccacccccaggacttgttggcagccctgcccctggcgctggtcctcctggccatgcgccttgcctttgagagattcattggcctgcccctgagccggtggctgggtgtgagggatcagaccaggaggcaagtgaagcccaacgccacgctggagaaacacttcctcacggaagggcacaggcccaaggagccccagctgtctctcctggccgcccagtgtggcctcacgctgcagcagacccagcgatggttccggagacgccggaaccaggatcgaccccagctgaccaagaagttctgtgaggccagctggaggtttctcttctacctgtcctccttcgtgggcggcctctcggtcctgtaccacgtgagtataccagagtatagctgactgctcacctgccccatccacctggcctagatctggcaggagtgggggtgtggagtggtgcagccagagaggaaaacatgcagctgaggagagagcgagctttgcaagatggtggtgaatgttcactcaacaggtatttggatttactatgcaccaaaagttggggttctgcagtgaatgagccccccagtcgagagtgagaagcaggaaaaagcagggctgggtgaaggtagcatctatgtgactgtggaaggagaaccaaagagaccgcagacccagggtgggaggttggattctcacctctgcacagcctgacacccatttccctgcaggagtcatggctgtgggcaccagtaatgtgctgggacaggtacccaaaccagactctgaagccatccctgtactggtggtacctcttggagctgggtttctacctctcactgctaatcaggctgccctttgatgtcaagcgcaaggatttcaaggagcaggtgatacaccacttcgtggcggtcatcctgatgaccttctcctacagtgccaacctgctgcgcattggctctctggtgctgctgttacacgattcctctgactacctgctggaggcctgtaagatggtcaactacatgcagtatcagcaagtgtgcgacgctctcttcctcatcttctcctttgtcttcttctacacccgactggtcctctttcccacccagatcctctacaccacatactacgagtccatcagcaacaggggccccttcttcggctactacttcttcaacgggcttctgatgttgctgcagctgctgcacgtgttctggtcttgcctcattctgcgcatgctctatagcttcatgaagaagggccagatggagaaggacattcgtagtgatgtagaagaatcagactccagtgaggaggcggcggcggcccaggaacctctgcagctaaagaacggggcagctggagggcccaggccagcccccactgatggccctcggagccgggtggccgggcgtctgaccaacaggcacacaacagccacatagccgggcggggctggctgtaaggggttgcccccccgccagtgccttggatatttctggggtgactggactggcgcccctgggccacctttctggagacagggagggccccacccggggtgggtgggaaggctgatgatctgtctccagccccttccttctgcccacccacccttcttccctctgggcaactggacagatctgggagccagcagctggatgctgtggctggccagagacacctccaggctgtggcctgggggctggggggagccccaggctgaaaagggtccaattaaaacaaatggagcc

SEQ ID NO: 3896 - DNA, 429 bp, Homo sapiens
  source 1..429: mol_type = unassigned DNA; mol_type = unassigned DNA
tgagaagaggatgtggtgggagctgggctccaggacagtgtcccaggcaacaagcaaggaggagttcgagggaaggagcagtgctggggaacattctttccaactggcttgggttgcacagtgaaaatgaagccccgcccctcccagcctccgtgggagacaaagccccacctctgtccggctacccgggagatgaggccccaccccttttttactccttgggagatgaggccccgcccctcttaaactctgggagatggagccctgctccctgtgtcttcctgggagatgaggccccaccgcctgccttcctgacatgaagcccctcccctatgaggatcctctacaccacatactacgagtccatcagcaacaggggccccttcttcggctactacttcttcaacgggcttctgatgttgctgcagc

SEQ ID NO: 3897 - DNA, 710 bp, Homo sapiens
  source 1..710: mol_type = unassigned DNA; mol_type = unassigned DNA
taggactgggggctacagcggctggtcaaaccccagcctcctcctctccccctggctgtaggatcctctacaccacatactacgagtccatcagcaacaggggccccttcttcggctactacttcttcaacgggcttctgatgttgctgcagctgctgcacgtgttctggtcttgcctcattctgcgcatgctctatagcttcatgaagaagggccagatggagaaggacattcgtagtgatgtagaagaatcagactccagtgaggaggcggcggcggcccaggaacctctgcagctaaagaacggggcagctggagggcccaggccagcccccactgatggccctcggagccgggtggccgggcgtctgaccaacaggcacacaacagccacatagccgggcggggctggctgtaaggggttgcccccccgccagtgccttggatatttctggggtgactggactggcgcccctgggccacctttctggagacagggagggccccacccggggtgggtgggaaggctgatgatctgtctccagccccttccttctgcccacccacccttcttccctctgggcaactggacagatctgggagccagcagctggatgctgtggctggccagagacacctccaggctgtggcctgggggctggggggagccccaggctgaaaagggtccaattaaaacaaatggagccaaa

SEQ ID NO: 3898 - DNA, 574 bp, Homo sapiens
  source 1..574: mol_type = unassigned DNA; mol_type = unassigned DNA
gcattttcacctgggactgttccctgggctgccttgtggtttgcatcaactggaagaggctttaaggagaccatctctgagtttccagtgtgggcacaggtgggcttatctaaatcagatcccaaatagtatttaaaaagcctctaccaaaagaagaggaggggctcaacctgagagaaaactcaccagggcagaaaagatgacagccatggaagcagagctcaaaggactgaagagctcatgaaagacttcttagagaagagagacaaggggaaacttctcatacagagaagtagaagactaaaacagaatctcttgagaccgatgcaactttccgtaactgaagatggctatattcattacggtgacaaagtgatgcttgtgaatcctgatgatcctgacacagaagctgatgtgtttctgcgtggggacctgagcctgtgtatgactccagatgaaattcagtcccatctgaaagacgaattagaggtaccctgtggcctgagcgcagttcaagccaagaccccaattggcagaaacacttttatcattttgagtgtacacagagatgcca

SEQ ID NO: 3899 - DNA, 572 bp, Homo sapiens
  source 1..572: mol_type = unassigned DNA; mol_type = unassigned DNA
attcatgtgtcaatgaagaattcctgccagacttccagtactgtcctcgaccatgggcagaatcccagctgcccctcccagaacactccatgccactggaactcaggagcgcaggtgggcttatctaaatcagatcccaaatagtatttaaaaagcctctaccaaaagaagaggaggggctcaacctgagagaaaactcaccagggcagaaaagatgacagccatggaagcagagctcaaaggactgaagagctcatgaaagacttcttagagaagagagacaaggggaaacttctcatacagagaagtagaagactaaaacagaatctcttgagaccgatgcaactttccgtaactgaagatggctatattcattacggtgacaaagtgatgcttgtgaatcctgatgatcctgacacagaagctgatgtgtttctgcgtggggacctgagcctgtgtatgactccagatgaaattcagtcccatctgaaagacgaattagaggtaccctgtggcctgagcgcagttcaagccaagaccccaattggcagaaacacttttatcattttgag

SEQ ID NO: 3900 - DNA, 1631 bp, Homo sapiens
  source 1..1631: mol_type = unassigned DNA; mol_type = unassigned DNA
gcctggggccgggtcgtcatggcgacgcgccacgctaacgcatggtgtcggagggaggcccacttgctgaacagcagggagcgatggcgcagaacgtgtatggtccgggagtccggataggcaactggaatgaggatgtctacctggaggaggagctcatgaaagacttcttagagaagagagacaaggggaaacttctcatacagagaagtagaagactaaaacagaatctcttgagaccgatgcaactttccgtaactgaagatggctatattcattacggtgacaaagtgatgcttgtgaatcctgatgatcctgacacagaagctgatgtgtttctgcgtggggacctgagcctgtgtatgactccagatgaaattcagtcccatctgaaagacgaattagaggtaccctgtggcctgagcgcagttcaagccaagaccccaattggcagaaacacttttatcattttgagtgtacacagagatgccactggtcaagtccttagatatgggcaggacttttgcctggggataacaggaggatttgacaacaaaatgttgtatttgtcaagtgaccacaggaccctcctgaaatcgtctaagaggtcttggctccaggaagtgtacctaacagatgaggtctcccatgtgaactgctggcaggctgccttccctgacccccagttacgcctggaatatgaaggcttccccgtcccggcaaatgctaaaattctcatcaatcactgtcacacaaatcggggactggcagcccaccggcatcttttcttaagcacctattttggaaaggaggctgaggttgtagctcacacatacctggattcacatagagttgagaaaccaaggaaccactggatgttggttactgggaatcccagggatgcctcgtcctccatgttggatctgcccaaaccacccacagaggacactcgagccatggagcaggccatgggccttgacacgcagtaacacgccaggcacgtgcatgttttccctggtcccgctctcatcaaatgtagctttaaaagaaattaacaaccttggtcatgcctcaagctatttttgaatcagatgtgggactctctgggcactatattaaaataaagattacattaagattattgaatttgtggtgggagtctagggctgaagaaaaacagctctggagaataattagtatttgaaagtgacaaacaatagccttttgttgataaacaaattctgaagaactcagcttcctctacttatatccttcattgtctacaaggacagtgcgttactttttaaagttatgtctatgtaataaagctgttggacctatactgaatttttggtaccacagtttccctcttgaatgtactaaaacacaaaaaactgacagctctgagctgtggccttaccttggaattaaacatttccacctttgtaaaacatcctatttttgtttctacctttggctttccaggtcaggacctctacctgatcagtaacctattattttgtaatgatttttaagctgcagaatctctaccttgtctttgaaactggcacattagttgtggcacccatgtgattagatagttcctgacaaaataaatgtatgtccttcca

SEQ ID NO: 3901 - DNA, 1354 bp, Homo sapiens
  source 1..1354: mol_type = unassigned DNA; mol_type = unassigned DNA
gcgctcccggggggcgggctcagatgggcggagggattcattttaagcaacgggcggccctccgcctccattgaaggcggggaaataccgcggcgcggacggtagttgctgtggtttccgttctgagctcgcagcttaggagctgaagatcgcggacttagcgttgccgcgtccgagtccggccatcagtggctgcagatccggaggccaggagctcaaccacccttcttcggaacagggccggcctgctgctgtgccctcgacgctcggtgcctgtatctactccggggcctaggtcggctccgggggcggcttaggagaaggccgccggcgagatgttcaaaaacacgttccagagcggcttcctctccatcctctacagcatcggcagcaagcctctgcaaatctgggacaaaaaggtacggaatggccacatcaaaagaatcactgataatgacatccagtccctggtgctagagattgaagggacaaatgtaagcaccacatatatcacatgccctgcagaccccaagaagacgctgggaattaaacttcctttccttgtcatgattatcaaaaacctgaagaagtattttaccttcgaagtgcaggtactagatgacaagaatgtgcgtcgtcgctttcgggcaagtaactaccagagcaccacccgggtcaaacccttcatctgcaccatgcccatgcggctggatgacggctggaaccagattcagttcaacttgctagacttcacacggcgagcatacggcaccaattacatcgagaccctcagagtgcagatccatgcaaattgtcgcatccgacgggtttacttctcagacagactctactcagaagatgagctgccggcagagttcaaactgtatctcccagttcagaacaaggcaaagcaataactggaattgtgactcgagggatagacccctggatgtgactcttctttttaaaaggaaactatgtggaggacgatgcaaaaacatatttatcttagtttgctctgctgtagttctgttatttatacttggtgttgcttgtcatggacaccggtgaacatgccgtaactctgtgactgcattgtaagtgcagtgggggtaagcagtcctgtgagtggcgcatgaacgctggagcttattccgccgcctgccccagtgtggggggagatacctttaccatgaacttacagaattaaagatggcccataaggaattccagaccaatatttcttcctgcggtttattctatgttttatatattatctaaatatatgtatatgctgtgtcatactcataatctggaaatgaataaagtgatatattcctggtttgtaaatttg

SEQ ID NO: 3902 - DNA, 1605 bp, Homo sapiens
  source 1..1605: mol_type = unassigned DNA; mol_type = unassigned DNA
gggaaataccgcggcgcggacggtagttgctgtggtttccgttctgagctcgcagcttaggagctgaagatcgcggacttagcgttgccgcgtccgagtccggccatcagtggctgcagatccggaggccaggagctcaaccacccttcttcggaacagggccggcctgctgctgtgccctcgacgctcggtgcctgtatctactccggggcctaggtcggctccgggggcggcttaggagaaggccgccggcgagatgttcaaaaacacgttccagagcggcttcctctccatcctctacagcatcggcagcaagcctctgcaaatctgggacaaaaaggtacggaatggccacatcaaaagaatcactgataatgacatccagtccctggtgctagagattgaagggacaaatgtaagcaccacatatatcacatgccctgcagaccccaagaagacgctgggaattaaacttcctttccttgtcatgattatcaaaaacctgaagaagtattttaccttcgaagtgcaggtactagatgacaagaatgtgcgtcgtcgctttcgggcaagtaactaccagagcaccacccgggtcaaacccttcatctgcaccatgcccatgcggctggatgacggctggaaccagattcagttcaacttgctagacttcacacggcgagcatacggcaccaattacatcgagaccctcagagtgcaggtactgctcctttcccagatagagccctgggttggggatagggcacactgcgtctaatattggcttgtggcccacatagcagaacagtgtgggtttctggcttcagttgccacactgtccagggagctttggcctcacaaaggtccaggaaatattcagaagtcgggtcaggtatagaggtgaatacagcaagtaagacctccctcttgccagaatccatccctaagacaagccaaggagatgccggagatgacgcgtttccagtcctggaagagggcctctagaagattcaggaaaagggggagaacagtcacatttcgcctctcaaaagaagcattgccttgacagatccatgcaaattgtcgcatccgacgggtttacttctcagacagactctactcagaagatgagctgccggcagagttcaaactgtatctcccagttcagaacaaggcaaagcaataactggaattgtgactcgagggatagacccctggatgtgactcttctttttaaaaggaaactatgtggaggacgatgcaaaaacatatttatcttagtttgctctgctgtagttctgttatttatacttggtgttgcttgtcatggacaccggtgaacatgccgtaactctgtgactgcattgtaagtgcagtgggggtaagcagtcctgtgagtggcgcatgaacgctggagcttattccgccgcctgccccagtgtggggggagatacctttaccatgaacttacagaattaaagatggcccataaggaattccagaccaatatttcttcctgcggtttattctatgttttatatattatctaaatatatgtatatgctgtgtcatactcataatctggaaatgaataaagtgatatat

SEQ ID NO: 3903 - DNA, 481 bp, Homo sapiens
  source 1..481: mol_type = unassigned DNA; mol_type = unassigned DNA
gtctcagccttgggaaagcaagctgtgggaattcaggtccttgtctggacaaggttgtgtgcttcttccaagacagagctagtgtgatgcttcttctctgtatttcacaggtactagatgacaagaatgtgcgtcgtcgctttcgggcaagtaactaccagagcaccacccgggtcaaacccttcatctgcaccatgcccatgcggctggatgacggctggaaccagattcagttcaacttgctagacttcacacggcgagcatacggcaccaattacatcgagaccctcagagtgcagatccatgcaaattgtcgcatccgacgggtttacttctcagacagactctactcagaagatgagctgccggcagagttcaaactgtatctcccagttcagaacaaggcaaagcaataactggaattgtgactcgagggatagacccctggatgtgactcttctttttaaaaggaaactatgtg

SEQ ID NO: 3904 - DNA, 276 bp, Homo sapiens
  source 1..276: mol_type = unassigned DNA; mol_type = unassigned DNA
atgacaagaatgtgcgtcgtcgctttcgggcaagtaactaccagagcaccacccgggtcaaacccttcatctgcaccatgcccatgcggctggatgacggctggaaccagattcagttcaacttgctagacttcacacggcgagcatacggcaccaattacatcgagaccctcagagtgcagaatccatccctaagacaagccaaggagatgccggagatgacgcgtttccagtcctggaagagggcctctagaagattcaggaaaagggggagaa

SEQ ID NO: 3905 - DNA, 572 bp, Homo sapiens
  source 1..572: mol_type = unassigned DNA; mol_type = unassigned DNA
gcggcgcggacggtagttgctgtggtttccgttctgagctcgcagcttaggagctgaagatcgcggacttagcgttgccgcgtccgagtccggccatcagtggctgcagatccggaggccaggagctcaaccacccttcttcggaacagggccggcctgctgctgtgccctcgacgctcggtgcctgtatctactccggggcctaggtcggctccgggggcggcttaggagaaggccgccggcgagatgttcaaaaacacgttccagagcggcttcctctccatcctctacagcatcggcagcaagcctctgcaaatctgggacaaaaaggtacggaatggccacatcaaaagaatcactgataatgacatccagtccctggtgctagagattgaagggacaaatgtaagcaccacatatatcacatgccctgcagaccccaagaagacgctgggaattaaacttcctttccttgtcatgattatcaaaaacctgaagaagtattttaccttcgaagtgcagatgacaagaatgtgcgtcgtcgctttcgggcaagtaactaccagagcacc

SEQ ID NO: 3906 - DNA, 710 bp, Homo sapiens
  source 1..710: mol_type = unassigned DNA; mol_type = unassigned DNA
cgcggacttagcgttgccgcgtccgagtccggccatcagtggctgcagatccggaggccaggagctcaaccacccttcttcggaacagggccggcctgctgctgtgccctcgacgctcggtgcctgtatctactccggggcctaggtcggctccgggggcggcttaggagaaggccgccggcgagatgttcaaaaacacgttccagagcggcttcctctccatcctctacagcatcggcagcaagcctctgcaaatctgggacaaaaaggtacggaatggccacatcaaaagaatcactgataatgacatccagtccctggtgctagagattgaagggacaaatgtaagcaccacatatatcacatgccctgcagaccccaagaagacgctgggaattaaacttcctttccttgtcatgattatcaaaaacctgaagaagtattttaccttcgaagtgcaggtaagtatgtgtacatgaatgtgtccactcttggctataccaaagtgatagcctttgaactgatgggaaaaagtgaccctacaaagtatctttatccttttgcatgtattcttttctgcttctagtataagcccagtgcagtccttgttatgtaaatttgatattagtaataaaatttaatcaggtttttaaagaaacagcacctagaaaacctagtaatttcaaagtgtcagagttagcgtggtatcc

SEQ ID NO: 3907 - DNA, 731 bp, Homo sapiens
  source 1..731: mol_type = unassigned DNA; mol_type = unassigned DNA
aaataccgcggcgcggacggtagttgctgtggtttccgttctgagctcgcagcttaggagctgaagatcgcggacttagcgttgccgcgtccgagtccggccatcagtggctgcagatccggaggccaggagctcaaccacccttcttcggaacagggccggcctgctgctgtgccctcgacgctcggtgcctgtatctactccggggcctaggtcggctccgggggcggcttaggagaaggccgccggcgagatgttcaaaaacacgttccagagcggcttcctctccatcctctacagcatcggcagcaagcctctgcaaatctgggacaaaaaggtacggaatggccacatcaaaagaatcactgataatgacatccagtccctggtgctagagattgaagggacaaatgtaaggtaggttgccacctctgttctcccagagacatcatatactagggaggcagtacgtcatagaggttaatagcacagactgcggagtcagagtgccggatgtgagtctatctctgccacttagagcttaccatgggcaagttactgaatcccccagaccttagcatactcatctgtacaatgggcagaataatagtacattttccttatagggttattgcgaggagtaaataaatgaatatatataaaacacgtaaagccttgcttagcacatagtaagcacgatgtcagtattagctatattattaaccaaagtg

SEQ ID NO: 3908 - DNA, 2985 bp, Homo sapiens
  source 1..2985: mol_type = unassigned DNA; mol_type = unassigned DNA
gtccgcgtcgtcatggcgacgctccgagcgggcgccggcgctggcgccggccgaatccggcccgggaaccacctccagggacatgacctttggctctaaaaagaagactccatttttcatgataaaatggcagtggtgaaaacccccagcagaggactaaagaatgctaaagaaccctttaataatgcatcaccccatctcttgaagaacctagtggaggagccgaaaaaaagaaaagaagtacctaatcacctcctagaatcaaaggtttatgcaaaacttgtgaataataaggtcatacaggcaagacctggcataatacattttggaggctatcaagtagaaaaacaacaccaacagattctgcatctggtcaatgtttccaatgaagacacacgtgttcatattttacccccgcaaaccaaatactttgagatcaattatgtaagaaaggaacaccacctggtccctggcttgtccctcacggtcaccgttacattttctccagatgagtggcgatactattatgactgcatccgtgttcactgtaagggagatgacactttgcttgttcctattcatgcctatccagtcatgaactcactagactttccttcatttataaatctgtcaaatgttctacttggtgaaagcaaaacttatgttattcctttgcagtgcagctgccctgtagattttgagttttatatcaccttgattcagtctcatcaagcctttgctattgagccaacatcaggaataattccggctaatgggaagatgactgtgactattaagtttacaccctttcagtatgggactgcacaaataaaaatgcagttatggatttcgcagttcaactctcaaccatacgaatgtgtcttcaccggaacatgctatcccaacatggccttacccagcctaagtcaactgtaggatattagtgtggcctgctgaacccaaatcctgcaaataaccatcattgaaatcactcgggcaacaaacaagtagaactgaacacaaattttaaaactgctgatttttctggtggcaaataagcagattagaagagtttgaaaggttgaataccctttctaagaaagtaaacgttcctccagaaaaagcaatgatgcatataaattttcaccgaccgccagcgaagccgaagcctcagaaggtgaaggaaattgagtaccagaacctcagatttccagtagatttatcgaatccatttgctgtggcaactgttttaaaccaagaaccaggaaaattgaagattaaagaattaagagaagttttggaccagggcactgaaatttcaaaaacgagacagatgaaggaggcactctttgaacagaaagtcagacaggacattcacgaagagatggaaaatcatcttaagtggcaggtgcaccttggtaaagatcctatgtcttttaaacttaaaaaagagcttactgaagagtggcaaaaagcatgtgccaaatataagctagacagaggagatcctattttggatgaggaatttcagcgacttaaaacagaagttagccataaacgggttgttcgcaatcaagaagagaaaatcaaggaatttcatcctacttttgatccactcattaataacacttggctcagcaggtccagggcacaaaaacggtttcaacaagtagcacgcaaggtcatgattcagggacgattattcaatatgctgagtgctgttcgtgaaatggacaaagagagtatactgagaaagattggccaagcaaaacaatcgatagcacaagaggcgaatttcttcaaattcttcctgaggcggatcagtcaggatgattataccagccggttctctgtgtcgcccaaggaggtgctgcccttcgctttcccagactgcagcccaccccaggactccaacgagttggctcctgatggccttggactggtcccaattaagtcttcagaagttcaaatcaagcagagttattccttcttcaatctgcaggttcctcaactgtacaaaattaagagatatcagccattctctgtccacaagtcttcaacaagttacagacctcaaaagcttgcccgagccctaaagcaaggagctgaggatgaagtcaccaccatcacagcccttccgaaacaggactccacaactcagctctctggcaaaacatcagtcttgagcatgaaaccacctgaggccttagccatgtctctagattatgatcctctgtatgtttttaatcccaacccaggattatttgctgtaatgcatcctctgacctatgcagaaacgttgatagattaccatctatgctctcaccccaagtacaaattcaccaaagagtcccgccacgggtccagcattcctgtcacccaaaagcagtttctccatcacacggacattattcccggaataatgcactggaaaagcttccagtccctggttctctcctccctgccggacccctccaagatggagaccacaaagagctgcgattccttcaattcatttatgcttccgatagacgtccctgccatccttgatgccttaccagaagaggacagactagaaacagtagaacgtgagctctgtgagcagaatgtagaagttatgttgactccagaaatgatcaaagtggaattccctatgttgaactacaaggacatcaggaaggagaaagaagtgaaagatcaagcacaaccagcagagaaggccggagagaagctgctcgaggagatgaggaacctgcggggcaaagcactcaacacatacctgattctagaatgaaagtcaccagtaggtcagtcccttccatttgctttccgtgggccactgtggccccttgcgtccatttacatgccagccatctctgcaattaaagtttctggataaaaaaatgaaatgtagaggatgtatatatcttttaagtgataattataaatcttatatttaaaaataaaatggagttaggatgatga

SEQ ID NO: 3909 - DNA, 689 bp, Homo sapiens
  source 1..689: mol_type = unassigned DNA; mol_type = unassigned DNA
gacgctccgagcgggcgccggcgctggcgccggccgaatccggcccgggaaccacctccagggacatgacctttggctctaaaaagaagactccatttttcatgataaaatggcagtggtgaaaacccccagcagaggactaaagaatgctaaagaaccctttaataatgcatcaccccatctcttgaagaacctagtggaggagccgaaaaaaagaaaagaagtacctaatcacctcctagaatcaaaggtttatgcaaaacttgtgaataataaggtcatacaggcaagacctggcataatacattttggaggctatcaagtagaaaaacaacaccaacagattctgttcactgaaaaagctcattggcacgatgtcccctggaattgtcttagacattatttggttgaaatatccctgcccgcaccatcactatgtctgctgactgccttctctgccatccaccacgtggatcacagctcactgctgcctcaaactcctgggctcaagtgatcctcccacctccgcctcccaagtagctgggactacagcatctggtcaatgtttccaatgaagacacacgtgttcatattttacccccgcaaaccaaatactttgagatcaattatgtaagaaaggaacaccacctggtccctggcttgtccctcacggtcaccgttacattttc

SEQ ID NO: 3910 - DNA, 2167 bp, Homo sapiens
  source 1..2167: mol_type = unassigned DNA; mol_type = unassigned DNA
gacgctccgagcgggcgccggcgctggcgccggccgaatccggcccgggaaccacctccagggacatgacctttggctctaaaaagaagactccatttttcatgataaaatggcagtggtgaaaacccccagcagaggactaaagaatgctaaagaaccctttaataatgcatcaccccatctcttgaagaacctagtggaggagccgaaaaaaagaaaagaagtacctaatcacctcctagaatcaacatctggtcaatgtttccaatgaagacacacgtgttcatattttacccccgcaaaccaaatactttgagatcaattatgtaagaaaggaacaccacctggtccctggcttgtccctcacggtcaccgttacattttctccagatgagtggcgatactattatgactgcatccgtgttcactgtaagggagatgacactttgcttgttcctattcatgcctatccagtcatgaactcactagactttccttcatttataaatctgtcaaatgttctacttggtgaaagcaaaacttatgttattcctttgcagtgcagctgccctgtagattttgagttttatatcaccttgattcagtctcatcaagcctttgctattgagccaacatcaggaataattccggctaatgggaagatgactgtgactattaagtttacaccctttcagtatgggactgcacaaataaaaatgcagttatggatttcgcagttcaactctcaaccatacgaatgtgtcttcaccggaacatgctatcccaacatggccttaccattagaagagtttgaaaggttgaataccctttctaagaaagtaaacgttcctccagaaaaagcaatgatgcatataaattttcaccgaccgccagcgaagccgaagcctcagaaggtgaaggaaattgagtaccagaacctcagatttccagtagatttatcgaatccatttgctgtggcaactgttttaaaccaagaaccaggaaaattgaagattaaagaattaagagaagttttggaccagggcactgaaatttcaaaaacgagacagatgaaggaggcactctttgaacagaaagtcagacaggacattcacgaagagatggaaaatcatcttaagtggcaggtgcaccttggtaaagatcctatgtcttttaaacttaaaaaagagcttactgaagagtggcaaaaagcatgtgccaaatataagctagacagaggagatcctattttggatgaggaatttcagcgacttaaaacagaagttagccataaacgggttgttcgcaatcaagaagagaaaatcaaggaatttcatcctacttttgatccactcattaataacacttggctcagcaggtccagggcacaaaaacggtttcaacaagtagcacgcaaggtcatgattcagggacgattattcaatatgctgagtgctgttcgtgaaatggacaaagagagtatactgagaaagattggccaagcaaaacaatcgatagcacaagaggcgaatttcttcaaattcttcctgaggcggatcagtcaggatgattataccagccggttctctgtgtcgcccaaggaggtgctgcccttcgctttcccagactgcagcccaccccaggactccaacgagttggctcctgatggccttggactggtcccaattaagtcttcagaagttcaaatcaagcagagttattccttcttcaatctgcaggttcctcaactgtacaaaattaagagatatcagccattctctgtccacaagtcttcaacaagttacagacctcaaaagcttgcccgagccctaaagcaaggagctgaggatgaagtcaccaccatcacagcccttccgaaacaggactccacaactcagctctctggcaaaacatcagtcttgagcatgaaaccacctgaggccttagccatgtctctagattatgatcctctgtatgtttttgtaagtgacaactggcagaagccttgttttctgtgttcctttatttcagcaattactctataggaaacagagcactcattgggaatattttttctctttggaatttcaagtgttaaacaatatctgacctttaatattgtttgccaacctttattttttggagaatatcagtgattccgtctttt

SEQ ID NO: 3911 - DNA, 779 bp, Homo sapiens
  source 1..779: mol_type = unassigned DNA; mol_type = unassigned DNA
ggcgctggcgccggccgaatccggcccgggaaccacctccaggattcactgcctgtcgcttgatgttgtccgtcttgggagtctgaagctatgggtcttctccagaaaaaacaaaaccgaaaaaacacacaaagatccacactaattaacattccatttcagaggcttcgccgaccagccccatggcctgcgcaagggccccaaggacatgacctttggctctaaaaagaagactccatttttcatgataaaatggcagtggtgaaaacccccagcagaggactaaagaatgctaaagaaccctttaataatgcatcaccccatctcttgaagaacctagtggaggagccgaaaaaaagaaaagaagtacctaatcacctcctagaatcaaaggtttatgcaaaacttgtgaataataaggtcatacaggcaagacctggcataatacattttggaggctatcaagtagaaaaacaacaccaacagattctgcatctggtcaatgtttccaatgaagacacacgtgttcatattttacccccgcaaaccaaatactttgagatcaattatgtaagaaaggaacaccacctggtccctggcttgtccctcacggtcaccgttacattttctccagatgagtggcgatactattatgactgcatccgtgttcactgtaagggagatgacactttgcttgttcctattcatgcctatccagtcatgaactcactagactttccttcatttataaatctgtcaaatgttctacttggtgaaag

SEQ ID NO: 3912 - DNA, 964 bp, Homo sapiens
  source 1..964: mol_type = unassigned DNA; mol_type = unassigned DNA
gctggcgccggccgaatccggcccgggaaccacctccagggacatgacctttggctctaaaaagaagactccatttttcatgataaaatggcagtggtgaaaacccccagcagaggactaaagaatgctaaagaaccctttaataatgcatcaccccatctcttgaagaacctagtggaggagccgaaaaaaagaaaagaagtacctaatcacctcctagaatcaaaggtttatgcaaaacttgtgaataataaggtcatacaggcaagacctggcataatacattttggaggctatcaagtagaaaaacaacaccaacagattctggtgctggctggatctccagtcttgggagtttaggttcctgtcttccttgggaccattcaggaatactggaaaaatggagcgaacccagcagctttgaggacagatctctgttctggtcttctgcccataatgtcgcttgttggaaactgatttaagccagtgagcttatttctaattgtcaggcagatattgagagtctgaccctgacagcatgtgggagtcataggtccactcctcagcagccttgctacaggtggtcggctgcagcgaacaggtctgagaagacactctgcaacacatatgaacacttactagcaagcaggcaaaaagatcattgtgtttgtaatctcacgaagtcccagctgcagttcctagtggggaggctttgatggccgcagcatctggtcaatgtttccaatgaagacacacgtgttcatattttacccccgcaaaccaaatactttgagatcaattatgtaagaaaggaacaccacctggtccctggcttgtccctcacggtcaccgttacattttctccagatgagtggcgatactattatgactgcatccgtgttcactgtaagggagatgacactttgcttgttcctattcatgcctatccagtcatgaactcact

SEQ ID NO: 3913 - DNA, 2801 bp, Homo sapiens
  source 1..2801: mol_type = unassigned DNA; mol_type = unassigned DNA
gctggcgccggccgaatccggcccgggaaccacctccagggacatgacctttggctctaaaaagaagactccatttttcatgataaaatggcagtggtgaaaacccccagcagaggactaaagaatgctaaagaaccctttaataatgcatcaccccatctcttgaagaacctagtggaggagccgaaaaaaagaaaagaagtacctaatcacctcctagaatcaaaggtttatgcaaaacttgtgaataataaggtcatacaggcaagacctggcataatacattttggaggctatcaagtagaaaaacaacaccaacagattctgcatctggtcaatgtttccaatgaagacacacgtgttcatattttacccccgcaaaccaaatactttgagatcaattatgtaagaaaggaacaccacctggtccctggcttgtccctcacggtcaccgttacattttctccagatgagtggcgatactattatgactgcatccgtgttcactgtaagggagatgacactttgcttgttcctattcatgcctatccagtcatgaactcactagactttccttcatttataaatctgtcaaatgttctacttggtgaaagcaaaacttatgttattcctttgcagtgcagctgccctgtagattttgagttttatatcaccttgattcagtctcatcaagcctttgctattgagccaacatcaggaataattccggctaatgggaagatgactgtgactattaagtttacaccctttcagtatgggactgcacaaataaaaatgcagttatggatttcgcagttcaactctcaaccatacgaatgtgtcttcaccggaacatgctatcccaacatggccttaccattagaagagtttgaaaggttgaataccctttctaagaaagtaaacgttcctccagaaaaagcaatgatgcatataaattttcaccgaccgccagcgaagccgaagcctcagaaggtgaaggaaattgagtaccagaacctcagatttccagtagatttatcgaatccatttgctgtggcaactgttttaaaccaagaaccaggaaaattgaagattaaagaattaagagaagttttggaccagggcactgaaatttcaaaaacgagacagatgaaggaggcactctttgaacagaaagtcagacaggacattcacgaagagatggaaaatcatcttaagtggcaggtgcaccttggtaaagatcctatgtcttttaaacttaaaaaagagcttactgaagagtggcaaaaagcatgtgccaaatataagctagacagaggagatcctattttggatgaggaatttcagcgacttaaaacagaagttagccataaacgggttgttcgcaatcaagaagagaaaatcaaggaatttcatcctacttttgatccactcattaataacacttggctcagcaggtccagggcacaaaaacggtttcaacaagtagcacgcaaggtcatgattcagggacgattattcaatatgctgagtgctgttcgtgaaatggacaaagagagtatactgagaaagattggccaagcaaaacaatcgatagcacaagaggcgaatttcttcaaattcttcctgaggcggatcagtcaggatgattataccagccggttctctgtgtcgcccaaggaggtgctgcccttcgctttcccagactgcagcccaccccaggactccaacgagttggctcctgatggccttggactggtcccaattaagtcttcagaagttcaaatcaagcagagttattccttcttcaatctgcaggttcctcaactgtacaaaattaagagatatcagccattctctgtccacaagtcttcaacaagttacagacctcaaaagcttgcccgagccctaaagcaaggagctgaggatgaagtcaccaccatcacagcccttccgaaacaggactccacaactcagctctctggcaaaacatcagtcttgagcatgaaaccacctgaggccttagccatgtctctagattatgatcctctgtatgtttttaatcccaacccaggattatttgctgtaatgcatcctctgacctatgcagaaacgttgatagattaccatctatgctctcaccccaagtacaaattcaccaaagagtcccgccacgggtccagcattcctgtcacccaaaagcagtttctccatcacacggacattattcccggaataatgcactggaaaagcttccagtccctggttctctcctccctgccggacccctccaagatggagaccacaaagagctgcgattccttcaattcatttatgcttccgatagacgtccctgccatccttgatgccttaccagaagaggacagactagaaacagtagaacgtgagctctgtgagcagaatgtagaagttatgttgactccagaaatgatcaaagtggaattccctatgttgaactacaaggacatcaggaaggagaaagaagtgaaagatcaagcacaaccagcagagaaggccggagagaagctgctcgaggagatgaggaacctgcggggcaaagcactcaacacatacctgattctagaatgaaagtcaccagtaggtcagtcccttccatttgctttccgtgggccactgtggccccttgcgtccatttacatgccagccatctctgcaattaaagtttctggataaaaaaatgaaatgtagaggatgtatatatcttttaagtgataattataaatcttatatttaaaaataaaatggagttaggatgatga

SEQ ID NO: 3914 - DNA, 1532 bp, Homo sapiens
  source 1..1532: mol_type = unassigned DNA; mol_type = unassigned DNA
aatccggcccgggaaccacctccagggacatgacctttggctctaaaaagaagactccatttttcatgataaaatggcagtggtgaaaacccccagcagaggactaaagaatgctaaagaaccctttaataatgcatcaccccatctcttgaagaacctagtggaggagccgaaaaaaagaaaagaagtacctaatcacctcctagaatcaaaggtttatgcaaaacttgtgaataataaggtcatacaggcaagacctggcataatacattttggaggctatcaagtagaaaaacaacaccaacagattctgcatctggtcaatgtttccaatgaagacacacgtgttcatattttacccccgcaaaccaaatactttgagatcaattatgtaagaaaggaacaccacctggtccctggcttgtccctcacggtcaccgttacattttctccagatgagtggcgatactattatgactgcatccgtgttcactgtaagggagatgacactttgcttgttcctattcatgcctatccagtcatgaactcactagactttccttcatttataaatctgtcaaatgttctacttggtgaaagtttacccaacagcgtcttcctggtaccagataactagttgaaacttggagcaggtccagttggttgaccagttgctctcccatcaactcattttccttgcaccaagatgactttaaccaattggttagcgtgctctagacaaacctgcctgaaactcacctggggaagtgatgacaaatccaggagaggatccactgtggatctggtggctgaagatctggtaaaatgatgccatgggcaaggccgccatgggctcctgcagcaagtggaccatgtactcatctcaaggctatagaggctctgtagcctgcagggccacattaacaacattcacagaagaggctcctggtgactccattccaaagccaggatactttagcttcttgaacttttatgtcataaggtcagaaatttaccaaaggatgcttttccttacttagtgaatcttatggctccttttagaaagcgtgggaacaaccaaggtcagaatatgatgtttgagtgtaaccaaattctcctactgcccctggagcttaaagcatctgggccacatgggaatgtgcactcttaagctagtgctaagaaggaagattgatggtgagagtttgcccccacgtagacagcccccagtcttgcattgtgccaataaacagtctctaggagagggggctgagaaccagctgtaactgggttaaaatgcagatgtcaggagaagacgatcaaattgatgttcacaagtgttttttgaagccctccctactcggagagaaaaaattcacttttttcagcttgtcaagggaaacactgcttactcatatgagggactcattttatgtgccccaagcttgaagttgatggaaaggagcagcagcattttatgaaagcatctgaccagggtgacgtgagctcacgacatagtcgttctttacttt

SEQ ID NO: 3915 - DNA, 1267 bp, Homo sapiens
  source 1..1267: mol_type = unassigned DNA; mol_type = unassigned DNA
taaagaatgctaaagaaccctttaataatgcatcaccccatctcttgaagaacctagtggaggagccgaaaaaaagaaaagaagtacctaatcacctcctagaatcaaaggtttatgcaaaacttgtgaataataaggtcatacaggcaagacctggcataatacattttggaggctatcaagtagaaaaacaacaccaacagattctgcatctggtcaatgtttccaatgaagacacacgtgttcatattttacccccgcaaaccaaatactttgagatcaattatgtaagaaaggaacaccacctggtccctggcttgtccctcacggtcaccgttacattttctccagatgagtggcgatactattatgactgcatccgtgttcactgtaagggagatgacactttgcttgttcctattcatgcctatccagtcatgaactcactagactttccttcatttataaatctgtcaaatgttctacttggtgaaagaattaggaaacatctcacagagtgaagattgactgcatacctctaacagagcctgatttaagacaggatttgtgagtttggtagacaatcctatgaagttttcattttactgttgactgaagaccatacactgtacggtgacccttattcagaatttttatcagaaacctagggcccctgaacatgagtatataaagtctgatgcaggcctataccctattggggatctcatgtgctcacagtacagctacgctcctctcaaagagacatcatagctaaggaacaatgttttaaaaacaagtaccagtgcaaattaattagaaacagggcactgcctgacgttaggaactctgcattcagagtgtagatctctcaaaagtacagttagagacatctggtcaggatgaagcagtgtgcgcaaactgcaatgaaccttttttgtgcaaaattactagttagtgacaaacaaaatataaagagacctccaaaaagacacactcaggctcagaaacaagctgaacaactccacagagcaggaacagcatagaaatgctgagtgggttgcagggtggagccacaggcttgcaggctccaggttttgaagcagtcaggcagtgttggagaccactccatggggtaaaggagactgcaagtgtctcactgattcaggggatccgcacttggcctgcagccaggagaagaggtaagctgccccacctttgcacttcccacgaaaggaagctggaaaccctctgctgacctgttgcctgg

SEQ ID NO: 3916 - DNA, 589 bp, Homo sapiens
  source 1..589: mol_type = unassigned DNA; mol_type = unassigned DNA
ctttgagatcaattatgtaagaaaggaacaccacctggtccctggcttgtccctcacggtcaccgttacattttctccagatgagtggcgatactattatgactgcatccgtgttcactgtaagcaaaacttatgttattcctttgcagtgcagctgccctgtagattttgagttttatatcaccttgattcagtctcatcaagcctttgctattgagccaacatcaggaataattccggctaatgggaagatgactgtgactattaagtttacaccctttcagtatgggactgcacaaataaaaatgcagttatggatttcgcagttcaactctcaaccatacgaatgtgtcttcaccggaacatgctatcccaacatggccttaccgtatggcgtctttgcagtgtttttgtttatttttaacccttttttgaaaatccaagtcttcctttcttccattctgtctttcttgtaaaagaatgtcatcaaaaacttatttaaaatgatgagccaacataagatatactgtaaaacataacagaaatatagaatatatctatgctagtagcaagagttgcttctgacaag

SEQ ID NO: 3917 - DNA, 759 bp, Homo sapiens
  source 1..759: mol_type = unassigned DNA; mol_type = unassigned DNA
ttcggtgaggccgagctctgtggtagagactgccttttccctatcgctgcaactctggaaaataaacttaacagtactcgagaggtagcaaggacagtggggtgaggagtatggatacccagcacaatcgactacattaaatcatggttctgccactaactatgtcaccttgtgtggaacacttaccctctcttgtgcctcagtttcctcttctgtaagtggggataatcacggcaccacctcataggattaaaatagttaatacatgggaaatgcatggggttactcctggcacacaggaagtgccagatcagcattggcagtcatcattgtttattacgtaacttgagtctccattccttgctaccaaaagaaccagttataaagaaaaataatatttttattttcttttttgtttgttttgcagcaaaacttatgttattcctttgcagtgcagctgccctgtagattttgagttttatatcaccttgattcagtctcatcaagcctttgctattgagccaacatcaggaataattccggctaatgggaagatgactgtgactattaagtttacaccctttcagtatgggactgcacaaataaaaatgcagttatggatttcgcagttcaactctcaaccatacgaatgtgtcttcaccggaacatgctatcccaacatggccttaccgtatggcgtctttgcagtgtttttgtttatttttaacccttttttgaaaatccaagtcttcctttctt

SEQ ID NO: 3918 - DNA, 743 bp, Homo sapiens
  source 1..743: mol_type = unassigned DNA; mol_type = unassigned DNA
gttattcctttgcagtgcagctgccctgtagattttgagttttatatcaccttgattcagtctcatcaagcctttgctattgagccaacatcaggaactagaagcatcatctacgcacaccttccaggcattttatgctgaagtttgccaaatgaaaaaacaatttgaatcaagctattaataattctatttataaggtatgccctcaactttaactcaactggccatccttaagatgcaggtgggctctgtagccgtcaaaagctggacctgctgttgttgggggccaagatattcctgaggctggagaaaatgaataaaggattttatgaccttcctgtactgctgacaagaaatcatatgcaaccaaaacttcaagaacactctgttgataattttggaagagccagcaatgcacgactttggccaagatatttttttttccgtgaaatctgaagagaagtattgaccaagatcttattagcatcggagatcaggcaaatgccacaaaaaaattgttgaacttgtctacttgtcactattttgtgatcctggacattcccttgttgtcacaaatgctagggaagaatgcatctaactcatataaatggtaaattatagcattaagtggctggctaagcaagagttccttgggggctgttgcttagagttcttatataaagtttcaataagttcattctctttttttaattataagaaaaatataagccacttacaaataa

SEQ ID NO: 3919 - DNA, 837 bp, Homo sapiens
  source 1..837: mol_type = unassigned DNA; mol_type = unassigned DNA
aatcctgcaaataaccatcattgaaatcactcgggcaacaaacaagtagaactgaacacaaattttaaaactgctgatttttctggtggcaaataagcagattagaagagtttgaaaggttgaataccctttctaagaaagtaaacgttcctccagaaaaagcaatgatgcatataaattttcaccgaccgccagcgaagccgaagcctcagaaggtgaaggaaattgagtaccagaacctcagatttccagtagatttatcgaatccatttgctgtggcaactgttttaaaccaagaaccaggaaaattgaagattaaagaattaagagaagttttggaccagggcactgaaatttcaaaaacgagacagatgaaggaggcactctttgaacagaaagtcagacaggacattcacgaagagatggaaaatcatcttaagtgctagacagaggagatcctattttggatgaggaatttcagcgacttaaaacagaagttagccataaacgggttgttcgcaatcaagaagagaaaatcaaggaatttcatcctacttttgatccactcattaataacacttggctcagcaggtccagggcacaaaaacggtttcaacaagtagcacgcaaggtcatgattcagggacgattattcaatatgctgagtgctgttcgtgaaatggacaaagagagtatactgagaaagattggccaagcaaaacaatcgatagcacaagaggcgaatttcttcaaattcttcctgaggcggatcagtcaggatgattataccagccggttctctgtgtcgcccaaggaggtgctgcccttcgctttccc

SEQ ID NO: 3920 - DNA, 401 bp, Homo sapiens
  source 1..401: mol_type = unassigned DNA; mol_type = unassigned DNA
aggagatcctattttggatgaggaatttcagcgacttaaaacagaagttagccataaacgggttgttcgcaatcaagaagagaaaatcaaggaatttcatcctacttttgatccactcattaataacacttggctcagcaggtccagggcacaaaaacggtttcaacaagtagcacgcaaggtcatgattcagggacgattattcaatatgctgagtgctgttcgtgaaatggacaaagagagtatactgagaaagattggccaagcaaaacaatcgatagcacaaggtgaagtatggctgcaaagcacagagatgccgagactgatcatgcctctgagcgtgaactttccttagaatgaagttagctctatgcaaataaaaaattttcaccagtcacaaa

SEQ ID NO: 3921 - DNA, 3294 bp, Homo sapiens
  source 1..3294: mol_type = unassigned DNA; mol_type = unassigned DNA
ttcatcctacttttgatccactcattaataacacttggctcagcaggtccagggcacaaaaacggtttcaacaagtagcacgcaaggtcatgattcagggacgattattcaatatgctgagtgctgttcgtgaaatggacaaagagagtatactgagaaagattggccaagcaaaacaatcgatagcacaagaggcgaatttcttcaaattcttcctgaggcggatcagtcaggatgattataccagccggttctctgtgtcgcccaaggaggtgctgcccttcgctttcccagactgcagcccaccccaggactccaacgagttggctcctgatggccttggactggtcccaattaagtcttcagaagttcaaatcaagcagagttattccttcttcaatctgcaggttcctcaactgtacaaaattaagagatatcagccattctctgtccacaagtcttcaacaagttacagacctcaaaagcttgcccgagccctaaagcaaggagctgaggatgaagtcaccaccatcacagcccttccgaaacaggactccacaactcagctctctggcaaaacatcagtcttgagcatgaaaccacctgaggccttagccatgtctctagattatgatcctctgtatgtttttaatcccaacccaggattatttgctgtaatgcatcctctgacctatgcagaaacgttgatagattaccatctatgctctcaccccaagtacaaattcaccaaagagtcccgccacgggtccagcattcctgtcacccaaaagcagtttctccatcacacggacattattcccggaataatgcactggaaaagcttccagtccctggttctctcctccctgccggacccctccaagatggagaccacaaagagctgcgattccttcaattcatttatgcttccgatagacgtccctgccatccttgatgccttaccagaagaggacagactagaaacagtagaacgtgagctctgtgagcagaatgtagaagttatgttgactccagaaatgatcaaagtggaattccctatgttgaactacaaggacatcaggaaggagaaagaagtgaaagatcaagcacaaccagcagagaaggccggagagaagctgctcgaggagatgaggaacctgcggggcaaagcactcaacacatacctgattctagaatgaaagtcaccagtaggttgaaaaggtcgtggccccttggaaagattgtattgactgtgttggggatctggtgccacctggtggttgccacaagaaaggcctctcctgactcccaagttgtaacccgtttccaccaaatcgacttccaaataatatttatcagatcatcatctgtgcttttcttccttgtttcagaccacttttaggtggaaaaggcaaagaaggcttatatgtattttcttccataatgagtccatcagaaaaagttccttcggtgaaatcgttgaccacgtgatgtttggggactccctatgggatcaatcatccgggttccttagagaccatggccataatcaggggctggccaagggaatgagtatccctgggttcaacagctgtttctgaagacctgccagttcccctgtcttgcattaactcgggttatcatgccattctccttctaaggccaaagatacctgtaaccgaagaatcgggatacttcactgcagtcacttcatttttttttcttttgaggcagagtcttgctctgtcacctaggctggagtgcagtggcacaatctcggctcactgcaacctctgcctcccaggttccagcgattctcctgcctcagcctctcaagtagctgggattacagggacccgccaccacgcccggctaatttttctatttttagtacagatggggtttcaccatattggccaggcttgtctcaaactcctgacttcaagtgatccacccgcctcagcctctcaaagtgctgggattacaggcatgagccaccatgcctggccaagcagcttcattttagaagtgattattattgctttcctttctagaacttccggtttgtgaagtattttctcaatgatcctcaaaacattctaagacataaagtagctgttattagtgtgattttatgcagaaactcaggcccagaaagcttcatggacttacccaattagcagaagagccaggtttgggcaggatcttggtttcctgcaaaggtttcgttgcctagccaggcgtggtggtgtgtacctgtagtcccagctacctggggggctggggtgggaggctcacctgagcccaggtagtcaaggctgcagtgagccatgatcctggtacccagtccactcttctctctactacatggtaatcaatgaaaatattacagatttacattttttaactttttatttaaactttcagctttggagtctctaagagtaaagatattatgtgatgatatttgtattttacttaattgcttattctttaaaacatgtaatatagaaaaaaatacaaattagcaaatgtcctttgctctaaagaaatcagctggcaagtttgccccacccagcagcagccatgtcttactcatttctgtatccccagcatgcagcaagatgtttggcacaatgcaggctctcaataaatgttttttgaggctgggtatggtggctcacacctgtagtccctgcactttgggaggctgaggcaggtagatcccttgagcccaggagttcaagaccaccctgggcaacatggtgaaaacctgcctctacaaaaaacacaaaaattggccgggcatggtggcccatgcccagctacttgggaggctgaggtggaaggatcacttgagcctgagaggtcaaggctgcagtaagccgacattatgccaccacactccagcctgggcaacagagcaagaccctgtctcaattttttaaaaattggctaggtgcagtggctcatgtctgtaatcccagcaccttaggagaccgaggtggacggattgcttgagctcaggcattcaagaccagcctgggcaacatggcaaaaccccatctctacaaaaaatacaaaaaagattagccaggtgtgttggtgcacatctgtggtcccagctactggggagggtaagatggaaggatcacttgaccccaggaggctgaggctgcagtgagccaagattgtgccactgcactccagcctgggcaacagagcaagaccctgtctcaaaacaatagcaataatgtttgttgaattaaggaatataaaagaaatgtgaaaact

SEQ ID NO: 3922 - DNA, 440 bp, Homo sapiens
  source 1..440: mol_type = unassigned DNA; mol_type = unassigned DNA
tcttcaatctgcaggttcctcaactgtacaaaattaagagatatcagccattctctgtccacaagtcttcaacaagttacagacctcaaaagcttgcccgagccctaaagcaaggagctgaggatgaagtcaccaccatcacagcccttccgaaacaggactccacaactcagctctctggcaaaacatcagtcttgagcatgaaaccacctgaggccttagccatgtctctagattatgatcctctgtatgtttttacaagctgacatggagtcacagagtgttagtgctagtgggagccacagacagcattagctgatgcctgtcctatgcctggcttagaaactggacattattcccggaataatgcactggaaaagcttccagtccctggttctctcctccctgccggacccctccaagatggagaccacaaagag

SEQ ID NO: 3923 - DNA, 450 bp, Homo sapiens
  source 1..450: mol_type = unassigned DNA; mol_type = unassigned DNA
agtcccgccacgggtccagcattcctgtcacccaaaagcagtttctccatcacacggacattattcccggaataatgcactggaaaagcttccagtccctggttctctcctccctgccggacccctccaagatggagaccacaaagagctgcgattccttcaattcatttatgcttccgatagacgtccctgccatccttgatgccttaccagaagaggacagactagaaacagtagaacggagcacctggatctgctgctgtatctgtgacgacagagtcggggtatagcacaaagaaggccaccagccctgcatgacaagagctccggcacattaggaagactcttggtcccagagttcctccctacccgctatttcctgaactcctgttactgaagacccattcctttagctttgcgctttgtttctattaaactacctctggggag

SEQ ID NO: 3924 - DNA, 545 bp, Homo sapiens
  source 1..545: mol_type = unassigned DNA; mol_type = unassigned DNA
tacctcattcataaagatgaaaaaccagccagcattgactgagcacttagaagacctcacaccaggatctctgtgaataagatctcatttcacctttgctacaatgctgggagatgggaattacaccattcgcacatcaggaaacaggggctgtggattcttgggtaacttgcccatgctcagaaactgatgcagctgaggccagaagccaggtttgaatcattcataagctgagtgttttcactgagaagtgaaagatcaagcacaaccagcagagaaggccggagagaagctgctcgaggagatgaggaacctgcggggcaaagcactcaacacatacctgattctagaatgaaagtcaccagtaggtcagtcccttccatttgctttccgtgggccactgtggccccttgcgtccatttacatgccagccatctctgcaattaaagtttctggataaaaaaatgaaatgtagaggatgtatatatcttttaagtgataattataaatcttatatttaaaaataaaatggagttaggatgatg

SEQ ID NO: 3925 - DNA, 1794 bp, Homo sapiens
  source 1..1794: mol_type = unassigned DNA; mol_type = unassigned DNA
tgtggactgaagaagaaagaaaacaattcaaagattatgagaaaaaagtaaaggagttaaatgaagaaagagataagtatagaaagtcattagaagcagaactgaagaaacttcaaaactctattcaagaaagcacacaggcctttgatgaacatttgaaaagactttttgaaaggagagtgaaggcagagatggttaccaaccaggaggaactgaaaataagtaaccttgcattttctttattgttggatgaagaattaagctctagagaaaaattcctgaacaactaccttacaaggaaacagcacgagaaaagccagacttcagaagctgttcggaaatctagagaagacctggatgtgtgcaaggagcactatgacaacttactggcagaagacaaagttatggatcgcagctttaaaaaggaattttctgaaattcctggtcatcaagtggatatactctacaaactttttaaacgccgaccaaggatttccaaacagaaaacgcactcagaaacaaccagcgttgtccctttcggagaactaccaggatctggcaagttgaataaggatgcctttgcccagttaatgaaagctatggatgagttggacaatattagtaacatgccagaaggcttggaccctttggtctggaatcatttctgcatgacaagacgagcaaaagtggaaaatgaacagaaagtaaagcagaaagcagctgacttattggaaatggcaactttcctccagaagagagttgaggaggaagagaaggtgcaacaggagattgagagagtgttccatgaactcatcctattacaggaagagaaagtgagattccagttgaatttgacaatccaaattcttcttaaacaaggacaagtagaactggaaaatttccagctagtactggagtattctgatgcaattctcatcaacaagaacataattgaagacttgaattctgtgattcggactcaaggacaaaagaaagttgctagcatgatggaaagtaaagatgtacacaaaagaatacttcagattgagtgggaacataagaaaatggagatggaaagggaagatctaaatcagaaggcttgggatattcagatgctatttttttcaagagatcgtcaaaagtacctaaatgaaccaaactatgaggctctgattagtattcagattggaataatggaacaaaccattgctgttttagataagatgcacaaaaagaatgtggaaaactgcaagaaactactcaaaaaacttggaaagttcagcaatcaaaaagatatagcaaattatgccctaagctgcaatctacgagaagagttggtagctgtctcagagagaaaagacatctgtaatgcaatggggtctaaactgacttgtgaaaagattgtcaaagaacggtatgaaaacatgatgcaacagcagaagttaacaaatatttcaaaacaacaagctgaacagatttcaatactacagactgaagttgaaagattaagaatgaaaacatttcctgctcttgttcaaatgtaaaaacgctggcaggaaaacacaaggccaaatcaatcatttaaaaaatcatttcatttgggtaaaatgatttccttttctttcttactgggaaattgaagtagcatgtcctctgagttgcatgttttagataaaaaattgtttaattttagccttaattgtatacaaatttttgtcctgcatgaataaatgtgtaaaataccatgaattgctgtttttattcaagaataaacaagacttgaagtcagaaagt

SEQ ID NO: 3926 - DNA, 3198 bp, Homo sapiens
  source 1..3198: mol_type = unassigned DNA; mol_type = unassigned DNA
gacctggactgctctatctgtcttcacatggattgtggctcataacaatagctaaatgtggaattctgtgtatccgagacgtttatactttggaaacatttgcttggtgtcggagtcattctcaccagggtcatgggattcagtcaatgagaatttcaatggatggacaaaacattctggtgaatgggagagatgatggcacccttgtctacctaaagtggaagcgatttggaggacacctagccagtgaaattctggactattaccagaaactattaatttccctgagcagcgccatggacaaggagaatcattatttaagcacaacaccaaaagtttccgtagatttgggatccgattctgaacacacaaaacagaaggcaagcactgacttatcacaagatgaattagttctaaccgatgttaagaaggaaattccttggatacaacaaaaaagccaagaggccatcaaaaaggaggttaatctgttttccaagaaaaggaaagagataaaacaaggaatcaaatcactttccaaaactattctgaatatgatggaagaaaatgacaaactagaaaatattgcaaaattagaccaacaggaatttggtctggatcttgaggaactagaaaggcttcatgatgaaagtcaggaagaagtggcaaagatgataaaggatgtagagatgcataacttagccaagagctatttggctgaacttatcaaagaagaatgttggaattcgatggctgtgaaaggtcgagctcttaagtgttttcatatcccctgtgtggttgaaaacttcccgatgaaagcgcgcacggttgaagagctgaaagaattggaaagagttttacagcaaaagaagattgaagcagagtgtcttaaactacggaaggaaattgtagaggctcagtctggagttaagttgattaaacagcgtcatgaagaggatgatgaagaagaggaagaggaagacaagacagtaaaatatagcaatttgcccaattacctgcttggtagtctgagtactgattttggggtagatacctctttattgtcaagccaattggagcttcattccagagaagagaaaatcaaccaaattatattattgaaagatatcatttacaaggtaaaaactgttttcaataatgagtttgacgctgcatataaacaaaaagagtttgaaattgcacgcgtgaaggaaagaaatgttcgaattcgagaaattattttagatctggaattggaagaagcagtctggcaaccagaatttgaagactgtgagaagccagagagaacgcttgttgtgcaagatgaggagattacagcccacaaacacattaagccgtggcacaaagccaaagaattgatcgtgaatcatgaaaaggagcactggcttctgatacaggatgccagtacaagactccgagctctgatggacatgatgggaggagttctggaagtcaagaaggaagatattttgagaatggtgattcctcaacctgctttcatggcaaaacctgatgctgtgtggactgaagaagaaagaaaacaattcaaagattatgagaaaaaagtaaaggagttaaatgaagaaagagataagtatagaaagtcattagaagcagaactgaagaaacttcaaaactctattcaagaaagcacacaggcctttgatgaacatttgaaaagactttttgaaaggagagtgaaggcagagatggttaccaaccaggaggaactgaaaataagtaaccttgcattttctttattgttggatgaagaattaagctctagagaaaaattcctgaacaactaccttacaaggaaacagcacgagaaagttatggatcgcagctttaaaaaggaattttctgaaattcctggtcatcaagtggatatactctacaaactttttaaacgccgaccaaggatttccaaacagaaaacgcactcagaaacaaccagcgttgtccctttcggagaactaccaggatctggcaagttgaataaggatgcctttgcccagttaatgaaagctatggatgagttggacaatattagtaacatgccagaaggcttggaccctttggtctggaatcatttctgcatgacaagacgagcaaaagtggaaaatgaacagaaagtaaagcagaaagcagctgacttattggaaatggcaactttcctccagaagagagttgaggaggaagagaaggtgcaacaggagattgagagagtgttccatgaactcatcctattacaggaagagaaagtgagattccagttgaatttgacaatccaaattcttcttaaacaaggacaagtagaactggaaaatttccagctagtactggagtattctgatgcaattctcatcaacaagaacataattgaagacttgaattctgtgattcggactcaaggacaaaagaaagttgctagcatgatggaaagtaaagatgtacacaaaagaatacttcagattgagtgggaacataagaaaatggagatggaaagggaagatctaaatcagaaggcttgggatattcagatgctatttttttcaagagatcgtcaaaagtacctaaatgaaccaaactatgaggctctgattagtattcagattggaataatggaacaaaccattgctgttttagataagatgcacaaaaagaatgtggaaaactgcaagaaactactcaaaaaacttggaaagttcagcaatcaaaaagatatagcaaattatgccctaagctgcaatctacgagaagagttggtagctgtctcagagagaaaagacatctgtaatgcaatggggtctaaactgacttgtgaaaagattgtcaaagaacggtatgaaaacatgatgcaacagcagaagttaacaaatatttcaaaacaacaagctgaacagatttcaatactacagactgaagttgaaagattaagaatgaaaacatttcctgctcttgttcaaatgtaaaaacgctggcaggaaaacacaaggccaaatcaatcatttaaaaaatcatttcatttgggtaaaatgatttccttttctttcttactgggaaattgaagtagcatgtcctctgagttgcatgttttagataaaaaattgtttaattttagccttaattgtatacaaatttttgtcctgcatgaataaatgtgtaaaataccatgaa

SEQ ID NO: 3927 - DNA, 526 bp, Homo sapiens
  source 1..526: mol_type = unassigned DNA; mol_type = unassigned DNA
caggagattgagagagtgttccatgaactcatcctattacaggaagagaaagtgagattccagttgaatttgacaatccaaattcttcttaaacaaggacaagtagaactggaaaatttccagctagtactggagtattctgatgcaattctcatcaacaagaacataattgaagacttgaattctgtgattcggactcaaggacaaaagaaagttgctagcatgatggaaagtaaagatgtacacaaaagaatacttcagattgagtgggaacataagaaaatggagatggaaagggaagatctaaatcagaaggcttgggatattcagatgctatttttttcaagagatcgtcaaaaggtaaattctccctacccccctacatagttttaattttattcattaatgtattcattcatttaaccagtatttaataagaagcctctgtgatatcaagcatattctaagccaggagtgtttcaaaatatatctgtgagttatttttcttccaacagtttacatttgc

SEQ ID NO: 3928 - DNA, 2963 bp, Homo sapiens
  source 1..2963: mol_type = unassigned DNA; mol_type = unassigned DNA
acgggtgtacacagcagcggcgtcgcggcccgcagccccgcggcggcggaaaggtaaccgacccgccctggggtgctgcgtgcgctgcctgctcccgcctgaggaaaacactgcccatggcgcaaggccgggagcgcgacgaaggcccccactccgccggcggcgcgtccttgtccgtgagatgggtgcaaggattccctaagcagaatgttcattttgtcaacgacaacaccatttgctacccttgtgggaattatgtaatatttattaatattgaaaccaagaaaaagactgtactgcagtgtagtaatggaattgtgggcgtcatggcaactaacatcccctgtgaagttgtggctttttctgaccggaagctaaaacctctcatctacgtatacagctttccaggattgaccagaaggaccaaattgaaaggcaacattctcctggactacactttactttcattcagttactgtggcacctacctggctagttactcctctctcccagaatttgaactggccctttggaactgggaatcgagtatcattttgtgtaagaaatcacagcctggaatggatgtgaaccaaatgtcttttaaccccatgaactggcgccagctgtgcttatcaagtccaagtacagtgagcgtgtggaccattgaaagaagtaaccaggagcattgtttcagagcaaggtcggtgaaattacctctagaagatgggtcattttttaatgaaacggatgtcgttttcccccagtcgttgccgaaagatctcatctatggtcccgtgctgccactgtcagccattgccgggctggtaggcaaagaggcagagactttccggccgaaagatgatctatatcctttgcttcacccgactatgcattgctggactccaacaagtgacttgtacattggctgtgaagagggtcatcttttaatgattaatggagacaccttgcaagtgactgtacttaataagatagaagaggaatcgccattggaagacagaagaaattttatcagtccagtaaccttggtatatcagaaggagggcgtgctggcttctggaattgatggctttgtgtattcttttattattaaagatagaagttacatgatcgaggattttcttgagattgaaagacctgtagaacatatgacattttctcccaattatacagtgttgctgattcaaacagacaagggatctgtttatatctacacttttggtaaggagccaaccttaaataaagtcctagatgcttgtgatgggaaatttcaggcaattgactttatcacacctggaacccaatacttcatgacacttacatattcaggggaaatttgtgtttggtggctggaggattgtgcttgtgtaagcaagatttatctgaataccctagcaacggttctggcttgctgtccatcctccctctctgcagccgtgggcacggaggatggctcggtctacttcatcagcgtatatgataaggaatcccctcaggtcgtgcacaaggcctttctctcggaatcgtccgtgcagcacgtcgtttatgatcagcaaggaatatttctgttagttggaacagcagaaggaaaagtctttattatcaatgccaactcctcaagctcatttcagattattggattcacagaggtggccaaagacattttacagatatccacagtgtctcttttagaaacagacatagtggaagtgatggtgctttcctcgcttccagaagcagggagaagcaggttggagatgttcacactgcctacattactgccacaagtttccacaacctttgctgatgaaagaggaaggctgaaagatgaaatcattcataagtacctgtatgagttggagcacgctctgtcctctgcagtcttgggctttcaaagtaaccaaatatatggcttctgtagtcaagtgccatacatctgtagctaccttcttcctgaagaagaacataccggtatctacattcttaaaccatacaaaaaagtacaaagcagacagtatggacctggactgctctatctgtcttcacatggattgtggctcataacaatagctaaatgtggaattctgtgtatccgagacgtttatactttggaaacatttgcttggtgtcggagtcattctcaccagggtcatgggattcagtcaatgagaatttcaatggatggacaaaacattctggtgaatgggagagatgatggcacccttgtctacctaaagtggaagcgatttggaggacacctagccagtgaaattctggactattaccagaaactattaatttccctgagcagcgccatggacaaggagaatcattatttaagcacaacaccaaaagtttccgtagatttgggatccgattctgaacacacaaaacagaaggcaagcactgacttatcacaagatgaattagttctaaccgatgttaagaaggaaattccttggatacaacaaaaaagccaagaggccatcaaaaaggaggttaatctgttttccaagaaaaggaaagagataaaacaaggaatcaaatcactttccaaaactattctgaatatgatggaagaaaatgacaaactagaaaatattgcaaaattagaccaacaggaatttggtctggatcttgaggaactagaaaggcttcatgatgaaagtcaggaagaagtggcaaagatgataaaggatgtagagatgcataacttagccaagagctatttggctgaacttatcaaagaagaatgttggaattcgatggctgtgaaaggtcgagctcttaagtgttttcatatcccctgtgtggttgaaaacttcccgatgaaagcgcgcacggttgaagagctgaaagaattggaaagagttttacagcaaaagaagattgaagcagagtgtcttaaagtactattttaaatatacatgtgtttatataagtga

SEQ ID NO: 3929 - DNA, 2876 bp, Homo sapiens
  source 1..2876: mol_type = unassigned DNA; mol_type = unassigned DNA
ccgacccgccctggggtgctgcgtgcgctgcctgctcccgcctgaggaaaacactgcccatggcgcaaggccgggagcgcgacgaaggcccccactccgccggcggcgcgtccttgtccgtgagatgggtgcaaggattccctaagcagaatgttcattttgtcaacgacaacaccatttgctacccttgtgggaattatgtaatatttattaatattgaaaccaagaaaaagactgtactgcagtgtagtaatggaattgtgggcgtcatggcaactaacatcccctgtgaagttgtggctttttctgaccggaagctaaaacctctcatctacgtatacagctttccaggattgaccagaaggaccaaattgaaaggcaacattctcctggactacactttactttcattcagttactgtggcacctacctggctagttactcctctctcccagaatttgaactggccctttggaactgggaatcgagtatcattttgtgtaagaaatcacagcctggaatggatgtgaaccaaatgtcttttaaccccatgaactggcgccagctgtgcttatcaagtccaagtacagtgagcgtgtggaccattgaaagaagtaaccaggagcattgtttcagagcaaggtcggtgaaattacctctagaagatgggtcattttttaatgaaacggatgtcgttttcccccagtcgttgccgaaagatctcatctatggtcccgtgctgccactgtcagccattgccgggctggtaggcaaagaggcagagactttccggccgaaagatgatctatatcctttgcttcacccgactatgcattgctggactccaacaagtgacttgtacattggctgtgaagagggtcatcttttaatgattaatggagacaccttgcaagtgactgtacttaataagatagaagaggaatcgccattggaagacagaagaaattttatcagtccagtaaccttggtatatcagaaggagggcgtgctggcttctggaattgatggctttgtgtattcttttattattaaagatagaagttacatgatcgaggattttcttgagattgaaagacctgtagaacatatgacattttctcccaattatacagtgttgctgattcaaacagacaagggatctgtttatatctacacttttggtaaggagccaaccttaaataaagtcctagatgcttgtgatgggaaatttcaggcaattgactttatcacacctggaacccaatacttcatgacacttacatattcaggggaaatttgtgtttggtggctggaggattgtgcttgtgtaagcaagatttatctgaataccctagcaacggttctggcttgctgtccatcctccctctctgcagccgtgggcacggaggatggctcggtctacttcatcagcgtatatgataaggaatcccctcaggtcgtgcacaaggcctttctctcggaatcgtccgtgcagcacgtcgtgtaagtcctttctgcctccaggagcggctccgtgtcacacccgtctgttgaaaattctagtgaagccatcctttcttttaattttaagttttacgtgtttcatttgttttgaatgttaatatattcacacagttcaacactcaaaaggtacagagggctgtgtagtaaagtaccccccatacccaggtctgtccttgcaggcagcctggtaccaatttctcatgtctctcctgagatgttttatccatgaacaagcaaaacataataagcacttctttttacttgtatcaatggccatcatgtgtgtatagtgtgccaggcacttctgctgtattaactccatgaggtaaacactcttgttgtctctatttgacaggtgaggaagataaggcacaaggattttaaataacttgctcaatagtacacagatagtgaatggcaaatgttgggatttgaacccaggtagttgggctgcagagtcactgcctttgctcttaaaaggagaaaactatgtacaatgcctcatttcttttttcacttaatcgtatatcttggagaatgttttatatccacacataaagaccagcctgattatttgtatagccacatagtattccattatatgaatatactatcattttttaaaaacggtatattaatgaacatttagagtatttcaaaacttttgaagcaatacttttaagatgataatatagagacattagatttggacttgtaggtgctatcattattactgtttctttttaatttattatattattaggtattaataagaacagacatttgtattctgctttacagcttgagatcactgtagcttgtggcatgtgatcctcaaaacaccagtcagaaaggtgttattcttatccctattagacaaattagggaattcagggttagagaggtgaggaaaagcattgtccaagattacacattacacagctagcacactgaggagctggccctgccactgtggactgcccagctccaccaccctagctcagtggggaaggatggataacctccttccatttaccccctgcctttctgcactgtcatttttttgtgcctttcctttctcagatcctcttattctaatttacatcttcccactttttctaatttgataaagttgtagacatgtttcactacattcttcctcccactgccaggtaccagacacagggtaatgaaatgtcacacccaccactaatttgagaattgcttatttgcgcttgaaacatcaagaaagctctaccgacagacatgtttcattcacttatgatgaaccaactgcccatctttactgaatcttcttgactgtatttattaaagttgcaatttggaaata

SEQ ID NO: 3930 - DNA, 1434 bp, Homo sapiens
  source 1..1434: mol_type = unassigned DNA; mol_type = unassigned DNA
tcgcggcccgcagccccgcggcggcggaaaggtaaccgacccgccctggggtgctgcgtgcgctgcctgctcccgcctgaggaaaacactgcccatggcgcaaggccgggagcgcgacgaaggcccccactccgccggcggcgcgtccttgtccgtgagatgggtgcaaggattccctaagcagaatgttcattttgtcaacgacaacaccatttgctacccttgtgggaattatgtaatatttattaatattgaaaccaagaaaaagactgtactgcagtgtagtaatggaattgtgggcgtcatggcaactaacatcccctgtgaagttgtggctttttctgaccggaagctaaaacctctcatctacgtatacagctttccaggattgaccagaaggaccaaattgaaaggcaacattctcctggactacactttactttcattcagttactgtggcacctacctggctagttactcctctctcccagaatttgaactggccctttggaactgggaatcgagtatcattttgtgtaagaaatcacagcctggaatggatgtgaaccaaatgtcttttaaccccatgaactggcgccagctgtgcttatcaagtccaagtacagtgagcgtgtggaccattgaaagaagtaaccaggagcattgtttcagagcaaggtcggtgaaattacctctagaagatgggtcattttttaatgaaacggatgtcgttttcccccagtcgttgccgaaagatctcatctatggtcccgtgctgccactgtcagccattgccgggctggtaggcaaagaggcagagactttccggccgaaagatgatctatatcctttgcttcacccgactatgcattgctggactccaacaagtgacttgtacattggctgtgaagagggtcatcttttaatgattaatggagacaccttgcaagtgactgtacttaataagatagaagaggaatcgccattggaagacagaagaaattttatcagtccagtaaccttggtatatcagaaggagggcgtgctggcttctggaattgatggctttgtgtattcttttattattaaagatagaagttacatgatcgaggattttcttgagattgaaagacctgtagaacatatgacattttctcccaattatacagtgttgctgattcaaacagacaaggtatgttggatggtaatttcttgatatgtgattttcagatagtattattatcatcattacatgacaggaatgaggagcagagtatgctgcacagtggtactctacttgtcaagactctaggttgtaaatgaaaaaatacccaatttaaaaggcctaaattacaaagagctattggtttatttttgtgcatgtaactgaaagggcaaggagtgaatctgaataaaagagctaccatgatgcca

SEQ ID NO: 3931 - DNA, 5365 bp, Homo sapiens
  source 1..5365: mol_type = unassigned DNA; mol_type = unassigned DNA
acgggtgtacacagcagcggcgtcgcggcccgcagccccgcggcggcggaaaggtaaccgacccgccctggggtgctgcgtgcgctgcctgctcccgcctgaggaaaacactgcccatggcgcaaggccgggagcgcgacgaaggcccccactccgccggcggcgcgtccttgtccgtgagatgggtgcaaggattccctaagcagaatgttcattttgtcaacgacaacaccatttgctacccttgtgggaattatgtaatatttattaatattgaaaccaagaaaaagactgtactgcagtgtagtaatggaattgtgggcgtcatggcaactaacatcccctgtgaagttgtggctttttctgaccggaagctaaaacctctcatctacgtatacagctttccaggattgaccagaaggaccaaattgaaaggcaacattctcctggactacactttactttcattcagttactgtggcacctacctggctagttactcctctctcccagaatttgaactggccctttggaactgggaatcgagtatcattttgtgtaagaaatcacagcctggaatggatgtgaaccaaatgtcttttaaccccatgaactggcgccagctgtgcttatcaagtccaagtacagtgagcgtgtggaccattgaaagaagtaaccaggagcattgtttcagagcaaggtcggtgaaattacctctagaagatgggtcattttttaatgaaacggatgtcgttttcccccagtcgttgccgaaagatctcatctatggtcccgtgctgccactgtcagccattgccgggctggtaggcaaagaggcagagactttccggccgaaagatgatctatatcctttgcttcacccgactatgcattgctggactccaacaagtgacttgtacattggctgtgaagagggtcatcttttaatgattaatggagacaccttgcaagtgactgtacttaataagatagaagaggaatcgccattggacagaagaaattttatcagtccagtaaccttggtatatcagaaggagggcgtgctggcttctggaattgatggctttgtgtattcttttattattaaagatagaagttacatgatcgaggattttcttgagattgaaagacctgtagaacatatgacattttctcccaattatacagtgttgctgattcaaacagacaagggatctgtttatatctacacttttggtaaggagccaaccttaaataaagtcctagatgcttgtgatgggaaatttcaggcaattgactttatcacacctggaacccaatacttcatgacacttacatattcaggggaaatttgtgtttggtggctggaggattgtgcttgtgtaagcaagatttatctgaataccctagcaacggttctggcttgctgtccatcctccctctctgcagccgtgggcacggaggatggctcggtctacttcatcagcgtatatgataaggaatcccctcaggtcgtgcacaaggcctttctctcggaatcgtccgtgcagcacgtcgtttatgatcagcaaggaatatttctgttagttggaacagcagaaggaaaagtctttattatcaatgccaactcctcaagctcatttcagattattggattcacagaggtggccaaagacattttacagatatccacagtgtctcttttagaaacagacatagtggaagtgatggtgctttcctcgcttccagaagcagggagaagcaggttggagatgttcacactgcctacattactgccacaagtttccacaacctttgctgatgaaagaggaaggctgaaagatgaaatcattcataagtacctgtatgagttggagcacgctctgtcctctgcagtcttgggctttcaaagtaaccaaatatatggcttctgtagtcaagtgccatacatctgtagctaccttcttcctgaagaagaacataccggtatctacattcttaaaccatacaaaaaagtacaaagcagacagtatggacctggactgctctatctgtcttcacatggattgtggctcataacaatagctaaatgtggaattctgtgtatccgagacgtttatactttggaaacatttgcttggtgtcggagtcattctcaccagggtcatgggattcagtcaatgagaatttcaatggatggacaaaacattctggtgaatgggagagatgatggcacccttgtctacctaaagtggaagcgatttggaggacacctagccagtgaaattctggactattaccagaaactattaatttccctgagcagcgccatggacaaggagaatcattatttaagcacaacaccaaaagtttccgtagatttgggatccgattctgaacacacaaaacagaaggcaagcactgacttatcacaagatgaattagttctaaccgatgttaagaaggaaattccttggatacaacaaaaaagccaagaggccatcaaaaaggaggttaatctgttttccaagaaaaggaaagagataaaacaaggaatcaaatcactttccaaaactattctgaatatgatggaagaaaatgacaaactagaaaatattgcaaaattagaccaacaggaatttggtctggatcttgaggaactagaaaggcttcatgatgaaagtcaggaagaagtggcaaagatgataaaggatgtagagatgcataacttagccaagagctatttggctgaacttatcaaagaagaatgttggaattcgatggctgtgaaaggtcgagctcttaagtgttttcatatcccctgtgtggttgaaaacttcccgatgaaagcgcgcacggttgaagagctgaaagaattggaaagagttttacagcaaaagaagattgaagcagagtgtcttaaactacggaaggaaattgtagaggctcagtctggagttaagttgattaaacagcgtcatgaagaggatgatgaagaagaggaagaggaagacaagacagtaaaatatagcaatttgcccaattacctgcttggtagtctgagtactgattttggggtagatacctctttattgtcaagccaattggagcttcattccagagaagagaaaatcaaccaaattatattattgaaagatatcatttacaaggtaaaaactgttttcaataatgagtttgacgctgcatataaacaaaaagagtttgaaattgcacgcgtgaaggaaagaaatgttcgaattcgagaaattattttagatctggaattggaagaagcagtctggcaaccagaatttgaagactgtgagaagccagagagaacgcttgttgtgcaagatgaggagattacagcccacaaacacattaagccgtggcacaaagccaaagaattgatcgtgaatcatgaaaaggagcactggcttctgatacaggatgccagtacaagactccgagctctgatggacatgatgggaggagttctggaagtcaagaaggaagatattttgagaatggtgattcctcaacctgctttcatggcaaaacctgatgctgtgtggactgaagaagaaagaaaacaattcaaagattatgagaaaaaagtaaaggagttaaatgaagaaagagataagtatagaaagtcattagaagcagaactgaagaaacttcaaaactctattcaagaaagcacacaggcctttgatgaacatttgaaaagactttttgaaaggagagtgaaggcagagatggttaccaaccaggaggaactgaaaataagtaaccttgcattttctttattgttggatgaagaattaagctctagagaaaaattcctgaacaactaccttacaaggaaacagcacgagaaaagccagacttcagaagctgttcggaaatctagagaagacctggatgtgtgcaaggagcactatgacaacttactggcagaagacaaagttatggatcgcagctttaaaaaggaattttctgaaattcctggtcatcaagtggatatactctacaaactttttaaacgccgaccaaggatttccaaacagaaaacgcactcagaaacaaccagcgttgtccctttcggagaactaccaggatctggcaagttgaataaggatgcctttgcccagttaatgaaagctatggatgagttggacaatattagtaacatgccagaaggcttggaccctttggtctggaatcatttctgcatgacaagacgagcaaaagtggaaaatgaacagaaagtaaagcagaaagcagctgacttattggaaatggcaactttcctccagaagagagttgaggaggaagagaaggtgcaacaggagattgagagagtgttccatgaactcatcctattacaggaagagaaagtgagattccagttgaatttgacaatccaaattcttcttaaacaaggacaagtagaactggaaaatttccagctagtactggagtattctgatgcaattctcatcaacaagaacataattgaagacttgaattctgtgattcggactcaaggacaaaagaaagttgctagcatgatggaaagtaaagatgtacacaaaagaatacttcagattgagtgggaacataagaaaatggagatggaaagggaagatctaaatcagaaggcttgggatattcagatgctatttttttcaagagatcgtcaaaagtacctaaatgaaccaaactatgaggctctgattagtattcagattggaataatggaacaaaccattgctgttttagataagatgcacaaaaagaatgtggaaaactgcaagaaactactcaaaaaacttggaaagttcagcaatcaaaaagatatagcaaattatgccctaagctgcaatctacgagaagagttggtagctgtctcagagagaaaagacatctgtaatgcaatggggtctaaactgacttgtgaaaagattgtcaaagaacggtatgaaaacatgatgcaacagcagaagttaacaaatatttcaaaacaacaagctgaacagatttcaatactacagactgaagttgaaagattaagaatgaaaacatttcctgctcttgttcaaatgtaaaaacgctggcaggaaaacacaaggccaaatcaatcatttaaaaaatcatttcatttgggtaaaatgatttccttttctttcttactgggaaattgaagtagcatgtcctctgagttgcatgttttagataaaaaattgtttaattttagccttaattgtatacaaatttttgtcctgcatgaataaatgtgtaaaataccatgaattgctgtttttattcaagaataaacaagacttgaagtcagaaagta

SEQ ID NO: 3932 - DNA, 8278 bp, Homo sapiens
  source 1..8278: mol_type = unassigned DNA; mol_type = unassigned DNA
caaccgtggccgggtcctcgcggctggagaacccaaccgacagtgggcggcaggacgcaccgcggaccccggagagagcggacgagcagggcgccggcgccatggacctggtcatcacgcaggagctggcccgcgccgagagccagcaagatgctgcgtccttgaagaaggcctacgagttgatcaaatcggccaacctagggaaatcggagtttgacccctcagagagcttcagcccagacctgtttgttctgtgtgcagagcaggccctgaagatgaggcagccagaggtgagcgaggactgcatccaaatgtacttcaaggtgaaggcgcccatcacccagtttctgggccgagcgcacctgtgcagggcccagatgtgtgccccgaagtcggcagaaaacctggaggaatttgaaaattgcgtgactgagtacatgaaggccataaactttgccaaaggagaaccgaggtactactttttggtgtacaatgcatcagtcctctactggcagatggtgaggccgttcctcaagcctggatatcgtcaccatctgatccccagcctttcccaaatcataaacgtgctgagtcagactgaggaggaagacaaggagtggcgtgctgagctgatgctggaacttctggagtgttatctgcaagccggaagaaaggaggaggctgccaggttctgctccacggcagctccgttcattaagtctcacgtgccacagaaataccggcagatattctctgttatggttcgtcatgaattaatggacgaacttcagttaaaggaagaaaagaaaaattccattagcctgtcagtcactttctatattaatatgctaaaggcaaaagcggagcaaaatgatttaccaggtgacatcagtgtcattctgaggaaggcctacagacacttaggtcattacaaccaccagcgctttccctctatcagtgaagaaaaaatgcttttgctttttgaattggcgcgtttttccttgaccttgaaatgcatggagatctcctctgcctgcctctcagacctgaagaagatggaaagcaaagatcctgggaagcttattgaaatggaatgtctggagtgtgaatcggaagctttaagacttgaaagtaagatgaaagtgtacaaccgagcggctgttgaggcccagctggatatcatacagaggctagacgtcgcgctgcagcgagccgtgcgcctgggcgacccccgggtcatccacgtggtgtgcgccacgcagtggaacacctgcctgcccctgctgcagcacaacctgcggcaccacctgcggaagcccctggctggcgttgcggacgtgctggagaagctggacagcctcatgacgcttctccgctgtcaagtgcacatggagatggcgcagatcgaggaggacgaggaccggctggagcccgccacggagcacctccggaaagccgcgcgcctggacagcctgggcctctaccgggacaggatccagatggcctccacccggctgcgtctgtgcaccacgctataccaggcccctgagcgcgcagaggacaaggccatcatggccgttgagcaggcaaaaaaagctacaccaaaggacagcgtcaggaagaagcgggccctcctggtgaatgcaggcctggccttagcccctgacgcgtttcagattgtgctggacagtgagaatgaggccaaagtctccaccgggaagaacaggggccggttcacctacctctgtgcgaaggcgtggcaccacaccgtcagcgtggacaaagctgccgggcacctgcggcgcctgggcaacgaaaacgacaaggagaggatacagatttgggcagagctggccaaagtggcccggaaacaaggcgtgtgggacgtctgtcggacggcgagccgcttctgcctcctgtatgacaacgtcaaggtgaagaagttgaggctgcggcgagggaagaagaagcgaggtagggacggctcggtgcaggacacctggagccagcctgaggtcgtcctgcagaggcaggtgtgccccgacctgctgcggaagttcgcggaggtggggttcatccatgctgaggccacggttcatttgctgcggtcagaaggtgtagagctgaatgaccgggccatcccccccgaagacctgagccagcacccagctggctacgtgcctgagcccccggaggtgaatgctgagtggatcacatacagaacctggatcgagagtctgtcccggtgtgccatgaataactggctgcgctccgcagagatcggacaggagatccaggaggcgtggattgtgcagaacgccgtggtctacgtcctgaaccacaaccaccacctgatcctggccgggcggcagaaggagctggtggacgccctgtaccacctcctgagcatcgttaaggccacaggccacagtggggaccccgtgatgctggtgacgctctgcaacaccttggcgcgaggcctgatcatcagctggattccagtccaggctgccgagaagtccaggaaattcatgcgaccaaacgcgtttcacagcccactggacgcaggagccacttccgagatcaaaacagcggtggaggtctgcgagtttgccctgaacctgaccaatgggagtgcgcccgaggagacggtgcccaccggcacccggcagcagcttatcgccacctgggtcaaggccaagcagctgctgcagcagcagattgggccacggctgggcaccgaggagcagggcaccaatgaggatgtcagctcggtgaccagagtcctcgttgccttggaaatgtactcatgcaacgggctgggcctcatggacttcactgtcccctccctggcccagttggtgaaaatggcttccgagtgcaactggtcggaccccctggtggagctgcagaccctgacgcggctgacccacttcgcccatgcagcgcgtgaccatgagaccaccatggcctgtgctcacagggctctggagatgggcatcaagtacctgaagaaatttgggcccgaggagtcccggctggtggcagagatgctgtgcacagccacggccatccagggcaggagcatcatggaaaacctgaagggccggaagcagctgcgactggtggcagccaaggccttcacggagagcgccaggttcggaggcatcgcgggcagcagcgccctggtgatgctggccgcgcggcattactggaacgcctggctcccactgctgtcctcagccgtctacaggaagaaggccaagggtgccctgaagaggctcatcggcatcatcaacaagacagaggccagaaagcaggagaaaggaaagacgctgcttctgcaccagtggcccacggccgacttccagggtggcgggacgaccgaaggatattttcttccaggggctgaggacgacctggcgctccgtgctgcgctctacggcctgctcttccacagccatgccgaccaggacgactgggagggcggcctcaaggtgctggacgaggctgtgcaggtgctgccaaggacggcccaccgcctcttgatcttcaagcacatggtcatcgtgaaggccaagctcgggcagaatttttcgatggaaatacagaaattcaaggccgagagtgaggactacttggcgcgcatgtggcaccgcctggccctgaactcgccgagcgtgtctggagagctggcctgctacaacaacgccatccaggccttgcagaagcctgagatggagtggcagaaggtggagtacctcatggagttcggccagtggctccatcacagacactttcctctcgaggacgtggtcttccacctccgctgggctgtcgagatcctgctggccatgaagccgcccggcgatgtccctgagccacagcccacgccggatggggagtacgtggctgtggagatgcccccacggagccccgtgtccgaggccgaggaggcggtgtccttggagcagctgcgtagcgtgcggcagctggaggcgctggcccgcgtgcacatcctgctggccctggtgctgtcgccgggcgccgagggctacgaggactgctgccttgcagcctacgccttcttcaggcacatctggcaggtttctttgatgacagcaggaaaatcagttctggaaaacagacccctggcagcaaccagctcacatctgttattgcctaaaaaagagaaggagaatgagaggagtaaagagaaggagaaggagaggagtaaagagaaggagaatgagaggagtaaagagaaggacaaggagaagggaaaggaggagaaagtcaaggagcccaagcagtctcaaagcccagctcctatcaaacaactggaagacttacccatgagcatagaagagtgggcttcctactcctgccccgaggaagtgctgtctgtactgaaacaggacagaagtgactctactgtgaacccctcaagtatccagaagccgacatacagtttgtatttcctggaccacctggtcaaggccctgcagaagatgtgcctgcacgaactcacggttcccgtcctgcagttgggggtgctgatttcggactccgtggtgggaagcaagggcctgtcggatctctaccaccttcgcctcgcccacgcgtgctccgagctgaagctgagagaagcagccgcgcgccatgaagaggcggtcgggcaggtgtgcgtcagcgagctggagcaggccagctgcagaaaagagatcgcgttgaaaaaagagaaaaataaggagcctttattagaagaaagcctgccagcactgaatgagcagacacttcctgtccagcctggggagatcaaaccactggacgccaaggacaagattttgaagatgaatggggagaccgggagggacctggatgggacgtcctttccccacctgtggatgctgaaggcagaagttctgctggagatgaacctgtaccagcctgcacggctgctcctgtcggaggcttacctggctttccaggagctggatgagccttgtgcagaggcccagtgcctgctcctcctcgcacagttggccaacaaggagaaaaactatggacaagccaagaaaatgatcgcacaggcccagcacctgggcggaagtgaggagttctggtacaattccactctgaccctggcagaggcgctcttgtccatggaacactcaggaagggaagctacggtgtgtcacatatttcagaagctcatcaatgccttcaagatcctcaagaaagaaagaccaaaccgattgcctttactggaattcatgatcacagatctagaagccaggtgcctgagcctgcgggtcagagttgcgcagcactcagcggtcactgaacccacagagtgctcgttgctactgaaagagatggatgatggcctgttggaaattgagagaaagtttatcgactgtggctgcaaagagaattgtgttgacgtaaaactagagcgtgcgaagatcaagaggttacgtgcccagaacgagaaagatgaagaacaaaaaactgcgtattacttggaagcgtatggcctggcccagggtgccgtagctgaggaagaagggaggcttcacagcatccagggcttatatggcctggcccagggcgccatggctgaggaagaagggaggcttcacagcgtccagggcctattgtcacttcaagacttgcagaacgtcaacacgcccctgatgaggaagctggcgcgcctcaagctcggcctcgtggaaatggctctggacatgctccagttcatctgggaggaggcccacgggcagcagagtgagcaggggtccctggagaagctgctggcggactatctgcagaacaccagtgactacacttccgtcggcctgcaatggttcacgctgaagcggactctagcacacggggcactggcacagctggggagcctgcagccgctgagcgtgggctgtgtggagatccgcgcccggctcctgggcctggccgggagggccctgcacctgctggccatgcaagctgaccctgtgcaccctacctgctactgggaggcgggcccctcggtgggcgccaagctgagcggcctcaagtctctggagctggaggtagaggaagagggtgccacaaagtccagcagggacccgccggcctccagggcagccccggaggagcactgcaggagaggcgaggacctgaagaggaggatggttctggcccagcagtacctggctcaggcgtcagaggtgctgctgcagtgcctacaggtggcccttggcagtggcctcctggatgtcgcagcagccgccagcctggagatggtggagtgtgtcggcaccctggaccctgcaactacctgccagttcctggctctgtctcagagctgctcggcctcagagacgatgagggatgtcctgcttgcagccacagccaacaccagcagctcacagctggcggccctgctgcagctacagcaccagctccggtgccaagacaggaccaccaccagcctgggcgcccgtgtggagcagaggctggccgccgtgtccaaggcttggcaaaatctctgcgtcactgagcagcattttaacctcttgaatgagatgcctccgaccttttggatcctctttctgcacctctcaggggacaggtcccgtctgtacggcgctgcctacgagaaacccaagttcattactgcagccaaaggaaaggtgcaggcggtgggaggctcctgcaaggtgatgcgtctggccataagtcccactgccttctcccacctgctggcctgtgcccagcagttccggaagcagacccaggcccaggtgtacagtgaggacatggccctgaacataggctcggaaccagaaggcctgcaggtggaagagaaggagcgccctgtgcagaggctcagtagcgtcctggggcccctggaggagcttctgcagccgctattccccctgctcagcctctccaaggccagagtgcagacacctgcggttgttgccgattcagggaagtcgaagggcaaagacaaggagaggaaaacgtccacaggacaacacagcacagtccagcctgaggttgccgataagatagtcctggtcgcagacagacatctcctggagctgccactggaaggtctctctgtgttcgatgaagggacaatttcctctgtgtcacgagaattttctcttcaaatgctgtggaatcgcctccataaagaagagacagaaggtggcgtgaaaaaggagggaagaagcagagaccccaaaaagagaagcctagcgaagaagggcaggaagggcagcatcccccggaccatcccccctgactgcatcatagtcgactcagacaacttcaagttcgtcgtggacccatacgaggaggcccagggcccagaaatgctaactcctgtctccatcacccaagacattttggaaagattccaagacacattcacgtcgcgatgggcgggacatctgggaagcaagcactttcccagccaggcccagtgggagcaggccctgggcagctgcagcggtttcttcttctatggaatggagagcttcctgtcccatatattagtggagagattggtcgccatgaacttgcaagagtgccaggtggcagtcctgctggacctggcgcggtcctaccagagcttgaagaggcacatggagagcgtggagcacaggagatctgttggccgttgggaagccaattggagaaacagtgcgtctccttcagaagatgagtggcgacgaggcggtgaaccaagacgaggcttctcagaccttgaaggacaagctgctgctgctccaaagctccgagctccttcccaccacgctcaacttggtcctgtatgggctgccgcaccaagccatcgggtagtgcaggcctggacctgcctcccatcagctgctggggccccagcacttgcctctgcccttggctctgcccctctgccaacccatccccacctcccggctcccatccccagctcccagctcgctctccccttcctgggcctctccccagcccttggtgcagcctcagccagggaccctcccccagcgacttcccgcaaggcagccgcctggacctcgagctctgcctgcctgtgtgcgccatggggtctgcgtcggggctggagctgcgtctcttcccggggccaggacaagggcggcctccccttggcggcgctggtgctgagttgcttagaccagaagactattcagaccgtgagcctgtttttgatttgagtgttccactaaacaaacaacaaaagcca

SEQ ID NO: 3933 - DNA, 782 bp, Homo sapiens
  source 1..782: mol_type = unassigned DNA; mol_type = unassigned DNA
ggtcgccatgaacttgcaagagtgccaggtggcagtcctgctggacctggcgcggtcctaccagagcttgaagaggcacatggagagcgtggagcacaggagcgcctcacagctgtccctggaggagcccgttgaggcggccatcctgctgagcctggtgggcgtcaagagcatcctggcaaaccagtggccgacgctgctgcaggacaacgcgctgcgggccagcgtcttatgggaaaatctgttggccgttgggaagccaattggagaaacagtgcgtctccttcagaagatgagtggcgacgaggcggtgaaccaagacgaggcttctcagaccttgaaggacaagctgctgctgctccaaagctccgagctccttcccaccacgctcaacttggtcctgtatgggctgccgcaccaagccatcgggtagtgcaggcctggacctgcctcccatcagctgctggggccccagcacttgcctctgcccttggctctgcccctctgccaacccatccccacctcccggctcccatccccagctcccagctcgctctccccttcctgggcctctccccagcccttggtgcagcctcagccagggaccctcccccagcgacttcccgcaaggcagccgcctggacctcgagctctgcctgcctgtgtgcgccatggggtctgcgtcggggctggagctgcgtctcttcccggggccaggacaagggcggcctccccttggcggcgctggtgctgagttgcttagaccagaagactattcagac

SEQ ID NO: 3934 - DNA, 610 bp, Homo sapiens
  source 1..610: mol_type = unassigned DNA; mol_type = unassigned DNA
agacccaggcccaggtgtacagtgaggacatggccctgaacataggctcggaaccagaaggcctgcaggtggaagagaaggagcgccctgtgcagaggctcagtagcgtcctggggcccctggaggagcttctgcagccgctattccccctgctcagcctctccaaggccagagtgcagacacctgcggttgttgccgattcagggaagtcgaagggcaaagacaaggagaggaaaacgtccacaggacaacacagcacagtccagcctgaggttgccgataagatagtcctggtcgcagacagacatctcctggagctgccactggaaggtctctctgtgttcgatgaagggacaatttcctctgtgtcacgagaattttctcttcaaatgctgtggaatcgcctccataaagaagagacagacagtgaaaagcacgagggagcgcgcggaaggccctgacctcggctgggattcgggggtgatgacattctgtgactgagtgctggctgtgcagacgtgccccggttgtgaagcttccccgagcgctacccttgcggtacgtgcagttttctgcacttcggtatcaaataaaattaaaaataaatcga

SEQ ID NO: 3935 - DNA, 563 bp, Homo sapiens
  source 1..563: mol_type = unassigned DNA; mol_type = unassigned DNA
acttccagcagggccccccaccccaagggcccagcctcgggcaggaagggtacaaagcccccgccgtggctctgccacgaggtctcctggaaatgaggggaacagcacagcgacgtccttgcgtcctaaatgcatcccctgatggccgtttttcgccacacaggcttggcaaaatctctgcgtcactgagcagcattttaacctcttgaatgagatgcctccgaccttttggatcctctttctgcacctctcaggggacaggtcccgtctgtacggcgctgcctacgagaaacccaagttcattactgcagccaaaggaaaggtgcaggcggtgggaggctcctgcaaggtgatgcgtctggccataagtcccactgccttctcccacctgctggcctgtgcccagcagttccggaagcagacccaggcccaggtgtacagtgaggacatggccctgaacataggctcggaaccagaaggcctgcaggtggaagagaaggagcgccctgtgcagaggctcagtagcgtcctggggcccctggaggagcttctgcagccgctat

SEQ ID NO: 3936 - DNA, 394 bp, Homo sapiens
  source 1..394: mol_type = unassigned DNA; mol_type = unassigned DNA
agagtgggcttcctactcctgccccgaggaagtgctgtctgtactgaaacaggacagaagtgactctactgtgaacccctcaagtatccagaagccgacatacagtttgtatttcctggaccacctggtcaaggccctgcagaagatgtgcctgcacgaactcacggttcccgtcctgcagttgggggtgctgatttcggactccgtggtgggaagcaagggcctgtcggatctctaccaccttcggtgggtacagctcctttttcggagtgtgatttccccaaagcaaaacaaaaataaacaacatgttaaggtattaattctgtagttgactgtgtaaataataaagtccctgggacttgaacaccaagtaaataaaaatatttgaatatga

SEQ ID NO: 3937 - DNA, 1675 bp, Homo sapiens
  source 1..1675: mol_type = unassigned DNA; mol_type = unassigned DNA
gccacggttcatttgctgcggtcagaaggtgtagagctgaatgaccgggccatcccccccgaagacctgagccagcacccagctggctacgtgcctgagcccccggaggtgaatgctgagtggatcacatacagaacctggatcgagagtctgtcccggtgtgccatgaataactggctgcgctccgcagagatcggacaggagatccaggaggcgtggattgtgcagaacgccgtggtctacgtcctgaaccacaaccaccacctgatcctggccgggcggcagaaggagctggtggacgccctgtaccacctcctgagcatcgttaaggccacaggccacagtggggaccccgtgatgctggtgacgctctgcaacaccttggcgcgaggcctgatcatcagctggattccagtccaggctgccgagaagtccaggaaattcatgcgaccaaacgcgtttcacagcccactggacgcaggagccacttccgagatcaaaacagcggtggaggtctgcgagtttgccctgaacctgaccaatgggagtgcgcccgaggagacggtgcccaccggcacccggcagcagcttatcgccacctgggtcaaggccaagcagctgctgcagcagcagattgggccacggctgggcaccgaggagcagggcaccaatgaggatgtcagctcggtgaccagagtcctcgttgccttggaaatgtactcatgcaacgggctgggcctcatggacttcactgtcccctccctggcccagttggtgaaaatggcttccgagtgcaactggtcggaccccctggtggagctgcagaccctgacgcggctgacccacttcgcccatgcagcgcgtgaccatgagaccaccatggcctgtgctcacagggctctggagatgggcatcaagtacctgaagaaatttgggcccgaggagtcccggctggtggcagagatgctgtgcacagccacggccatccagggcaggagcatcatggaaaacctgaagggccggaagcagctgcgactggtggcagccaaggccttcacggagagcgccaggttcggaggcatcgcgggcagcagcgccctggtgatgctggccgcgcggcattactggaacgcctggctcccactgctgtcctcagccgtctacaggaagaaggccaagggtgccctgaagaggctcatcggcatcatcaacaagacagaggccagaaagcaggtgcaccagccctggagggggctcctgactcccactgaggcctctagtgggtcttccagaaaggaccggagagactcccaaagaaagacagaccccacaggcctcccagagggtgcaccagcaccagccgaggaggggagggggttaaggggggtctccaagtcccagcactgcgggggcccctgctggactcggtgctcagacctgacctctcccagcaacacacatgcaccgaggggctctcagccctggagacacacagcagcgggtagagtgaggccagcacagtccctgccttaagaggcttggattctaggcagggaggacaggccccacctgccatgagagagggtggccctgagaacagcaagcagagggcagggcagggggcgggggctgggccacaggtgcctctggcggcttaaggcagagtggggtggcg

SEQ ID NO: 3938 - DNA, 573 bp, Homo sapiens
  source 1..573: mol_type = unassigned DNA; mol_type = unassigned DNA
ttcgtgaccgagaacacgtctgtcctaggtctgcgagtttgccctgaacctgaccaatgggagtgcgcccgaggagacggtgcccaccggcacccggcagcagcttatcgccacctgggtcaaggccaagcagctgctgcagcagcagattgggccacggctgggcaccgaggagcagggcaccaatgaggatgtcagctcggtgaccagagtcctcgttgccttggaaatgtactcatgcaacgggctgggcctcatggacttcactgtcccctccctggcccagttggtgaaaatggcttccgagtgcaactggtcggaccccctggtggagctgcagaccctgacgcggctgacccacttcgcccatgcagcgcgtgaccatgagaccaccatggcctgtgctcacagggctctggagatgggcatcaagtacctgaagaaatttgggccgtaagtaaccctcatgactggacaaattccctcaaaacgggcagggagcgcaggcctgggcctcaatcacagatcagggagcaggtgagcgccccaccagttccccaaaacgggcaggga

SEQ ID NO: 3939 - DNA, 1825 bp, Homo sapiens
  source 1..1825: mol_type = unassigned DNA; mol_type = unassigned DNA
gggcacacaggagccctgagcggggagaggaggcccgcgcggagcccccggcgtccccccacgccgccttccctcccctttcttcttcccgcccctcgccgggggtcgctgccctggtgtctcactcccgcggagctggcggggggcagggcgggggcgcggcgttgttcgccttccccgaagtgtggccccgccgccgacccgtagccccgcgtccgcgtccctttcggtctccaggcaaccgtggccgggtcctcgcggctggagaacccaaccgacagtgggcggcaggacgcaccgcggaccccggagagagcggacgagcagggcgccggcgccatggacctggtcatcacgcaggagctggcccgcgccgagagccagcaagatgctgcgtccttgaagaaggcctacgagttgatcaaatcggccaacctagggaaatcggagtttgacccctcagagagcttcagcccagacctgtttgttctgtgtgcagagcaggccctgaagatgaggcagccagaggtgagcgaggactgcatccaaatgtacttcaaggtgaaggcgcccatcacccagtttctgggccgagcgcacctgtgcagggcccagatgtgtgccccgaagtcggcagaaaacctggaggaatttgaaaattgcgtgactgagtacatgaaggccataaactttgccaaaggagaaccgaggtactactttttggtgtacaatgcatcagtcctctactggcagatggtgaggccgttcctcaagcctggatatcgtcaccatctgatccccagcctttcccaaatcataaacgtgctgagtcagactgaggaggaagacaaggagtggcgtgctgagctgatgctggaacttctggagtgttatctgcaagccggaagaaaggaggaggctgccaggttctgctccacggcagctccgttcattaagtctcacgtgccacagaaataccggcagatattctctgttatggttcgtcatgaattaatggacgaacttcagttaaaggaagaaaagaaaaattccattagcctgtcagtcactttctatattaatatgctaaaggcaaaagcggagcaaaatgatttaccaggtgacatcagtgtcattctgaggaaggcctacagacacttaggtcattacaaccaccagcgctttccctctatcagtgaagaaaaaatgcttttgctttttgaattggcgcgtttttccttgaccttgaaatgcatggagatctcctctgcctgcctctcagacctgaagaagatggaaagcaaagtaagtggcttcatgacactgctgcctggggatgaggcgctgctcaccgtgcagttggacaaaaggcaaagaaaggaagagcagttcaccaggccacggcccccagggcttcggtccgtggttggcacattgccgtctttcctacctgtgttttgcacagttgcagttagatggtgtttgcaattttacacctgcccgtttctctttacctttcttgtggccacgggtccacagcaccacagttgtttctagagtccaatttacggacggcgtaaaatttcatgatgctgatgatccagaacatcctccaccagtcccattattggacgtgtaaatcacaccggcagtgcctcgttacccgcagttcactttctgcagtttgttacctgcagacagctacagtatgaaaatattaagctattctgagggagaggccacagccacatcacttctgttacagtatagtgttatgattgtatcttattattagttattgttataaatatcttattgtgcctaa

SEQ ID NO: 3940 - DNA, 1156 bp, Homo sapiens
  source 1..1156: mol_type = unassigned DNA; mol_type = unassigned DNA
gtgggcggcaggacgcaccgcggaccccggagagagcggacgagcagggcgccggcgccatggacctggtcatcacgcaggagctggcccgcgccgagagccagcaagatgctgcgtccttgaagaaggcctacgagttgatcaaatcggccaacctagggaaatcggagtttgacccctcagagagcttcagcccagacctgtttgttctgtgtgcagagcaggccctgaagatgaggcagccagaggtgagcgaggactgcatccaaatgtacttcaaggtgaaggcgcccatcacccagtttctgggccgagcgcacctgtgcagggcccagatgtgtgccccgaagtcggcagaaaacctggaggaatttgaaaattgcgtgactgagtacatgaaggccataaactttgccaaaggagaaccgaggtactactttttggtgtacaatgcatcagtcctctactggcagatggtgaggccgttcctcaagcctggatatcgtcaccatctgatccccagcctttcccaaatcataaacgtgctgagtcagactgaggaggaagacaaggagtggcgtgctgagctgatgctggaacttctggagtgttatctgcaagccggaagaaaggaggaggctgccaggttctgctccacggcagctccgttcattaagtctcacgtgccacagaaataccggcagatattctctgttatggtaaatcagcgtattagaaatagagacgtaagaagtaattttcttaaaagtcattgttcagaaaactgcgtagaaattacataagtttgctgagagatataaaaatctatatgcatacatacatgaacaaaattacataagcatattaaaaagaaatagcagttcatccaatgcaaagatgtatagaactgtgacatttagaaaacaaaacagggtcttttgcctttatcgtcgctctttaaatatttcctttgtaatagctttgaatttttttaaagttaatagaaaattcacaaagatacaagtaattactacaagaatatgtaccaaaagcattcattcatcagcagtccattttgacatatggggaatcagcttaagttgtatctgaaaagctagatacaaaattaatgagaaaataaaatctagacacaaaa

SEQ ID NO: 3941 - DNA, 1851 bp, Homo sapiens
  source 1..1851: mol_type = unassigned DNA; mol_type = unassigned DNA
aatcccgcgaggcgcaccatggcaaccagacttctgcgtcgcggaagcgggtcccgcaggtcgccacggttgggggaaacgcggcggacgccgcccccgtcccgaaggggactcgaaaatgtacagccagcggtttggcaccgtacagcgggaggttaagggccccacccccaaagtggtgatcgtgagatccaagcctcctaaaggccaaggagctgagcaccatctagaaagaatccgacgcagccatcagaagcataatgctattttggcttccattaagtcaagtgagcgggatcgcttgaaagctgagtgggaccagcacaatgactgcaagattttggacagccttgtgcgagcaagaatcaaggatgctgtgcaagggtttatcattaacattgaagaaagacgaaataagctacgtgagcttttagcattagaagaaaatgagtattttacagaaatgcaattgaagaaagaaaccattgaggagaaaaaagataggatgagagagaaaactaaattactaaaagagaagaatgaaaaagagaggcaggattttgtggctgaaaagctagaccagcaattcagggaacgctgtgaggagctccgtgttgaattgttatctatccatcagaagaaggtgtgtgaggagcggaaagcacagattgcatttaatgaggagctgagcaggcaaaagctggtggaagagcagatgttctccaaactctgggaggaagaccgattagccaaggaaaagcgagaagcccaagaggcgaggagacagaaagagctgatggagaacacacgcctggggctgaatgcccagatcaccagcatcaaggcacaaaggcaggcgacacagctgctgaaggaagaggaggcacgccttgtggaaagtaacaacgcacagattaaacatgagaatgaacaggatatgctaaagaaacagaaggcaaagcaggaaactaggaccattttgcaaaaagccctacaagagaggatagaacatattcagcaggaatacagagacgaacaggacttgaacatgaagctcgtgcaaagggcccttcaagacttacaggaagaggcagataaaaagaaacaaaaaagagaagatatgataagagaacagaagatataccataaatatttggcacagagacgtgaggaagaaaaagctcaggagaaagaatttgacagaatattagaggaagacaaggcaaagaagttggctgagaaggacaaggagctgagacttgaaaaggaggcaaggagacagcttgtggatgaggtcatgtgtacaagaaaacttcaagttcaagaaaagttgcaacgagaagctaaagaacaggaagaacgtgctatggaacagaaacacataaatgaaagtcttaaagaacttaactgtgaagagaaggagaattttgcaagacgccaacgtttagcccaggagtacaggaagcaacttcagatgcaaatcgcctaccagcagcagtcccaagaagcagagaaggaagagaaacgccgagagtttgaagcaggtgtagcagcaaacaagatgtgtttggacaaggtccaggaggtcctgtccacccatcaagtgctgcctcaaaacattcatcccatgcgcaaggcatgccccagtaagcttccaccgtagttccgtgagcatcaatatatcttttcttggtcttttaatatttttaactacagtatgcttgtatgcttcttttaactcctggataaacttttcttttttccctgagtttgtgtaattaattgaacataattttcttcctttgaataaacctgtgcctattttggagttcacagacttacaaatccaaa

SEQ ID NO: 3942 - DNA, 1231 bp, Homo sapiens
  source 1..1231: mol_type = unassigned DNA; mol_type = unassigned DNA
tggctgtcctgttggagaactatgagcaagcagaaattttctttgaggatgctacttgcttggaaccaactaatgttgtagcctggactttacttggtttgtactatgaaattcaaaacaatgatattcgaatggaaatggcatttcatgaggcctccaaacagcttcaggcacggatgcttcaggcacaagaccaggagctgcattatctattctagacaaatttcttgaagaatcctccaaactgcagtctgattcacaagaacccattttgactacacaaacttgggatccaagtataagccaaaaaccatctaacacatttatcaaggagataccaacaaagaaagaagcatcaaaatgtcaagattcatcagctcttctgcatcccggccttcattatggtgtttctcaaactaccaccatcttcatggagaccatacatttcttgatgaaagtcaaggctgtgcagtatgtgcacagagtgcttgcacatgagctgttatgccctcaaggaggccccagctgtgaatattacttggtgctggcccaaacacacattcttaagaagaactttgccaaggcagaggaataccttcaacaagcagcccagatggactacctgaaccccaatgtctggggcctgaagggccatctctattttctgagtggaaatcattctgaggccaaggcatgctatgaacgaaccattagctttgtagtggatgcttctgagatgcacttcatcttcctgagactggggctcatctatctggaagagaaagagctggaggagctcacagaggctgaggatgctctttctgaagccaatgcattgaacaactacaatgctgaagtatgggcatatctggctctggtctgcctgaaagttggacggcaattagaagctgagcaggcctacaagtacatgatcaagctgaaattgaaagatgaggctctgcttgcagagatccacacactacaggaaacagttggctttggaaatccatctttctgatacccctccagctgaacaattttctgcatgggactctgagttcctttccttcccagagagttttaccgtatgaagcctggagctggagaacgaaagaatcttcactataaacagagacccattcatttatttccattggctgtgttactggatgttttactggttgacgagaaactgggtcacaataaaaaaatggagatatgaaactcaaaa

SEQ ID NO: 3943 - DNA, 1321 bp, Homo sapiens
  source 1..1321: mol_type = unassigned DNA; mol_type = unassigned DNA
tggctgtcctgttggagaactatgagcaagcagaaattttctttgaggatgctacttgcttggaaccaactaatgttgtagcctggactttacttggtttgtactatgaaattcaaaacaatgatattcgaatggaaatggcatttcatgaggcctccaaacagcttcaggcacggatgcttcaggcacaagaccaggagctgcattatctattctagacaaatttcttgaagaatcctccaaactgcagtctgattcacaagaacccattttgactacacaaacttgggatccaagtataagccaaaaaccatctaacacatttatcaaggagataccaacaaagaaagaagcatcaaaatgtcaagattcatcagctcttctgcatcccggccttcattatggtgtttctcaaactaccaccatcttcatggagaccatacatttcttgatgaaagtcaaggctgtgcagtatgtgcacagagtgcttgcacatgagctgttatgccctcaaggaggccccagctgtgaatattacttggtgctggcccaaacacacattcttaagaagaactttgccaaggcagaggaataccttcaacaagcagcccagatggactacctgaaccccaatgtctggggcctgaagggccatctctattttctgagtggaaatcattctgaggccaaggcatgctatgaacgaaccattagctttgtagtggatgcttctgagatgcacttcatcttcctgagactggggctcatctatctggaagagaaagagtatgaaaaggcaaagaaaacctatatgcaagcctgtaagagatcaccttcatgccttacctggctaggactgggaatcgcctgctatcggctggaggagctcacagaggctgaggatgctctttctgaagccaatgcattgaacaactacaatgctgaagtatgggcatatctggctctggtctgcctgaaagttggacggcaattagaagctgagcaggcctacaagtacatgatcaagctgaaattgaaagatgaggctctgcttgcagagatccacacactacaggaaacagttggctttggaaatccatctttctgatacccctccagctgaacaattttctgcatgggactctgagttcctttccttcccagagagttttaccgtatgaagcctggagctggagaacgaaagaatcttcactataaacagagacccattcatttatttccattggctgtgttactggatgttttactggttgacgagaaactgggtcacaataaaaaaatggagatatgaaactcaaaa

SEQ ID NO: 3944 - DNA, 1710 bp, Homo sapiens
  source 1..1710: mol_type = unassigned DNA; mol_type = unassigned DNA
caggaggaacttcagacatttatcagtgagctctatgtgttcttagtagatcagatgcatgtagccctaaaccagaccatgccagatgatgtccaaggcactgttgcaaccatttatacaagcagtgaacagcttcaactctttgcatttgaagcagaagtcaatgagaactttgagatggcagcagcatattataaagagagattggtccgtgagccccagaatctggatcactggttggactatggtgccttctgcctcctaactgaagacaacatcaaagcacaagagtgttttcagaaagccctttccctcaaccagagtcatatccacagcttgttgctgtgtggtgtcctggctgtcctgttggagaactatgagcaagcagaaattttctttgaggatgctacttgcttggaaccaactaatgttgtagcctggactttacttggtttgtactatgaaattcaaaacaatgatattcgaatggaaatggcatttcatgaggcctccaaacagcttcaggcacggatgcttcaggcacaagtaacaaagcaaaagagcactggtgtagaagacactgaggaaagagggaagagagaatctagtttaggcccttggggaatcacaaatggttctgcaacagcaatcaaggtggaagccccagcaggaccaggagctgcattatctattctagacaaatttcttgaagaatcctccaaactgcagtctgattcacaagaacccattttgactacacaaacttgggatccaagtataagccaaaaaccatctaacacatttatcaaggagataccaacaaagaaagaagcatcaaaatgtcaagattcatcagctcttctgcatcccggccttcattatggtgtttctcaaactaccaccatcttcatggagaccatacatttcttgatgaaagtcaaggctgtgcagtatgtgcacagagtgcttgcacatgagctgttatgccctcaaggaggccccagctgtgaatattacttggtgctggcccaaacacacattcttaagaagaactttgccaaggcagaggaataccttcaacaagcagcccagatggactacctgaaccccaatgtctggggcctgaagggccatctctattttctgagtggaaatcattctgaggccaaggcatgctatgaacgaaccattagctttgtagtggatgcttctgagatgcacttcatcttcctgagactggggctcatctatctggaagagaaagagctggaggagctcacagaggctgaggatgctctttctgaagccaatgcattgaacaactacaatgctgaagtatgggcatatctggctctggtctgcctgaaagttggacggcaattagaagctgagcaggcctacaagtacatgatcaagctgaaattgaaagatgaggctctgcttgcagagatccacacactacaggaaacagttggctttggaaatccatctttctgatacccctccagctgaacaattttctgcatgggactctgagttcctttccttcccagagagttttaccgtatgaagcctggagctggagaacgaaagaatcttcactataaacagagacccattcatttatttccattggctgtgttactggatgttttactggttgacgagaaactgggtcacaataaaaaaatggagatatgaaactcaaaa

SEQ ID NO: 3945 - DNA, 6686 bp, Homo sapiens
  source 1..6686: mol_type = unassigned DNA; mol_type = unassigned DNA
ggttgctatagttgtcaaaaacataactgaggctgctgcagagaccaaagaaaacagagggacttttcccagttggtgatatggagcaagtgccatcagcaggcagactcgtgcagatcaccgtgacagagggatatgatttgaaaggttttaaaggagatactccagttacctttattcgagcagaattcaatcaagtggttctgggagactctgcaaaaattactgtttctccagaaggaagtgcaaaatacaacttcactagcagttttgagtttaatcctgaaggaggaatcacttcagatgacctcgctcacaaacctgtgttcttaactgtgactgaagttttaccaaaggaaaagaaacagaaagaagagaagaccttaattcttggtcaggctgtggtggaccttcttcccttactggaagtgcagtcttgaagttaaagtattagtggcagagcctttactgaccacagcccagatctcagggggcaatctactgaaggtcacgttggaggctgcttactctgtgcctgaatccttcattccaacaggtcctgggcagaactacatggtcggtctgcaagttccatcacttggagagaaggactatcccattttatttaagaatggaactctgaagcttggaggggaaagggaacctgttccccggcccaaaaagtggccaattgccaacattctggctccaggagctaataacattcctgatgcattcattgttggtggtccctatgaagaagaagaaggagaactcaaccatcctgaggacagcgaatttaggaatcaagcagagtgcataaagaaaaggattatttgggacttggaaagtcgctgctaccttgatccttctgcagtggtcagttttcagaagcgaattgccgattgccggctttggcctgtagagatcacaagagttcctctggtcactatacccaaagggaaagctggcaaaactgaaaaggtgtgaagagaattcggggagcttttcatgtttacccttacctagacagtgtagtccatgaaaagaccaaatgtttattgagcttgttccgggatattggccatcacttgattcataataataaaataggaggaattaattctctgctgtccaaacaagctgtttctaagaatctgaaagaagataaaccagtgaaagaaaaggatatagatggaaggcctaggcctggggatgtgcaggcacctagtataaaatctcagagctcagatactcctttggaaggtgaaccccctctaagtcacaatcctgaaggacagcaatatgtagaagcagggacatacattgtgttggaaattcagctggacaaagccttggttccaaagcgaatgccagaggagctagccagaagggtcaaggaaatgattcctccaaggcctcctcttacccgtcggacaggaggagctcagaaggcaatgagtgactaccacatacagatcaagaatatttctagagccattctagatgaatactacagaatgtttggaaaacaggtggccaaactggagagtgatatggatagtgaaaccttggaggagcagaagtgccagctcagctatgaacttaattgctctggaaaatactttgctttcaaagaacaactcaagcatgctgtggtaaagattgtgagagataaatacttgaagacaacatcatttgaaagccaggaggaacttcagacatttatcagtgagctctatgtgttcttagtagatcagatgcatgtagccctaaaccaggtaagtgtcaagaactgagagcactttcttttctctgtagagcatcagagtcttctatgaataattccttcctttgtttattcaacgaatatttattgaagtgtctgctctgtgctaggcactgaaaacacaaagatgagtaagaaactgcctaagcctaatcagtttaagactaattttggaaaaaaacaaggagatatgctctttcaatttcctagaaaaataaatttcacaactttaaaaaatgtgatggaattgtcaaaaatagattaaatatgttgcataaattgtgaaatgaaaattatcattctatttattctgtgaacaggtacaattcttaattttttattgaatatcataaaagcagagaaaaactttgagttttcagatattatacccaaatgacagtgacacttcaaacatgccttttctgtttgactggtggtctgctgtcccacccacttttctgtttatatttgtaagtcttccatcttgccttcatttgcttatttttatttgtattcaggggtagtttatttgaaaccagtgacaaagtcacagtctttttgtcccctggtagtgtctaaccatctgtgcctcctcaaattctttattctatttgcttttcccttccttgtttttcttctctaccaccatcacctcttgtttcactttgttctgtctttctggagaaggtaggacaggagtgtccagcatcaaaggattaagagaacagtcctgccttgggcatggatgatttgatttgaaaagcaattgagagtggagcatgagaaaaagaagttttgactttttcctcactagtagctgggagcaatacattgaattattttacactgaggtataatatgatcaggtttacatttgctaaaacactctgatagcactatggaggatgagttagaggtgacaaaactgtgatgttagttgattattgcataataaggaggaaaaagtttaagttaagtttaagtttcaatgggtaattgatgccattcagtacttcttggttgatactaaaaagaaaagaaaaacattaaccaggacatggaatgcaattatgagtaaatttggtgggaggcagatggtactgaattcgcttttgaacataggctctagtggggttttgcccaagacagagatctgagctagagatgagatttggggagctatgaaatatggatgctatggtcatagatgaactgcctgagaaaaacataagagagaagagagctggcagtagaactctaggaaataccaacatttaaggaatgaatgaaaaattgaaagagacaagtgggattgttaaagaggcaaagagccagagacaatggtgtcacagaagccaaaggaaaagaattttaaggaaaagtggtcaacattgttaaatactcctaggaattcaagaaaaacaaatctaaagtcttcactggatttgacaataaggaagttattgttaacctttacatagcaatattattgggctaatggggggattcaaattatgatgaattgagtaaatgagcaatcaagaaacagatgaatataaattcaagttggatgacgaaggaaaaaactggaaaagtagtagctagaagttatagggattttcttccctccctccctccctcccttcctcccttcctcccttcctcccttccttccttccttcatttctttctttctctttctctctctctctctttctccctttctctctttctttctcgcccaggctggagtgcagcagtgcaatcatggctcactatagcttcaacttcccaggctcaagcaatcctgccacctcagcctctcaagtagctgggactacaggtgcacaccacgcctaactaatttttgtatttttttgtagagatggggtttcaccatgttgcccaggctggtctcgaactcttggactcaagcgatccaccagccatggccttccaaagtgctgggattacaggcatgagccacccgctcctggcctgggattttctttttaagatgaaaaagacttgagcacatccacaggtttgggaaaaagtcagcagagtgggagaagctgaaaattgaggaaagagaggggataattgatggcaggctcagggtatacacctgggaaaggaccaagaatttaaatggaaggattaactttggaacagtgcaggctgcaatacctctttctctgagactgaaaagaaagcgatacaatagatccagaaataaataatttagctagggagtataatagttgagggatttcttacttaatgatttctattatctctgtgaagtaaggtctttactgaaagtgaaggagatgaggattgaatgaaaaacttgaagaaagagaagaaaacttagatactgcaaagcattatggaatatgctgctaagcaaagacaaatacatagattactaagggtattaaaggtctccagctaagactgaatgccacaagagcttgtggcagcttagataccaatctctgtgtctatgcagttttccttaggaccagttagctgctcttgtcttggaatgaagaagtcagattgtgctattgttttaagttgagaattttcaggacaaatgcaggagaaggacaaggatgcctgagatgaaagtatgctggtgagaaagtagcctgagtgggttatcatgaggttcagactgatccatctgggaagtgatgggcttattggaactgaaggaaataaagtcagcagttttcagtgggctaagtaacaaaaaggtggaagacaagacatggagtgttggttctgggagtgggatattagagtattctgttttgggtgtagaagtgcatcgctgcagggatttgggggtcaagataatcaaaactaaaaagaacaggacaaaagtattaatcaatgatcagaaactctctttggcctatctcaaatttggctttactgtccacatttcttagcaattatccttattaaaatcactgatattattttgacttctaattaaagaattttgtggactctttcttgaccatagcttctgactcaggagattcctaattacaccagacctgctctcccaatctttgtgtataggatatattctttttctggttttcctcctacctttttgtttcctttgaaggatctatcagtctatatttcctactaaaactatagatttggcttctaaaggtttacccttaatctcctgttttcttcacatttaaagaccctagcgagggcttgccaacctttttcatgtcatgacacaaaaaaatgatagtatttgtcatatacactacagaaaatgaaggaagctgtttgaggtcagaggtgacctgcatagggactatgaatgccctgagggttgaggcagttatttctgccctaagcaatttttacttacttccatgagctcagactgttggtattcagatacctgagcttctccttcacccttgacatttctctcctggttcactcttattcttttacttttttggcaagactgtcattatagacatcaatcagtaacattttagacgtcataactggatctcacatcggatttatgcttatgaaacctctctacttgtaattgtttcatttttgtctacctaacatcttgacattgacaagaccatgccagatgatgtccaaggcactgttgcaaccatttatacaagcagtgaacagcttcaactctttgcatttgaagcagaagtcaatgagaactttgagatggcagcagcatattataaagagagattggtccgtgagccccagaatctggatcactggttggactatggtgccttctgcctcctaactgaagacaacatcaaagcacaagagtgttttcagaaagccctttccctcaaccagagtcatatccacagcttgttgctgtgtggtgtcctggctgtcctgttggagaactatgagcaagcagaaattttctttgaggatgctacttgcttggaaccaactaatgttgtagcctggactttacttggtttgtactatgaaattcaaaacaatgatattcgaatggaaatggcatttcatgaggcctccaaacagcttcaggcacggatgcttcaggcacaagtaacaaagcaaaagagcactggtgtagaagacactgaggaaagagggaagagagaatctagtttaggcccttggggaatcacaaatggttctgcaacagcaatcaaggtggaagccccagcagtatgtgcacagagtgcttgcacatgagctgttatgccctcaaggaggccccagctgtgaatattacttggtgctggcccaaacacacattcttaagaagaactttgccaaggcagaggaataccttcaacaagcagcccagatggactacctgaaccccaatgtctggggcctgaagggccatctctattttctgagtggaaatcattctgaggccaaggcatgctatgaacgaaccattagctttgtagtggatgcttctgagatgcacttcatcttcctgagactggggctcatctatctggaagagaaagaggttggacggcaattagaagctgagcaggcctacaagtacatgatcaagctgaaattgaaagatgaggctctgcttgcagagatccacacactacaggaaacagttggctttggaaatccatctttctgatacccctccagctgaacaattttctgcatgggactctgagttcctttccttcccagagagttttaccgtatgaagcctggagctggagaacgaaagaatcttcactataaacagagacccattcatttatttccattggctgtgttactggatgttttactggttgacgagaaactgggtcacaataaaaaaatggagatatgaaactcaaaa

SEQ ID NO: 3946 - DNA, 1403 bp, Homo sapiens
  source 1..1403: mol_type = unassigned DNA; mol_type = unassigned DNA
agtaagttctcgcgagaggtagttggttgctatagttgtcaaaaacataactgaggctgctgcagagaccaaagaaaacagagggacttttcccagttggtgatatggagcaagtgccatcagcaggcagactcgtgcagatcaccgtgacagagggatatgatttgaaaggttttaaaggagatactccagttacctttattcgagcagaattcaatcaagtggttctgggagactctgcaaaaattactgtttctccagaaggaagtgcaaaatacaacttcactagcagttttgagtttaatcctgaaggaggaatcacttcagatgacctcgctcacaaacctgtgttcttaactgtgactgaagttttaccaaaggaaaagaaacagaaagaagagaagaccttaattcttggtcaggctgtggtggaccttcttcccttactggaaggacagagttcatttcaaacaacagttccattgcaccctgtgcaaggctcacccttagaaactcctagatcaagtgctaagcagtgcagtcttgaagttaaagtattagtggcagagcctttactgaccacagcccagatctcagggggcaatctactgaaggtcacgttggaggctgcttactctgtgcctgaatccttcattccaacaggtcctgggcagaactacatggtcggtctgcaagttccatcacttggagagaaggactatcccattttatttaagaatggaactctgaatggaaatcattctgaggccaaggcatgctatgaacgaaccattagctttgtagtggatgcttctgagatgcacttcatcttcctgagactggggctcatctatctggaagagaaagagtatgaaaaggcaaagaaaacctatatgcaagcctgtaagagatcaccttcatgccttacctggctaggactgggaatcgcctgctatcggctggaggagctcacagaggctgaggatgctctttctgaagccaatgcattgaacaactacaatgctgaagtatgggcatatctggctctggtctgcctgaaagttggacggcaattagaagctgagcaggcctacaagtacatgatcaagctgaaattgaaagatgaggctctgcttgcagagatccacacactacaggaaacagttggctttggaaatccatctttctgatacccctccagctgaacaattttctgcatgggactctgagttcctttccttcccagagagttttaccgtatgaagcctggagctggagaacgaaagaatcttcactataaacagagacccattcatttatttccattggctgtgttactggatgttttactggttgacgagaaactgggtcacaataaaaaaatggagatatgaaactcaaaa

SEQ ID NO: 3947 - DNA, 3691 bp, Homo sapiens
  source 1..3691: mol_type = unassigned DNA; mol_type = unassigned DNA
agcgtctcgctccctgctcccggccccagagggttatcgcgagtcttggaataaacttgctcgtgcgatggccaaaaagaccaaagaaaacagagggacttttcccagttggtgatatggagcaagtgccatcagcaggcagactcgtgcagatcaccgtgacagagggatatgatttgaaaggttttaaaggagatactccagttacctttattcgagcagaattcaatcaagtggttctgggagactctgcaaaaattactgtttctccagaaggaagtgcaaaatacaacttcactagcagttttgagtttaatcctgaaggaggaatcacttcagatgacctcgctcacaaacctgtgttcttaactgtgactgaagttttaccaaaggaaaagaaacagaaagaagagaagaccttaattcttggtcaggctgtggtggaccttcttcccttactggaaggacagagttcatttcaaacaacagttccattgcaccctgtgcaaggctcacccttagaaactcctagatcaagtgctaagcagtgcagtcttgaagttaaagtattagtggcagagcctttactgaccacagcccagatctcagggggcaatctactgaaggtcacgttggaggctgcttactctgtgcctgaatccttcattccaacaggtcctgggcagaactacatggtcggtctgcaagttccatcacttggagagaaggactatcccattttatttaagaatggaactctgaagcttggaggggaaagggaacctgttccccggcccaaaaagtggccaattgccaacattctggctccaggagctaataacattcctgatgcattcattgttggtggtccctatgaagaagaagaaggagaactcaaccatcctgaggacagcgaatttaggaatcaagcagagtgcataaagaaaaggattatttgggacttggaaagtcgctgctaccttgatccttctgcagtggtcagttttcagaagcgaattgccgattgccggctttggcctgtagagatcacaagagttcctctggtcactatacccaaagggaaagctggcaaaactgaaaagactgatgaagaagctcagctttcgtttcatggtgtggcttatgttaatatggtcccattgttgtatccaggtgtgaagagaattcggggagcttttcatgtttacccttacctagacagtgtagtccatgaaaagaccaaatgtttattgagcttgttccgggatattggccatcacttgattcataataataaaataggaggaattaattctctgctgtccaaacaagctgtttctaagaatctgaaagaagataaaccagtgaaagaaaaggatatagatggaaggcctaggcctggggatgtgcaggcacctagtataaaatctcagagctcagatactcctttggaaggtgaaccccctctaagtcacaatcctgaaggacagcaatatgtagaagcagggacatacattgtgttggaaattcagctggacaaagccttggttccaaagcgaatgccagaggagctagccagaagggtcaaggaaatgattcctccaaggcctcctcttacccgtcggacaggaggagctcagaagtgagtgactaccacatacagatcaagaatatttctagagccattctagatgaatactacagaatgtttggaaaacaggtggccaaactggagagtgatatggatagtgaaaccttggaggagcagaagtgccagctcagctatgaacttaattgctctggaaaatactttgctttcaaagaacaactcaagcatgctgtggtaaagattgtgagagataaatacttgaagacaacatcatttgaaagccaggaggaacttcagacatttatcagtgagctctatgtgttcttagtagatcagatgcatgtagccctaaaccagaccatgccagatgatgtccaaggcactgttgcaaccatttatacaagcagtgaacagcttcaactctttgcatttgaagcagaagtcaatgagaactttgagatggcagcagcatattataaagagagattggtccgtgagccccagaatctggatcactggttggactatggtgccttctgcctcctaactgaagacaacatcaaagcacaagagtgttttcagaaagccctttccctcaaccagagtcatatccacagcttgttgctgtgtggtgtcctggctgtcctgttggagaactatgagcaagcagaaattttctttgaggatgctacttgcttggaaccaactaatgttgtagcctggactttacttggtttgtactatgaaattcaaaacaatgatattcgaatggaaatggcatttcatgaggcctccaaacagcttcaggcacggatgcttcaggcacaagtaacaaagcaaaagagcactggtgtagaagacactgaggaaagagggaagagagaatctagtttaggcccttggggaatcacaaatggttctgcaacagcaatcaaggtggaagccccagcaggaccaggagctgcattatctattctagacaaatttcttgaagaatcctccaaactgcagtctgattcacaagaacccattttgactacacaaacttgggatccaagtataagccaaaaaccatctaacacatttatcaaggagataccaacaaagaaagaagcatcaaaatgtcaagattcatcagctcttctgcatcccggccttcattatggtgtttctcaaactaccaccatcttcatggagaccatacatttcttgatgaaagtcaaggctgtgcagtatgtgcacagagtgcttgcacatgagctgttatgccctcaaggaggccccagctgtgaatattacttggtgctggcccaaacacacattcttaagaagaactttgccaaggcagaggaataccttcaacaagcagcccagatggactacctgaaccccaatgtctggggcctgaagggccatctctattttctgagtggaaatcattctgaggccaaggcatgctatgaacgaaccattagctttgtagtggatgcttctgagatgcacttcatcttcctgagactggggctcatctatctggaagagaaagagtatgaaaaggcaaagaaaacctatatgcaagcctgtaagagatcaccttcatgccttacctggctaggactgggaatcgcctgctatcggctggaggagctcacagaggctgaggatgctctttctgaagccaatgcattgaacaactacaatgctgaagtatgggcatatctggctctggtctgcctgaaagttggacggcaattagaagctgagcaggcctacaagtacatgatcaagctgaaattgaaagatgaggctctgcttgcagagatccacacactacaggaaacagttggctttggaaatccatctttctgatacccctccagctgaacaattttctgcatgggactctgagttcctttccttcccagagagttttaccgtatgaagcctggagctggagaacgaaagaatcttcactataaacagagacccattcatttatttccattggctgtgttactggatgttttactggttgacgagaaactgggtcacaataaaaaaatggagatatgaaactcaaaa

SEQ ID NO: 3948 - DNA, 3703 bp, Homo sapiens
  source 1..3703: mol_type = unassigned DNA; mol_type = unassigned DNA
agctcagcgtctcgctccctgctcccggccccagagggttatcgcgagtcttggaataaacttgctcgtgcgatggccaaaaagaccaaagaaaacagagggacttttcccagttggtgatatggagcaagtgccatcagcaggcagactcgtgcagatcaccgtgacagagggatatgatttgaaaggttttaaaggagatactccagttacctttattcgagcagaattcaatcaagtggttctgggagactctgcaaaaattactgtttctccagaaggaagtgcaaaatacaacttcactagcagttttgagtttaatcctgaaggaggaatcacttcagatgacctcgctcacaaacctgtgttcttaactgtgactgaagttttaccaaaggaaaagaaacagaaagaagagaagaccttaattcttggtcaggctgtggtggaccttcttcccttactggaaggacagagttcatttcaaacaacagttccattgcaccctgtgcaaggctcacccttagaaactcctagatcaagtgctaagcagtgcagtcttgaagttaaagtattagtggcagagcctttactgaccacagcccagatctcagggggcaatctactgaaggtcacgttggaggctgcttactctgtgcctgaatccttcattccaacaggtcctgggcagaactacatggtcggtctgcaagttccatcacttggagagaaggactatcccattttatttaagaatggaactctgaagcttggaggggaaagggaacctgttccccggcccaaaaagtggccaattgccaacattctggctccaggagctaataacattcctgatgcattcattgttggtggtccctatgaagaagaagaaggagaactcaaccatcctgaggacagcgaatttaggaatcaagcagagtgcataaagaaaaggattatttgggacttggaaagtcgctgctaccttgatccttctgcagtggtcagttttcagaagcgaattgccgattgccggctttggcctgtagagatcacaagagttcctctggtcactatacccaaagggaaagctggcaaaactgaaaagactgatgaagaagctcagctttcgtttcatggtgtggcttatgttaatatggtcccattgttgtatccaggtgtgaagagaattcggggagcttttcatgtttacccttacctagacagtgtagtccatgaaaagaccaaatgtttattgagcttgttccgggatattggccatcacttgattcataataataaaataggaggaattaattctctgctgtccaaacaagctgtttctaagaatctgaaagaagataaaccagtgaaagaaaaggatatagatggaaggcctaggcctggggatgtgcaggcacctagtataaaatctcagagctcagatactcctttggaaggtgaaccccctctaagtcacaatcctgaaggacagcaatatgtagaagcagggacatacattgtgttggaaattcagctggacaaagccttggttccaaagcgaatgccagaggagctagccagaagggtcaaggaaatgattcctccaaggcctcctcttacccgtcggacaggaggagctcagaaggcaatgagtgactaccacatacagatcaagaatatttctagagccattctagatgaatactacagaatgtttggaaaacaggtggccaaactggagagtgatatggatagtgaaaccttggaggagcagaagtgccagctcagctatgaacttaattgctctggaaaatactttgctttcaaagaacaactcaagcatgctgtggtaaagattgtgagagataaatacttgaagacaacatcatttgaaagccaggaggaacttcagacatttatcagtgagctctatgtgttcttagtagatcagatgcatgtagccctaaaccagaccatgccagatgatgtccaaggcactgttgcaaccatttatacaagcagtgaacagcttcaactctttgcatttgaagcagaagtcaatgagaactttgagatggcagcagcatattataaagagagattggtccgtgagccccagaatctggatcactggttggactatggtgccttctgcctcctaactgaagacaacatcaaagcacaagagtgttttcagaaagccctttccctcaaccagagtcatatccacagcttgttgctgtgtggtgtcctggctgtcctgttggagaactatgagcaagcagaaattttctttgaggatgctacttgcttggaaccaactaatgttgtagcctggactttacttggtttgtactatgaaattcaaaacaatgatattcgaatggaaatggcatttcatgaggcctccaaacagcttcaggcacggatgcttcaggcacaagtaacaaagcaaaagagcactggtgtagaagacactgaggaaagagggaagagagaatctagtttaggcccttggggaatcacaaatggttctgcaacagcaatcaaggtggaagccccagcaggaccaggagctgcattatctattctagacaaatttcttgaagaatcctccaaactgcagtctgattcacaagaacccattttgactacacaaacttgggatccaagtataagccaaaaaccatctaacacatttatcaaggagataccaacaaagaaagaagcatcaaaatgtcaagattcatcagctcttctgcatcccggccttcattatggtgtttctcaaactaccaccatcttcatggagaccatacatttcttgatgaaagtcaaggctgtgcagtatgtgcacagagtgcttgcacatgagctgttatgccctcaaggaggccccagctgtgaatattacttggtgctggcccaaacacacattcttaagaagaactttgccaaggcagaggaataccttcaacaagcagcccagatggactacctgaaccccaatgtctggggcctgaagggccatctctattttctgagtggaaatcattctgaggccaaggcatgctatgaacgaaccattagctttgtagtggatgcttctgagatgcacttcatcttcctgagactggggctcatctatctggaagagaaagagtatgaaaaggcaaagaaaacctatatgcaagcctgtaagagatcaccttcatgccttacctggctaggactgggaatcgcctgctatcggctggaggagctcacagaggctgaggatgctctttctgaagccaatgcattgaacaactacaatgctgaagtatgggcatatctggctctggtctgcctgaaagttggacggcaattagaagctgagcaggcctacaagtacatgatcaagctgaaattgaaagatgaggctctgcttgcagagatccacacactacaggaaacagttggctttggaaatccatctttctgatacccctccagctgaacaattttctgcatgggactctgagttcctttccttcccagagagttttaccgtatgaagcctggagctggagaacgaaagaatcttcactataaacagagacccattcatttatttccattggctgtgttactggatgttttactggttgacgagaaactgggtcacaataaaaaaatggagatatgaaactcaaaattc

SEQ ID NO: 3949 - DNA, 1222 bp, Homo sapiens
  source 1..1222: mol_type = unassigned DNA; mol_type = unassigned DNA
tggctgtcctgttggagaactatgagcaagcagaaattttctttgaggatgctacttgcttggaaccaactaatgttgtagcctggactttacttggtttgtactatgaaattcaaaacaatgatattcgaatggaaatggcatttcatgaggcctccaaacagcttcaggcacggatgcttcaggcacaagaccaggagctgcattatctattctagacaaatttcttgaagaatcctccaaactgcagtctgattcacaagaacccattttgactacacaaacttgggatccaagtataagccaaaaaccatctaacacatttatcaaggagataccaacaaagaaagaagcatcaaaatgtcaagattcatcagctcttctgcatcccggccttcattatggtgtttctcaaactaccaccatcttcatggagaccatacatttcttgatgaaagtcaaggctgtgcaggtcagagttgcttgcacatgagctgttatgccctcaaggaggccccagctgtgaatattacttggtgctggcccaaacacacattcttaagaagaactttgccaaggcagaggaataccttcaacaagcagcccagatggactacctgaaccccaatgtctggggcctgaagggccatctctattttctgagtggaaatcattctgaggccaaggcatgctatgaacgaaccattagctttgtagtggatgcttctgagatgcacttcatcttcctgagactggggctcatctatctggaagagaaagagctggaggagctcacagaggctgaggatgctctttctgaagccaatgcattgaacaactacaatgctgaagtatgggcatatctggctctggtctgcctgaaagttggacggcaattagaagctgagcaggcctacaagtacatgatcaagctgaaattgaaagatgaggctctgcttgcagagatccacacactacaggaaacagttggctttggaaatccatctttctgatacccctccagctgaacaattttctgcatgggactctgagttcctttccttcccagagagttttaccgtatgaagcctggagctggagaacgaaagaatcttcactataaacagagacccattcatttatttccattggctgtgttactggatgttttactggttgacgagaaactgggtcacaataaaaaaatggagatatgaaactc

SEQ ID NO: 3950 - DNA, 5247 bp, Homo sapiens
  source 1..5247: mol_type = unassigned DNA; mol_type = unassigned DNA
gttgccatggagctgcccgccccaaaccacgccgccggcgccgcggagggcaatcgccaaggaccgccgcctgcctgagcagcccggggtgtctgtgcctccggagcccgagaacctgggacccaggccagccagagctaatttctatctcccagcatggaggatgacggcagcctgctccctgaggacgagcttttggccgatgcccttcttttggaagatgaaagagatgaattagaggatccggagtttgacatcaaatgtcttctacaggaagctgaggatgacgtggacccgggacacagcagctcagtgaaagaactagatactgatgctgataaattgaagaagaaaacagctgaggacagaacgcaggcatttcacctgcggcagaacctgagcgccctggataagatgcatgaggagcaagagcttttcactgagaagatgagaggggagctgcgcgcctgtcggcagaggcgggacctgatcgacaagcagcaggaggctgtggcagccgagatcgccacagaggaagaggcgggcaacatggccgctgtgggccgcctccaggccgtgtccagacgcctgtttgcagagctggagaacgagagagacctgcagtcgaggactgaggccgtgctgaaggagagcgagaacaccatgtggcacatcgagatccaggaggggcgactcgaggccttccggacagctgaccgtgaggaggtggaggccacggggcggcggctccaggtgcgcgcagccgagcagctctgcagagagcaggaggccctggggaaggtggagcggaaccgactgctgaggatcaggaagtccctgaacacccagaaggagctcgggctcaggcaccagaagctgctggaggacgcccggaagaaccacaaggttgccgtgcggttcctgaaggcctccctgggaagaatccgagagcaagagaagaaggaggagatggagtgccacgagtacatgaggcgacgcatggatgcggtggtggcgctgaagggcagcatctccgcgaaccgggacacactgcggaagttccaagcatgggaccgtgccaaggcagagctggcggagcagagggtccaggctgagaagaaggcgattctggcccagggcagggatgcattcaggcaccttgtccaccagcgccggcgccaggagctggaggcccagaagagggcctttgaggaggagcagaagctcagaaagcaggagatcatcagtcggattctgaaagaggaggctgaggaggaaaagaggaagaaacagcatccccccaccagtgccaggcaccggctgaccctgagggacaagacctggaactacatttctgacttttgcaagaagaccacagtcccaaccaacacgtacacactggactacgaggctgctgcaggccccgggccctctcggttgctggaagtcgtttccagtgagcttatccagggggaccccggggccagctcagaggaggaaacgttagctgagcccgagatctctgggctttggaatgaagactacaagccataccaggtgcccaaggaggacgtggaccgaaagcccgtgggcgggacaaagatggacaaggacatcctggagcgcacggtggagcggctgcggagcagggtggtccacaagcaggtggtgtgggggcgtgagttccaaggacgccccttcaacagcaaaccggagctcctccacttccaggactttgatattggcaaagtgtacaagaaaaagatcacgttggtaaacaccacctacacgatcaactactgcaagctggtgggcgtggaggagcacctccgggacttcatccacgttgactttgacccccctggccccctgtcagccggaatgtcctgtgaagtgcttgtcaccttcaagccgatgataaacaaggatctagaaggaaatatctcatttttggctcagacgggcgagttttcagttccactgaaatgttcaacaaagaaatgttcgctgtccctcgacaaggagctcattgacttcggcagctacgtggtaggagagaccacgtctcggaccatcacgctgaccaacgttgggggcttgggcacgactttcaagttcctgccagcttcagagccctgtgagatggacgactcccagtctgccctgaaattaagcagtctcctgacctacgaagataaaagcttgtatgacaaagccgccaccagcttctctgagcagcagctagagggcacggagtcctcccaggcggacatgcagagccggaaggagctggagaagctggacaaggagcaggaggaggagcagcccgcagaaccagagagattaaccacagtgatacctcccagcgaagagcagacggagatcacgctgggggaggtaacagaaggggaaattggccccttcagctccatcaaggtgcccatcgtcttcactccggtcgtcccaggcgacgtccaagccaggttcaaagtcacgtttaagaacccccagtgccccacgctgcatttcagggtcgtgggcgtggccatcgatgtgccggtctgggtgccgaagcccagcgtggacctgaagatctgcatgtatgaccggctctaccaggactctgtgctcgtgcacacgcggtcgaaagctgccctgcgcctgaagttcgaggtgtgcaaggagctgagggcccacctggagctcctgcccaagacaggctatatccaggcacagtcgtcctactccgtgcagctcaagttcctgccgcgacactccctcccggaggacgcagggaggtattttgacaaggagacccgagtcctggaggccccgatgaccatatgggttgccgaccagaacaagccagtgggattcaccgtgcatgccattgtcaccacctcggacctggagctcagtccctcggaggtggattttggctactgcaccatctatgaggccatcaggacggaaatcagcctccacaaccactcgctcctgccccaggagttcgggttcgtcaggcttcccaagtttgtggacgtccaacccaacgatgggtttgggacgatcctgcccctggaaacgctgcagttctgtgtgatcttccagcccaccaaggccgaggaacacagattccaactgacctgcaagtctgagatcaaccggtgcttcaagctgtcttgccgggctgtaggcgtccacccacccctggagctgtcccactaccagatcaagtttgccgccacggccctatacgacacctccgtggctacagtgtacgtcatcaactctcacctgagcatgagctcaccgacccactccaagccccgcattggctcagaggacgcctctcccatggggcccacgtctttcgagttcctgctgcccccagactcgcctatcaccatctcgccctcagtggggaccgtgtggccaggaaagaggtgcctggtccaggtggccttccggccagtgctgcccgagaagctgatccgccaggaagccctcccactcctgaacaaagaaatggagaccaaatctttccgaaagaatatggccccccagaggaaggacctgcatggactgtcattctccgttcttcgagcacagaaccgcgacaagctgttcaaagtctctgtcccccacgtcctggagatgcggaagcgggagctgaggcccagttccgacgagtaccaggccgcccgagccaccctgctcagagcgttccaggcgaagtttgacacatttgtagttccctgtgttgttgccagtggcgacatcaaagacaggaaggggtcagaacccctgagcttcagcccccacaacaccctgtacctggagctgtggtgcccgacggtggcaccatctgttgtggtgacgtcccataaaggcaagaccatctttaacttcggcgacgtcgctgtggggcaccgcagtatcaagaagatctccatccagaacgtctctcccgaggatctggccctggacttctccctgctgaaccccaacggcccctttgtcctgctgaaccactccagcctgctgcgtgcaggtgggacccaggtcctggtgctttccttctctccccacgagagcatcctggctcaagaaacactggacatcatcaccaagagaggcacgctcaccctcaccctcatgggcactggcgtggcgtccatgatcacgtgctccattgaaggcagcgtcctcaacatgggctatgtgattgccggagagtctgtgtcctcaggcttcaagctgcagaacaactctctgctccccatcaagttctccatgcacctggacagcctctccagcacccggggccggggccagcagcagctgccgcagttcctcagctcgccctcccagaggacggaggtggtcgggacgcagaatctcaacggtcagagcgtgttcagcgtggcccccgtcaagggcgtcatggaccccgggaagacacaagacttcactgtcaccttcagccccgaccacgaaagcctctacttctccgacaagctccaggtggtgctctttgaaaagaaaatctcccaccagatcctgctgaagggtgccgcctgtcagcacatgatgttcgtggagggcggcgaccccctggacgtgcccgtggagtctctgacagcgatccctgtatttgaccccaggcacagagaggaagctgaggagctgaggcccatcctggtgaccctggactacatccagtttgacacagacacgccagccccacctgccacccgagagctgcaggtgggctgtatccggaccacccagccatctccaaagaagccagaccacccactcatggtgtcggccctgctgcagctaaggggggatgtgaaggagacctacaaggtcatctttgtagcccaggtgttgactggcccctaagcctctgcacagagcaccctcgggccctcctgtccaccctcaaagccctccccaggctgagggccaggtcatactaccctagagcctgggacctggccatcctctgccagattccaataggccgccctccacatggcgccacggccacttcctgctgccctggaccccgcaagcccagggacatccaagagcacccctcctgagaccccagactcagaagcagcgagaaggccaggccagccctcagccatcctagccagaccccctcagagcccccagcccccaggagagccctccacagcctgtcaataaattttttgtaggccaacacatgca

SEQ ID NO: 3951 - DNA, 2756 bp, Homo sapiens
  source 1..2756: mol_type = unassigned DNA; mol_type = unassigned DNA
gggtctgtgtgcccctccgcactggctactgtcttcctcgggcgccggtcggcttttgcgtccccacattcaatcccaactgcggctcccgcggttcccgcactggccgcagaggagccacggggcacagctggctgtgtttagggccctgcacagccccacagccagtcgctccccccacagttccgaaagaatatggccccccagaggaaggacctgcatggactgtcattctccgttcttcgagcacagaaccgcgacaagctgttcaaagtctctgtcccccacgtcctggagatgcggaagcgggagctgaggcccaggtgggtccaggaggggctgccccacctgcttccctccaggcccctctggtgggacccactgtggcccctgtagagtcccctccctacagattgcccggaatgacccatgtggctggaaggactgatgccttcagacacagctggatccaggtgctgccttcctgggacctacccaccccatttccccaggcctgacacccctgcacacagcctcaatccacgggtggggagcaaagccaccaccccccacccagccccccgggtgcagaatgagccctgggaaagctctaatgggtgcctgtggccccgggaaggaacatggctctctagccaggggccaaaggcacctgccccaacccctagcctccagccaccagctgacgaggacctgaagtgagtgatgagacccccacaggagccagagaagggtggaaaagccagtttgtcagacacaactgggacagccacagcttgggaccctgggaccctgggaccctgaggcagagccgcaggggtccggcctgggccgatggtgggtgggggcaaggcgggagcgcaagcctctgacttccttctagttccgacgagtaccaggccgcccgagccaccctgctcagagcgttccaggcgaagtttgacacatttgtagttccctgtgttgttgccagtggcgacatcaaagacaggaaggggtcagaacccctgagcttcaggtgcggggtgctctggccagaacagggtgtggtcagccgcaaacgcgctgtccctctgctactgcccaactctggggcctgggcgggcagggggccgcccaccctgccctcagcatgcccttcctatcccagcccccacaacaccctgtacctggagctgtggtgcccgacggtggcaccatctgttgtggtgacgtcccataaaggcaagaccatctttaacttcggcgacgtcgctgtggggcaccgcagtatcaagaagatctccatccagaacgtctctcccgaggatctggccctggacttctccctgctgaaccccaacggcccctttgtcctgctgaaccactccagcctgctgcgtgcaggtgggacccaggtcctggtgctttccttctctccccacgagagcatcctggctcaagaaacactggacatcatcaccaagagaggcacgctcaccctcaccctcatgggcactggcgtggcgtccatgatcacgtgctccattgaaggcagcgtcctcaacatgggctatgtgattgccggagagtctgtgtcctcaggcttcaagctgcagaacaactctctgctccccatcaagttctccatgcacctggacagcctctccagcacccggggccggggccagcagcagctgccgcagttcctcagctcgccctcccagaggacggaggtggtcgggacgcagaatctcaacggtcagagcgtgttcagcgtggcccccgtcaagggcgtcatggaccccgggaagacacaagacttcactgtcaccttcagccccgaccacgaaagcctctacttctccgacaagctccaggtggtgctctttgaaaagaaaatctcccaccagatcctgctgaagggtgccgcctgtcagcacatgatgttcgtggagggcggcgaccccctggacgtgcccgtggagtctctgacagcgatccctgtatttgaccccaggcacagagaggccagctcccggccaggccctctctctccagaagctgaggagctgaggcccatcctggtgaccctggactacatccagtttgacacagacacgccagccccacctgccacccgagagctgcaggtgggctgtatccggaccacccagccatctccaaagaagaccgttgagttcagcatagacagcgtcgcatccctgcagcacaagggtttctctattgagccctccaggggctccgtggagcgcggccagacgaagaccatcagcatctcctgggtgccacctgcggactttgatccagaccacccactcatggtgtcggccctgctgcagctaaggggggatgtgaaggagacctacaaggtcatctttgtagcccaggtgttgactggcccctaagcctctgcacagagcaccctcgggccctcctgtccaccctcaaagccctccccaggctgagggccaggtcatactaccctagagcctgggacctggccatcctctgccagattccaataggccgccctccacatggcgccacggccacttcctgctgccctggaccccgcaagcccagggacatccaagagcacccctcctgagaccccagactcagaagcagcgagaaggccaggccagccctcagccatcctagccagaccccctcagagcccccagcccccaggagagccctccacagcctgtcaataaattttttgtaggccaaca

SEQ ID NO: 3952 - DNA, 1972 bp, Homo sapiens
  source 1..1972: mol_type = unassigned DNA; mol_type = unassigned DNA
cacacagcctcaatccacgggtggggagcaaagccaccaccccccacccagccccccgggtgcagaatgagccctgggaaagctctaatgggtgcctgtggccccgggaaggaacatggctctctagccaggggccaaaggcacctgccccaacccctagcctccagccaccagctgacgaggacctgaagtgagtgatgagacccccacaggagccagagaagggtggaaaagccagtttgtcagacacaactgggacagccacagcttgggaccctgggaccctgggaccctgaggcagagccgcaggggtccggcctgggccgatggtgggtgggggcaaggcgggagcgcaagcctctgacttccttctagttccgacgagtaccaggccgcccgagccaccctgctcagagcgttccaggcgaagtttgacacatttgtagttccctgtgttgttgccagtggcgacatcaaagacaggaaggggtcagaacccctgagcttcagcccccacaacaccctgtacctggagctgtggtgcccgacggtggcaccatctgttgtggtgacgtcccataaaggcaagaccatctttaacttcggcgacgtcgctgtggggcaccgcagtatcaagaagatctccatccagaacgtctctcccgaggatctggccctggacttctccctgctgaaccccaacggcccctttgtcctgctgaaccactccagcctgctgcgtgcaggtgggacccaggtcctggtgctttccttctctccccacgagagcatcctggctcaagaaacactggacatcatcaccaagagaggcacgctcaccctcaccctcatgggcactggcgtggcgtccatgatcacgtgctccattgaaggcagcgtcctcaacatgggctatgtgattgccggagagtctgtgtcctcaggcttcaagctgcagaacaactctctgctccccatcaagttctccatgcacctggacagcctctccagcacccggggccggggccagcagcagctgccgcagttcctcagctcgccctcccagaggacggaggtggtcgggacgcagaatctcaacggtcagagcgtgttcagcgtggcccccgtcaagggcgtcatggaccccgggaagacacaagacttcactgtcaccttcagccccgaccacgaaagcctctacttctccgacaagctccaggtggtgctctttgaaaagaaaatctcccaccagatcctgctgaagggtgccgcctgtcagcacatgatgttcgtggagggcggcgaccccctggacgtgcccgtggagtctctgacagcgatccctgtatttgaccccaggcacagagaggccagctcccggccaggccctctctctccagaagctgaggagctgaggcccatcctggtgaccctggactacatccagtttgacacagacacgccagccccacctgccacccgagagctgcaggtgggctgtatccggaccacccagccatctccaaagaagaccgttgagttcagcatagacagcgtcgcatccctgcagcacaagggtttctctattgagccctccaggggctccgtggagcgcggccagacgaagaccatcagcatctcctgggtgccacctgcggactttgatccagaccacccactcatggtgtcggccctgctgcagctaaggggggatgtgaaggagacctacaaggtcatctttgtagcccaggtgttgactggcccctaagcctctgcacagagcaccctcgggccctcctgtccaccctcaaagccctccccaggctgagggccaggtcatactaccctagagcctgggacctggccatcctctgccagattccaataggccgccctccacatggcgccacggccacttcctgctgccctggaccccgcaagcccagggacatccaagagcacccctcctgag

SEQ ID NO: 3953 - DNA, 550 bp, Homo sapiens
  source 1..550: mol_type = unassigned DNA; mol_type = unassigned DNA
ctgtgctctgggtggtgaggcgagcgtctgccctccgcagcactaacccccgtgtgctatgggtcacgtcctgcagctttgacccccctggccccctgtcagccggaatgtcctgtgaagtgcttgtcaccttcaagccgatgataaacaaggatctagaaggaaatatctcatttttggctcagacgggcgagttttcagttccactgaaatgttcaacaaagaaatgttcgagcagtctcctgacctacgaagataaaagcttgtatgacaaagccgccaccagcttctctgagcagcagctagagggcacggagtcctcccaggcggacatgcagagccggaaggagctggagaagctggacaaggagcaggaggaggagcagcccgcagaaccagagagattaaccacagtgatacctcccagcgaagagcagacggagatcacgctgggggaggtaacagaaggggaaattggccccttcagctccatcaaggtgcccatcgtcttcactccggtcgtcccaggcgacgtccaagccaggttcaa

SEQ ID NO: 3954 - DNA, 4710 bp, Homo sapiens
  source 1..4710: mol_type = unassigned DNA; mol_type = unassigned DNA
gttgccatggagctgcccgccccaaaccacgccgccggcgccgcggagggcaatcgccaaggaccgccgcctgcctgagcagcccggggtgtctgtgcctccggagcccgagaacctgggacccaggccagccagagctaatttctatctcccagcatggaggatgacggcagcctgctccctgaggacgagcttttggccgatgcccttcttttggaagatgaaagagatgaattagaggatccggagtttgacatcaaatgtcttctacaggaagctgaggatgacgtggacccgggacacagcagctcagtgaaagaactagatactgatgctgataaattgaagaagaaaacagctgaggacagaacgcaggcatttcacctgcggcagaacctgagcgccctggataagatgcatgaggagcaagagcttttcactgagaagatgagaggggagctgcgcgcctgtcggcagaggcgggacctgatcgacaagcagcaggaggctgtggcagccgagatcgccacagaggaagaggcgggcaacatggccgctgtgggccgcctccaggccgtgtccagacgcctgtttgcagagctggagaacgagagagacctgcagtcgaggactgaggccgtgctgaaggagagcgagaacaccatgtggcacatcgagatccaggaggggcgactcgaggccttccggacagctgaccgtgaggaggtggaggccacggggcggcggctccaggtgcgcgcagccgagcagctctgcagagagcaggaggccctggggaaggtggagcggaaccgactgctgaggatcaggaagtccctgaacacccagaaggagctcgggctcaggcaccagaagctgctggaggacgcccggaagaaccacaaggttgccgtgcggttcctgaaggcctccctgggaagaatccgagagcaagagaagaaggaggagatggagtgccacgagtacatgaggcgacgcatggatgcggtggtggcgctgaagggcagcatctccgcgaaccgggacacactgcggaagttccaagcatgggaccgtgccaaggcagagctggcggagcagagggtccaggctgagaagaaggcgattctggcccagggcagggatgcattcaggcaccttgtccaccagcgccggcgccaggagctggaggcccagaagagggcctttgaggaggagcagaagctcagaaagcaggagatcatcagtcggattctgaaagaggaggctgaggaggaaaagaggaagaaacagcatccccccaccagtgccaggcaccggctgaccctgagggacaagacctggaactacatttctgacttttgcaagaagaccacagtcccaaccaacacgtacacactggactacgaggctgctgcaggccccgggccctctcggttgctggaagtcgtttccagtgagcttatccagggggaccccggggccagctcagaggaggaaacgttagctgagcccgagatctctgggctttggaatgaagactacaagccataccaggtgcccaaggaggacgtggaccgaaagcccgtgggcgggacaaagatggacaaggacatcctggagcgcacggtggagcggctgcggagcagggtggtccacaagcaggtggtgtgggggcgtgagttccaaggacgccccttcaacagcaaaccggagctcctccacttccaggactttgatattggcaaagtgtacaagaaaaagatcacgttggtaaacaccacctacacgatcaactactgcaagctggtgggcgtggaggagcacctccgggacttcatccacgttgactttgacccccctggccccctgtcagccggaatgtcctgtgaagtgcttgtcaccttcaagccgatgataaacaaggatctagaaggaaatatctcatttttggctcagacgggcgagttttcagttccactgaaatgttcaacaaagaaatgttcgctgtccctcgacaaggagctcattgacttcggcagctacgtggtaggagagaccacgtctcggaccatcacgctgaccaacgttgggggcttgggcacgactttcaagttcctgccagcttcagagccctgtgagatggacgactcccagtctgccctgaaattaagcagtctcctgacctacgaagataaaagcttgtatgacaaagccgccaccagcttctctgagcagcagctagagggcacggagtcctcccaggcggacatgcagagccggaaggagctggagaagctggacaaggagcaggaggaggagcagcccgcaggtgagccaggctgccaggccaagccagggtgggcgggcggtgagggcctcagggcagcattccagggggctgaggggcccaggggagggctggaaagtagagaattttcctaggccttcgatgttaagtgacggttaagcaagaaaatattcttatgtgccactaagtgttgtttttggagtggacgaaaatgtacattcacgttgacgctaaccgaagacttgaaggcacctccagcattggcccagcaggcccagcacgggcggagccgcacagggcggggaagaggctctgcggtgccccctggaggggccgggctgcggggggcttctgtctagctctgcagctgtggctgttgttagacgcgcaccagcggggagaggtgccgagaaacgggcgggccctgccctccccatgcctcctgccctgcagcccgccgccatcgggaatcgcttgcgtctcctccttgcttctcttgatcgttttcccacatacgcatcgagatccagaaacctccgtcctcctcctgtctgtcttcgcgtggtgcgcgttccgcacgccctgcagctcagcgcggagctgggccggttctccacagcctgtgtgagccgcacttccggtgtgagccgcacttccggtgtgagccgcacttccggtgtgagccgcacttcctgtcctcaccactgcgtggcgtttcctttcctgagagagcctcgggttctagatccgtccttctgccagtgcacacttgggagcgttcgtggtacacactgttgcgaaggccgttctgcactgccccttggcctgtgtgtgagttcccacagggcacctggctggggctcatgcctgcatcacagggcatagccagcctcactggcatcagctaataccaaagtgagttctttttatgttgagacagggtctctgtcgcctaggctggagtgcagtggtgcagtcacagctcactgcagcctcgacctcccgggctcaagcaatcctcctgcctcagctcctgagtagctggaactacaggcacgcaccaccgcacctggctagtttttgtatttttttgtagacacagggtttcgccatgtttcccaggctggtgtggaactcctgaactcaggctgtctgcccacctcagcctcccaaggtgctggattacaggcatgagccacctcgcctagcccaccgagttctttttcaaagtggttgtgcaagtttacactcccaccaacagtgtacaagactgtgctgtccagcgtggctgtcactgccacatctggctatttaaacttaaattgatccaaattaaataatagtgaaaattcaggtcctcctccacaagggccacatttcacatgctccatagcgacctgtgggcaacggctgccctactggacagcccagaagcccagctctgcctggtcacagagggtcctacggggccacactgggcttgagggccttgcttcacatccgcaggagcacgaggtcacacggcccggggctgcttgtctggggggcctgcaccacggtctgctgttgagatgttgctttttggtttcccagatcaccagtgagattgcgtgtctttccctgggcccatttacaagttgtatcttctttggtgtgacatctctgtttaaggctatcccttgttcttctgtgggattgtctgtcttcttctcattcattcataggagctcttcatgcacccagattccagccctcctccctgaggaatgttgcaggtgctgcctccgagtctgtggctgggccttcctctccctttatgacgtcttttctcaaatcaaagttcttcagtccagtctttgcatatttaccagtcatttctattggaatttgttttttatgatttttaggcaatttttttctcctccagggtcataaagacataggacatcgcttttgtgttgaggtgtatgatccacctcaaattcactcctgcttgtggtggaagtcagggctgaggctcatttcccctggtgcgtgtttgtgtattccacggcacaagtggactctgctatcccattcgatccattcgttgtccgtgtcaaaaatcaattgaccatccaggcacagtggctcatgcctgtaatcccagaactttgggaggccgaggcaggaggatcacttgaggtcaagagtttgagaccagcctggccaacatggtgaaaccccatttctactaaaaatacaaaaaattagccaggcgtggtggcgggcgcctgtaatcccagctacttgggtggctgaggcaagagaattgcttgaacccgggaggcggaggttgcagtgagctgagatcgcgccattgcactccagcctggcctataagagtaaaatactgtctc

SEQ ID NO: 3955 - DNA, 2585 bp, Homo sapiens
  source 1..2585: mol_type = unassigned DNA; mol_type = unassigned DNA
caggccagccagagctaatttctatctcccagcatggaggatgacggcagcctgctccctgaggacgagcttttggccgatgcccttcttttggaagatgaaagagatgaattagaggatccggagtttgacatcaaatgtcttctacaggaagctgaggatgacgtggacccgggacacagcagctcagtgaaagaactagatactgatgctgataaattgaagaagaaaacagctgaggacagaacgcaggcatttcacctgcggcagaacctgagcgccctggataagatgcatgaggagcaagagcttttcactgagaagatgagaggggagctgcgcgcctgtcggcagaggcgggacctgatcgacaagcagcaggaggctgtggcagccgagatcgccacagaggaagaggcgggcaacatggccgctgtgggccgcctccaggccgtgtccagacgcctgtttgcagagctggagaacgagagagacctgcagtcgaggactgaggccgtgctgaaggagagcgagaacaccatgtggcacatcgagatccaggaggggcgactcgaggccttccggacagctgaccgtgaggaggtggaggccacggggcggcggctccaggtgcgcgcagccgagcagctctgcagagagcaggaggccctggggaaggtggagcggaaccgactgctgaggatcaggaagtccctgaacacccagaaggagctcgggctcaggcaccagaagctgctggaggacgcccggaagaaccacaaggttgccgtgcggttcctgaaggcctccctgggaagaatccgagagcaagagaagaaggaggagatggagtgccacgagtacatgaggcgacgcatggatgcggtggtggcgctgaagggcagcatctccgcgaaccgggacacactgcggaagttccaagcatgggaccgtgccaaggcagagctggcggagcagagggtccaggctgagaagaaggcgattctggcccagggcagggatgcattcaggcaccttgtccaccagcgccggcgccaggagctggaggcccagaagagggcctttgaggaggagcagaagctcagaaagcaggagatcatcagtcggattctgaaagaggaggctgaggaggaaaagaggaagaaacagcatccccccaccagtgccaggcaccggctgaccctgagggacaagacctggaactacatttctgacttttgcaagaagaccacagtcccaaccaacacgtacacactggactacgaggctgctgcaggccccgggccctctcggttgctggaagtcgtttccagtgagcttatccagggggaccccggggccagctcagaggaggaaacgttagctgagcccgagatctctgggctttggaatgaagactacaagccataccaggtgcccaaggaggacgtggaccgaaagcccgtgggcgggacaaagatggacaaggacatcctggagcgcacggtggagcggctgcggagcagggtggtccacaagcaggtggtgtgggggcgtgagttccaaggacgccccttcaacagcaaaccggagctcctccacttccaggactttgatattggcaaagtgtacaagaaaaagatcacgttggtaaacaccacctacacgatcaactactgcaagctggtgggcgtggaggagcacctccgggacttcatccacgttgactttgacccccctggccccctgtcagccggaatgtcctgtgaagtgcttgtcaccttcaagccgatgataaacaaggatctagaaggaaatatctcatttttggctcagacgggcgagttttcagttccactgaaatgttcaacaaagaaatgttcgctgtccctcgacaaggagctcattgacttcggcagctacgtggtaggagagaccacgtctcggaccatcacgctgaccaacgttgggggcttgggcacgactttcaagttcctgccagcttcagagccctgtgagatggacgactcccagtctgccctgaaattaagcagtctcctgacctacgaagataaaagcttgtatgacaaagccgccaccagcttctctgagcagcagctagagggcacggagtcctcccaggcggacatgcagagccggaaggagctggagaagctggacaaggagcaggaggaggagcagcccgcagtgttgtttttggagtggacgaaaatgtacattcacgttgacgctaaccgaagacttgaaggcacctccagcattggcccagcaggcccagcacgggcggagccgcacagggcggggaagaggctctgcggtgccccctggaggggccgggctgcggggggcttctgtctagctctgcagctgtggctgttgttagacgcgcaccagcggggagaggtgccgagaaacgggcgggccctgccctccccatgcctcctgccctgcagcccgccgccatcgggaatcgcttgcgtctcctccttgcttctcttgatcgttttcccacatacgcatcgagatccagaaacctccgtcctcctcctgtctgtcttcgcgtg

SEQ ID NO: 3956 - DNA, 540 bp, Homo sapiens
  source 1..540: mol_type = unassigned DNA; mol_type = unassigned DNA
gactgtgctctgggtggtgaggcgagcgtctgccctccgcagcactaacccccgtgtgctatgggtcacgtcctgcagctttgacccccctggccccctgtcagccggaatgtcctgtgaagtgcttgtcaccttcaagccgatgataaacaaggatctagaaggaaatatctcatttttggctcagacgggcgagttttcagttccactgaaatgttcaacaaagaaatgttcgctgtccctcgacaaggagctcattgacttcggcagctacgtggtaggagagaccacgtctcggaccatcacgctgaccaacgttgggggcttgggcacgactttcaagttcctgccagcttcagagccctgtgagatggacgactcccagtctgccctgaaattaagcagtctcctgacctacgaagataaaagcttgtatgacaaagccgccaccagcttctctgagcagcagctagagggcacggagtcctcccaggcggacatgcagagccggaaggagctggagaagctggacaaggagca

SEQ ID NO: 3957 - DNA, 2145 bp, Homo sapiens
  source 1..2145: mol_type = unassigned DNA; mol_type = unassigned DNA
gttgccatggagctgcccgccccaaaccacgccgccggcgccgcggagggcaatcgccaaggaccgccgcctgcctgagcagcccggggtgtctgtgcctccggagcccgagaacctgggacccaggccagccagagctaatttctatctcccagcatggaggatgacggcagcctgctccctgaggacgagcttttggccgatgcccttcttttggaagatgaaagagatgaattagaggatccggagtttgacatcaaatgtcttctacaggaagctgaggatgacgtggacccgggacacagcagctcagtgaaagaactagatactgatgctgataaattgaagaagaaaacagctgaggacagaacgcaggcatttcacctgcggcagaacctgagcgccctggataagatgcatgaggagcaagagcttttcactgagaagatgagaggggagctgcgcgcctgtcggcagaggcgggacctgatcgacaagcagcaggaggctgtggcagccgagatcgccacagaggaagaggcgggcaacatggccgctgtgggccgcctccaggccgtgtccagacgcctgtttgcagagctggagaacgagagagacctgcagtcgaggactgaggccgtgctgaaggagagcgagtgagtcggtgtgcagccgggactggcagcaggcaggccccagaacgaacagcgagctgggttttcaaagcccaggagagagacagctgcctcgtcctaaatgctttcctgtggagttgggttggatgcgtcgagttgccttcggcgagtttggcaagaaggggtttgggaaggtgcacgaatttctcagggcgactgaggggaccctgagctgacctcaagtaggactcccgaaccacacagcccccagccccgggagctgcagccaggtccatgacatccacagcactgaccctgcacgtgcccgggatgacctaagctttccagcctgggcagggcaggaggcacagagagggctgagtgcaggcctcaggccaccccacccctaagagtgcccatgccgccagccctcatgcaacctaacatctcagcctcactccactgaagacaccactgagctttgacccagtctctgacctgcactcactgtgatgtagtcacgacccagtctctgacccacacttgctgtgacgtagtttctggcccagtctctgacccacgctcgctgtgatacagtcacgacccaagctggtgtccagtgccctgcactgtggccccacctgtgtgggcagtgggaggggtgcaggggaggacaggacgctgaacccagctgtggctgagcgtggagaacactgtcccctgcgacactcctttgacaactggctctgtcatgcccctctcactgctcagcagcacctgcgccagggtgaggggcttcacagggctaatgaaccccagaaggcctcactttactaggttgatgtgattgtccacttctttaaaaaaaaaaaaaaaaaaagtttttgggctgggcccagtggctcatgcctataatcccaacactttgggaggcccaggctggtggatcacctgaggtcaggagttcaagaccagcccaggcaacatagcgaaaccctgtctctactaaaaatacaaaaattaactgggcgtggtggtgcatgcctgtaatcccagctactcgggaggctgaggcaggagaatcgctggagcccagaggtagaggttgcagtgagccaagattgcgccactgccacactccagcctgggcgacagagtgagcaagactctgtcttttaaaaaaaaaaaaaatggctgggcgcggtggctcacgcctgtcatcccagcactttgggaggccgaggcgggtggatcacaaggtcaggagatcgagaccatcctggctaacacggtgaaacccccatctctactaaaaatacaaaaaattagccgggcgtgctggcaggcgcctgtagtcccagctactcggaaggctgaggcaggagaatggcgtgagcccgggaggcggagcttgcagtgagccaagattgcgtcactgcactccagcctgggcgacagagcgagactccgtctcaaaaataaataaataaataaagttttattttgaaac

SEQ ID NO: 3958 - DNA, 441 bp, Homo sapiens
  source 1..441: mol_type = unassigned DNA; mol_type = unassigned DNA
gaggacgagcttttggccgatgcccttcttttggaagatgaaagagatgaattagaggatccggagtttgacatcaaatgtcttctacaggaagctgaggatgacgtggacccgggacacagcagctcagtgaaagaactagatactgatgctgataaattgaagaagaaaacagctgaggacagaacgcaggcatttcacctgcggcagaacctgagcgccctggataagatgcatgaggagcaagagcttttcactgagaagatgagcgtctcctaaaaactaaaaacattcagcggagagtggtggcgcacgcctgtggtcccagtgacttgggaggctgaggccagaggatggcttgagcccaggaggtcaaggctgcagcaagcctgggtgacagagcaagaccctgtctctaaaaataaaaaactgaaagacaaa

SEQ ID NO: 3959 - DNA, 564 bp, Homo sapiens
  source 1..564: mol_type = unassigned DNA; mol_type = unassigned DNA
tgggatcagcatccctactttttgagaggctaactctgaggactcctcctatttatggagcaggcacccaacatggctgagccccggggccccgtagaccatggagtccagattcgcttcatcacagagccagtgagtggtgcagagatgggcactctacgtcgaggtggacgacgcccagctaaggatgcaagagccagtacctacggggttgctgtgcgtgtgcagggaatcgctgggcagccctttgtggtgctcaacagtggggagaaaggcggtgactcctttggggtccaaatcaagggggccaatgaccaaggggcctcaggagctctgagctcagatttggaactccctgagaacccctactctcaggtcaagggatttcctgccccctcgcagagcagcacatctgatgaggagcctggggcctactggaatggaaagctactccgttcccactcccaggcctcactggcaggccctggcccagtggatcctagtaacagaagcaacagcatgctggagctagccccgaaagtggcttccccaggtagcaccatt

SEQ ID NO: 3960 - DNA, 589 bp, Homo sapiens
  source 1..589: mol_type = unassigned DNA; mol_type = unassigned DNA
cgtcgggggacaacggagatattttctgcagaaagtgacgaaagagcattctggttcctgcagaggactcctcctatttatggagcaggcacccaacatggctgagccccggggccccgtagaccatggagtccagattcgcttcatcacagagccagtgagtggtgcagagatgggcactctacgtcgaggtggacgacgcccagctaaggatgcaagagccagtacctacggggttgctgtgcgtgtgcagggaatcgctgggcagccctttgtggtgctcaacagtggggagaaaggcggtgactcctttggggtccaaatcaagggggccaatgaccaaggggcctcaggagctctgagctcagatttggaactccctgagaacccctactctcaggtcaagggatttcctgccccctcgcagagcagcacatctgatgaggagcctggggcctactggaatggaaagctactccgttcccactcccaggcctcactggcaggccctggcccagtggatcctagtaacagaagcaacagcatgctggagctagccccgaaagtggcttccccaggtagcaccatt

SEQ ID NO: 3961 - DNA, 1138 bp, Homo sapiens
  source 1..1138: mol_type = unassigned DNA; mol_type = unassigned DNA
agggagctccgaggacgagggggagggccggagctgcgcgtgctgctttgcccgagcccgagcccgagcccgagcccgagcccgagcccgagcccgaacgcaagcctgggagcgcggagcccggctaggacagagtcttactctattgcccaagctggagtgcagtggtgcaattacagctcactgcagcttcaacctcctgggctcaggtgatcctcctgcctcagcctcctaagtcgctgggactacaggactcctcctatttatggagcaggcacccaacatggctgagccccggggccccgtagaccatggagtccagattcgcttcatcacagagccagtgagtggtgcagagatgggcactctacgtcgaggtggacgacgcccagctaaggatgcaagagccagtacctacggggttgctgtgcgtgtgcagggaatcgctgggcagccctttgtggtgctcaacagtggggagaaaggcggtgactcctttggggtccaaatcaagggggccaatgaccaaggggcctcaggagctctgagctcagatttggaactccctgagaacccctactctcaggtcaagggatttcctgccccctcgcagagcagcacatctgatgaggagcctggggcctactggaatggaaagctactccgttcccactcccaggcctcactggcaggccctggcccagtggatcctagtaacagaagcaacagcatgctggagctagccccgaaagtggcttccccaggtagcaccattgacactgctcccctgtcttcagtggactcactcatcaacaagtttgacagtcaacttggaggccaggcccggggtcggactggccgccgaacacggatgctaccccctgaacagcgcaaacggagcaagagcctggacagccgcctcccacgggacacctttgaggaacgggagcgccagtccaccaaccactggacctctagcacaaaatatgacaaccatgtgggcacttcgaagcagccagcccagagccagaacctgagtcctctcagtggctttagccgttctcgtcagactcaggactgggtccttcagagttttgaggagccgcggaggagtgcacaggaccccaccatgctgcag

SEQ ID NO: 3962 - DNA, 5091 bp, Homo sapiens
  source 1..5091: mol_type = unassigned DNA; mol_type = unassigned DNA
gaggacgagggggagggccggagctgcgcgtgctgctttgcccgagcccgagcccgagcccgagcccgagcccgagcccgagcccgaacgcaagcctgggagcgcggagcccggctagggactcctcctatttatggagcaggcacccaacatggctgagccccggggccccgtagaccatggagtccagattcgcttcatcacagagccagtgagtggtgcagagatgggcactctacgtcgaggtggacgacgcccagctaaggatgcaagagccagtacctacggggttgctgtgcgtgtgcagggaatcgctgggcagccctttgtggtgctcaacagtggggagaaaggcggtgactcctttggggtccaaatcaagggggccaatgaccaaggggcctcaggagctctgagctcagatttggaactccctgagaacccctactctcaggtcaagggatttcctgccccctcgcagagcagcacatctgatgaggagcctggggcctactggaatggaaagctactccgttcccactcccaggcctcactggcaggccctggcccagtggatcctagtaacagaagcaacagcatgctggagctagccccgaaagtggcttccccaggtagcaccattgacactgctcccctgtcttcagtggactcactcatcaacaagtttgacagtcaacttggaggccaggcccggggtcggactggccgccgaacacggatgctaccccctgaacagcgcaaacggagcaagagcctggacagccgcctcccacgggacacctttgaggaacgggagcgccagtccaccaaccactggacctctagcacaaaatatgacaaccatgtgggcacttcgaagcagccagcccagagccagaacctgagtcctctcagtggctttagccgttctcgtcagactcaggactgggtccttcagagttttgaggagccgcggaggagtgcacaggaccccaccatgctgcagttcaaatcaactccagacctccttcgagaccagcaggaggcagccccaccaggcagtgtggaccatatgaaggccaccatctatggcatcctgagggagggaagctcagaaagtgaaacctctgtgaggaggaaggttagtttggtgctggagaagatgcagcctctagtgatggtttcttctggttctactaaggccgtggcagggcagggtgagcttacccgaaaagtggaggagctacagcgaaagctggatgaagaggtgaagaagcggcagaagctagagccatcccaagttgggctggagcggcagctggaggagaaaacagaagagtgcagccgactgcaggagctgctggagaggaggaagggggaggcccagcagagcaacaaggagctccagaacatgaagcgcctcttggaccagggtgaagatttacgacatgggctggagacccaggtgatggagctgcagaacaagctgaaacatgtccagggtcctgagcctgctaaggaggtgttactgaaggacctgttagagacccgggaacttctggaagaggtcttggaggggaaacagcgagtagaggagcagctgaggctgcgggagcgggagttgacagccctgaagggggccctgaaagaggaggtagcctcccgtgaccaggaggtggaacatgtccggcagcagtaccagcgagacacagagcagctccgcaggagcatgcaagatgcaacccaggaccatgcagtgctggaggccgagaggcagaagatgtcagcccttgtgcgagggctgcagagggagctggaggagacttcagaggagacagggcattggcagagtatgttccagaagaacaaggaggatcttagagccaccaagcaggaactcctgcagctgcgaatggagaaggaggagatggaagaggagcttggagagaagatagaggtcttgcagagggaattagagcaggcccgagctagtgctggagatactcgccaggttgaggtgctcaagaaggagctgctccggacacaggaggagcttaaggaactgcaggcagaacggcagagccaggaggtggctgggcgacaccgggaccgggagttggagaagcagctggcggtcctgagggtcgaggctgatcgaggtcgggagctggaagaacagaacctccagctacaaaagaccctccagcaactgcgacaggactgtgaagaggcttccaaggctaagatggtggccgaggcagaggcaacagtgctggggcagcggcgggccgcagtggagacgacgcttcgggagacccaggaggaaaatgacgaattccgccggcgcatcctgggtttggagcagcagctgaaggagactcgaggtctggtggatggtggggaagcggtggaggcacgactacgggacaagctgcagcggctggaggcagagaaacagcagctggaggaggccctgaatgcgtcccaggaagaggaggggagtctggcagcagccaagcgggcactggaggcacgcctagaggaggctcagcgggggctggcccgcctggggcaggagcagcagacactgaaccgggccctggaggaggaagggaagcagcgggaggtgctccggcgaggcaaggctgagctggaggagcagaagcgtttgctggacaggactgtggaccgactgaacaaggagttggagaagatcggggaggactctaagcaagccctgcagcagctccaggcccagctggaggattataaggaaaaggcccggcgggaggtggcagatgcccagcgccaggccaaggattgggccagtgaggctgagaagacctctggaggactgagccgacttcaggatgagatccagaggctgcggcaggccctgcaggcatcccaggctgagcgggacacagcccggctggacaaagagctactggcccagcgactgcaggggctggagcaagaggcagagaacaagaagcgttcccaggacgacagggcccggcagctgaagggtctcgaggaaaaagtctcacggctggaaacagagttagatgaggagaagaacaccgtggagctgctaacagatcgggtgaatcgtggccgggaccaggtggatcagctgaggacagagctcatgcaggaaaggtctgctcggcaggacctggagtgtgacaaaatctccttggagagacagaacaaggacctgaagacccggttggccagctcagaaggcttccagaagcctagtgccagcctctctcagcttgagtcccagaatcagttgttgcaggagcggctacaggctgaagagagggagaagacagttctgcagtctaccaatcgaaaactggagcggaaagttaaagaactatccatccagattgaagacgagcggcagcatgtcaatgaccagaaagaccagctaagcctgagggtgaaggctttgaagcgtcaggtggatgaagcagaagaggaaattgagcgactggacggcctgaggaagaaggcccagcgtgaggtggaggagcagcatgaggtcaatgaacagctccaggcccggatcaagtctctggagaaggactcctggcgcaaagcttcccgctcagctgctgagtcagctctcaaaaacgaagggctgagctcagatgaggaattcgacagtgtctacgatccctcgtccattgcatcactgcttacggagagcaacctacagaccagctcctgttagctcgtggtcctcaaggactcagaaaccaggctcgaggcctatcccagcaagtgctgctctgctctgcccaccctgggttctgcattcctatgggtgacccaattattcagacctaagacagggaggggtcagagtgatggtgataaaaaaaaaaaatcatcagcaataagctgatagatggactttccactgtaggagtggacatttcaagccaactgagccttttcctcaagtgccgacacctccctcatctctcttatagtggaaggatggtcagcattaggctgatggggactgagaaggataggaagggatagaaattgccatgtgtataaagctttattctttagcccttaaccctaaggctcagggaaataccctatgttattgtgctccctggattcctgcaactcattttccttccactctggagcagggtgaggggaatgttatgggtaacagacatgcaggcatggctctacccatttctttgcacaagtatggggcccatgtggtagtccccatacccctccagttcctatatttttgtcttcttcctttcccctctttgccattcctaccttgcatttttcctgtcagtgccttagccaaggcaaggagataaggatgctcttcttgctttttatatctgcacattcatacctctccaaagaccagcttttccccagccagggccctcagccttccctgctgccccagtgattgattgagagagctgttggggtttctctgccaatgacccctgggagagggactttggtagggtcatgataaagtggcgggggtctggtcctgctcagggttttcatccttcctcctctccctcctctgtgactgtggatatggttataaggtggttgcacctgggagccctgacaactggctgcacaaattccaaaagtaaaggtgtcagtccctgtggccttccttggggcttctctgaccacatgtgcccaacttcaataagagaaccaagggaccctcattttctgaggtgcttggctctgattcagggctttgcaaggggttagaagctgactgtaaaaatgggaagaggcaacggaagacatttatttctcctttggattttggggagaaccaagccctggtagggaagaggtaagggggatgattcacctccatatttcctaagcaggttgtatagggagccggtggcaggaggaaggctgttttcacaaatgacttgtaatgtcgtgattaaaaaaattcctatattcttctgcaaatcaaacgttctttcccaatccaatccagccttggttttattttaaattaaatattaaaattacacatttatattgaaa

SEQ ID NO: 3963 - DNA, 394 bp, Homo sapiens
  source 1..394: mol_type = unassigned DNA; mol_type = unassigned DNA
cacaggaccccaccatgctgcagttcaaatcaactccagacctccttcgagaccagcaggaggcagccccaccaggcagtgtggaccatatgaaggccaccatctatggcatcctgagggagggaagctcagaaagtgaaacctctgtgaggaggaaggttagtttggtgctggagaagatgcagcctctagtggccgtggcagggcagggtgagcttacccgaaaagtggaggagctacagcgaaagctggatgaagaggtgaagaagcggcagaagctagagccatcccaagttgggctggagcggcagctggaggagaaaacagaagagtgcagccgactgcaggagctgctggagaggaggaagggggaggcccagcagagcaacaagga

SEQ ID NO: 3964 - DNA, 373 bp, Homo sapiens
  source 1..373: mol_type = unassigned DNA; mol_type = unassigned DNA
gacctcttccctctgagccttctggtgtccaactctccccttctctaggaccatgcagtgctggaggccgagaggcagaagatgtcagcccttgtgcgagggctgcagagggagctggaggagacttcagaggagacagggcattggcagagtatgttccagaagaacaaggaggatcttagagccaccaagcaggaactcctgcagctgcgaatggagaaggaggagatggaagaggagcttggagagaagatagaggtcttgcagagggaattagagcaggcccgagctagtgctggagatactcgccaggttgaggtgctcaagaaggagctgctccggacacaggaggagcttaaggaactgcaggcag

SEQ ID NO: 3965 - DNA, 2956 bp, Homo sapiens
  source 1..2956: mol_type = unassigned DNA; mol_type = unassigned DNA
agggcactgaggtgtgacctgtggaaaaagggtgggacttccaagcctctttctgtactagcggtcaaaaccgacagcccacagttgatgagttttgtttggctgcagtattttcaacaactttgaatcaattgccaatgtttagaaatttatagaggtcacctaaaaatttggatttctagtttcttttgtatttggcagatatggtaatactgagtgtcttgtcctgagtctgcatggcaacagttggctggagctgagcagtgggtttcccctttagagtgaacagtattcttcagtttgctatatttgataataataatagcagcagcaaacatattgtgctgtgtgataggcacttaagacttaatcctcagaataactctgtggggtaggtagtcttgttttctccattttacagatgaaggaaactgaggcacagagagatgaacttgtccatggtctactgccaggaagtggtaaatctgattttcagactggacagtctggtcccatgtacatactcttagcctctacgtggtactgcctccagtacctcagtttctgagtctcttcacctcagccttggcccaggtacttgggtttctctctcttttcccattagagaaataaggttttccaatgaagagtagattctggggtttgcctttctgtcaaagggccgtcaccagagcatggccccgacctgcccatgatgccacatctggtcagtagagggcgctggctccatagtggctctgggtccaggcaagtaccaaaaggttactgggatgtgcaagagagaaaagtctgttaatgctggagtttgagaggctcctggtctgagtttggcattctggtgtccagcatttgggacagaattacttgttcttctgtcctaggaaaaagtctcacggctggaaacagagttagatgaggagaagaacaccgtggagctgctaacagatcgggtgaatcgtggccgggaccaggtggatcagctgaggacagagctcatgcaggaaaggtctgctcggcaggacctggagtgtgacaaaatctccttggagagacagaacaaggacctgaagacccggttggccagctcagaaggcttccagaagcctagtgccagcctctctcagcttgagtcccagaatcagttgttgcaggagcggctacaggctgaagagagggagaagacagttctgcagtctaccaatcgaaaactggagcggaaagttaaagaactatccatccagattgaagacgagcggcagcatgtcaatgaccagaaagaccagctaagcctgagggtgaaggctttgaagcgtcaggtggatgaagcagaagaggaaattgagcgactggacggcctgaggaagaaggcccagcgtgaggtggaggagcagcatgaggtcaatgaacagctccaggcccggatcaagtctctggagaaggactcctggcgcaaagcttcccgctcagctgctgagtcagctctcaaaaacgaagggctgagctcagatgaggaattcgacagtgtctacgatccctcgtccattgcatcactgcttacggagagcaacctacagaccagctcctgttagctcgtggtcctcaaggactcagaaaccaggctcgaggcctatcccagcaagtgctgctctgctctgcccaccctgggttctgcattcctatgggtgacccaattattcagacctaagacagggaggggtcagagtgatggtgataaaaaaaaaaaatcatcagcaataagctgatagatggactttccactgtaggagtggacatttcaagccaactgagccttttcctcaagtgccgacacctccctcatctctcttatagtggaaggatggtcagcattaggctgatggggactgagaaggataggaagggatagaaattgccatgtgtataaagctttattctttagcccttaaccctaaggctcagggaaataccctatgttattgtgctccctggattcctgcaactcattttccttccactctggagcagggtgaggggaatgttatgggtaacagacatgcaggcatggctctacccatttctttgcacaagtatggggcccatgtggtagtccccatacccctccagttcctatatttttgtcttcttcctttcccctctttgccattcctaccttgcatttttcctgtcagtgccttagccaaggcaaggagataaggatgctcttcttgctttttatatctgcacattcatacctctccaaagaccagcttttccccagccagggccctcagccttccctgctgccccagtgattgattgagagagctgttggggtttctctgccaatgacccctgggagagggactttggtagggtcatgataaagtggcgggggtctggtcctgctcagggttttcatccttcctcctctccctcctctgtgactgtggatatggttataaggtggttgcacctgggagccctgacaactggctgcacaaattccaaaagtaaaggtgtcagtccctgtggccttccttggggcttctctgaccacatgtgcccaacttcaataagagaaccaagggaccctcattttctgaggtgcttggctctgattcagggctttgcaaggggttagaagctgactgtaaaaatgggaagaggcaacggaagacatttatttctcctttggattttggggagaaccaagccctggtagggaagaggtaagggggatgattcacctccatatttcctaagcaggttgtatagggagccggtggcaggaggaaggctgttttcacaaatgacttgtaatgtcgtgattaaaaaaattcctatattcttctgcaaatcaaacgttctttcccaatccaatccagccttggttttattttaaattaaatattaaaattacacatttatattgaaa

SEQ ID NO: 3966 - DNA, 930 bp, Homo sapiens
  source 1..930: mol_type = unassigned DNA; mol_type = unassigned DNA
gcggctacaggctgaagagaggtgacataagcctatccttcctcccttcctccctccttttcttcctccctccctcttggcttttctcctctgtggctccctccatcttccacctcagatatggccagcctggcctgatctttagggaacactttctcctgatagagagcaaagagtgttgcagaaattctgaaatgtgaatgacgtcactctccctcattctttgaatctgccctggatcctgcccagtctaatggtggagctcatggctgagaggagtccttggggacagtagggggccaagttaggattcccttagaaatggggacactcatagacattcttctacctcaccttagggagaagacagttctgcagtctaccaatcgaaaactggagcggaaagttaaagaactatccatccagattgaagacgagcggcagcatgtcaatgaccagaaagaccagctaagcctgagggtgaaggctttgaagcgtcaggtggatgaagcagaagaggaaattgagcgactggacggcctgaggaagaaggcccagcgtgaggtggaggagcagcatgaggtcaatgaacagctccaggcccggatcaagtctctggagaaggactcctggcgcaaagcttcccgctcagctgctgagtcagctctcaaaaacgaagggctgagctcagatgaggaattcgacagtgtctacgatccctcgtccattgcatcactgcttacggagagcaacctacagaccagctcctgttagctcgtggtcctcaaggactcagaaaccaggctcgaggcctatcccagcaagtgctgctctgctctgcccaccctgggttctgcattcctatgggtgacccaattattcagacctaagacagggaggggtcagagtgatggtgataaaaaaaaaaaa

SEQ ID NO: 3967 - DNA, 7224 bp, Homo sapiens
  source 1..7224: mol_type = unassigned DNA; mol_type = unassigned DNA
gcactccggccgggctctgctggctgcggcgggagctggacgcgggaggaggcggcggcggcgctggaacagtgaaccatggagctgtatttcggtgaatatcaacatgtgcagcaggaatatggggtccatctgagactcgcaagtgatgatacccaaaaatcaaggagttcccagaactccaaggcaggctcctacggtgtcagtattcgggtccagggaattgatggtcacccctatattgtcctgaataacacagaacggtgcctagcaggcacatcgttttctgaaaatgggccaccctttccacctccagtgataaataacctgcctctacattccagcaatggttctgtgccaaaggagaacagtgaagaacttcagcttccagaaaacccatacgcccagcctagcccaataagaaacctgaaacagcccctgctccatgagggcaagaatggagttctagatcgcaaagacgggtctgtgaagccatctcacctgctgaactttcagaggcatccagagcttttgcaaccctatgaccctgaaaagaatgagttgaatttacaaaatcaccagccttctgagagtaattggctaaaaacgttgacagaagaaggcatcaacaataagaagccttggacttgctttcccaaacctagcaattcccagcctaccagtccctccttggaagacccggccaaatctggtgtgacagctattcgtttatgcagctccgtggtcatagaggaccccaaaaagcagacctcagtgtgtgtaaacgttcagagctgcaccaaggagagggtgggagaggaggcccttttcactagcgggaggcccctgactgcccacagcccacatgcccaccctgaaaccaagaaaaccaggccagatgttcttcccttccggcgacaggattcagcgggacccgtcctggatggagctcggtcccggaggtcctcctcgtcatccacaactcccacgtcagccaactctttgtacaggtttttactggatgatcaggaatgtgccatccatgccgacaacgtcaatcgtcatgaaaacagaaggtatattcccttcctgccaggaactggacgggatattgatacaggatcaattcctggtgtggatcagttaattgaaaaatttgatcaaaaacctgggcttcagagaagaggaaggtctgggaagcgaaacagaattaatacagatgacaggaaaagatccagaagcgtggatagcgcctttccttttggcctccaagggaactcggagtacctgattgaattcagtaggaacttgggcaagtcaagcgaacacctcctccggccttcccaggtgtgcccgcagcggccactgtctcaggagcgccgtgggaaacagagcgtgggccgcacctttgcaaagctgcagggagcagcgcacggggcttcatgtgcccactccaggcctccccagccgaacatagatgggaaagttctggaaaccgaaggtagtcaggaaagtacagtgatccgtgcgccctcccttggtgcacagagtaaaaaggaggaggaggtgaaaacagccaccgctacgctgatgttacagaaccgggcaacagcaacttcgcctgattctggtgccaagaaaatttccgtgaagacatttccttcggcctcaaatactcaggccacaccggatctcttaaagggccagcaagagctcactcagcaaaccaatgaggagacagctaagcagattctctacaattacctcaaagaaggaagcactgataatgacgatgctactaaaaggaaagtcaacttggtctttgagaaaatccagaccttaaagtctcgagcagctgggagcgcccaaggaaataaccaagcttgtaattccacatctgaagtcaaagatctattggaacagaaaagcaagttgaccatagaagtggctgaacttcagagacagcttcaactggaagtcaagaatcaacagaacattaaagaagagagagagaggatgagagcaaacctagaagagctccgaagccaacacaacgaaaaggtggaggagaactccacattgcagcaacgactggaagaaagtgaaggggagctccggaagaatctggaggagctattccaggtgaagatggaacgggagcagcatcagactgagatcagggatctccaggaccagctctcagaaatgcacgatgaactggacagtgcaaagcgatcggaggacagggagaagggagctctgattgaggagctcttacaggcaaaacaggatcttcaagatctgctgattgccaaagaggagcaagaagacctcttgagaaagcgagagcgtgaactcaccgccctgaagggagccctgaaagaagaggtttccagccatgatcaggagatggacaagctgaaggagcaatatgatgctgagttgcaggccctgagggagagtgtggaagaagcaaccaagaatgtcgaggtcttggcgagcaggagcaacacttcagagcaagaccaggcggggactgaaatgcgcgtgaagcttctgcaggaggagaatgagaagctgcagggaagaagcgaagagctggagcggagagttgctcagcttcaaaggcagatcgaggacctgaaaggcgatgaagccaaggcgaaggaaacgctgaagaagtacgagggagaaatacgacagttagaggaggcccttgtgcacgccagaaaggaagaaaaagaagctgtgtcagccagaagggccctggagaatgaactggaggctgctcagggaaatctgagtcagactacccaggagcagaagcagttgtctgagaagctcaaagaggagagtgagcagaaggagcagctaagaaggttgaagaacgagatggagaatgagcggtggcacctgggcaaaaccattgagaaactgcagaaggagatggcagacattgttgaggcctcccgtacctcaaccctggagctccagaaccagctggatgagtataaggagaaaaaccgcagggagctcgcagaaatgcaaagacagttgaaggagaaaacgctggaggcagaaaagtcccgactgacagccatgaaaatgcaggatgagatgcgtctgatggaggaagagttacgggactaccagagagctcaggatgaagcactcacaaaaaggcagcttctggagcagacgctgaaggacctggagtatgagctggaagccaagagtcacctcaaagatgaccgcagcaggctggtcaagcagatggaggacaaggtgtctcaactggagatggaactggaagaagagagaaacaactcagatttgctgtctgagaggatcagtaggagcagggaacagatggagcagttgaggaatgagctacttcaggagagagctgcgagacaagacttggagtgcgacaagatttccctggagaggcagaacaaggacttaaagagccggattatccacctggaaggttcctacaggtccagcaaagaggggctggttgtgcagatggaggccaggatcgcggagctggaggaccgcctggagagtgaggagagggatcgggccaatcttcagctcagcaaccggcggctggagcggaaagtgaaggagctggtgatgcaggtggatgatgagcacctgtcattgactgatcagaaggaccagctgagcttgcgtttgaaagccatgaagcggcaggtggaggaggctgaggaggaaatcgacagactggaaagttctaaaaagaagctgcagagggagctggaggagcagatggacatgaatgagcatctgcaggggcagctcaactccatgaagaaggacttaagactgaagaagctgccgagtaaagtgctggatgacatggatgacgacgatgacctcagcacggatgggggaagcctctatgaggcgcctgtgagctacacattctccaaggacagcaccgtcgccagccagatctgagtgctctcccgggctgtggaagtacctgtcattcctgcaggagctgcagccacccaaagtgggaggcagggaggggagcatctgtctgccactgagaccaatcacagcctctttgcacagcatgccagctcctcagtgttacattcctcgccagggtctctcagtgggtcttcgacagagagcttttgcagtttaaaatgttgggatgcctgaggaccaggagccaccacccactggggtgttgtgagagatacactttggtaggctgaggcccctgttccacagccactatttgcattgctgtccctgccccctcatcactccccctgccaagacaaagggtccagaaggctaggacttacttaatagcactgtgcagggaggaaaccatgtatagcttgtacatattttaaaccagaccttctcacgaactgctgctgttgggtttggaatgtgatggaggcttggtagggtggctggtttgtaaagttcatgcatctatattgagtattctttttttttttttttgagatggagtttcattcttgttgccgaggctggagtgcaatggcgcaaccttggctcactgcaacctctgcctccctggttcaagtgattctcctgcctcatcctcccaagaagctgagattacagatgaccaccaccactcctggctaattttttgtatttagtagagacggggtttcaccatgttggtcaggctggtcttgaactcctgacctcaggtgatccacctgcctcagcctcccaaagtgctgagattacaggcatgagccaccacgcccagccattgagtattcttttttaaaatatgaagctattagattttaagtgttgaggagcagaggtgagaagagagagagagagagaaagtcaaataaagtcaaagaccagtttggaaaccaaagttggaaaagaagaattgtagtggtcatggacagctaagactgagcatagcagttcacatggtctgggtaaacaagtcactggcacaggggaaagccagaaggttgcttgtgtctgtgactgcagctatggccttgtttgcttagtttatctggaattctgttataatttctgaactgttctgagacctgttcccagtcactgattgcaatttcttttacacaggttgggtagggagagttgtaggtaaggccttaaacaaatgaggccgtttctggaaggatagggctgtgtggtcatgtcccacagcaagcttttgggatcgggggaataagagggtatgggggaaaggttcatagacttaggtgtgagaatgaggtgggaggtgtctggtaaggtcatgggggaagggagatgagagaggagataggcagatgtgggtatggggcccagtgtgagaaggaagacagagaagttcttgaaagctgggggatgtgtgggcaagaggtggattgagcaggatctcagggttatgtcgaggaagggaagaaagaaacagaagtcaggcagaggcgtgtctgtgcaaactggaggactccttccaacttcctggaacaaagcgacatcgccagcagcaggctggcagggagtggttgaggtctgggggccaggccacatggctggagaggaatttcagggagcatagcatcgggaggatgctacatatccagggactccctcctggccttcctgtgtcacttcacaatgtgacagtccccaggcatgcccacaggccaggcccagtcacagctgggcttccacaggtcagaatatgggacaggacatggtcagggagaggaccctgtgagttggtgacatatatgtggcagagatggtagtgttcagctgcttcagcagtgtccccaaccatcccaatagggtgggggcctgtgggccagaggactccatgacagtagccatggagtcccacctgtgccaggtcagagcccacccggcaggtttcagagtggtcagcccagtttaagggtgggagtctggagccagacagccaagccccttccacatctacagggtcactgtcatcctcaccacagccaggggtgattctcacctctgcctgcttatgtggggtgtggccgattcctccctttagtcattcattcatttagcacatatttattgggcatcggtgatgtgtcaggcacagtccttggcacacagaatacagcagtgaattaaacaggcaaaaattcctcccctcctggagctcagtgtcaggaaagggggtgataaatgacaatcaaatcgacatggaggttgagcacctctgtactcagccctctgtctgtccttctgaggacgcaacaagcctggttccctagagctcactttgaccctcaatatgttcataatttccctgctgcttctcccatcgttagacatctgccagtaagcctgctgagagaagcctcagcccactcatacctagagacgctgctggggaaggtcagcacacccaagaactttgggagtgtgtgtctgttttggtttgtgagaaagtagctgcccctcattctggccagttctttccagtagccatggggctggctacaagaagcaaaactgcccatgcaaagagaacacaggtcacttttcaaaacacttgcatcattaccctaaaaataggctgttatgcgttttgacaattgcgctatcctacactctgagggagttggcaacgcatgcggtatagtggagtgggaagagttgagactgaaagttaagagaagggttttcaagtcccggctcatctcaccccagtgactttgacagtgtgctcactctcagagccatggattacctggaacaaagtgcagattagtgcccacggtcctttccaggtataacatgctatcgttctttaattttattatatatacatacttttcttctgttttttgctttaagaactaaccccgatcaagagtattttctttagctagcttaaaaagaaaacatatattttatgtaaaaacacatacatggccaaatgcaatactgaagagacaatcatcctgtatcttttatggtttttcctgcttctgagtgtcgttctacaatgcccgttgacttattccattgcgtctctgctttagggtatggtttggtcgctttggttgtcatgagaaagagacattctccttgcagctacctccatgtgagtgaattcctggataaagcaagatttcctttcaataaacgctgtcacccaatgggaattttgactct

SEQ ID NO: 3968 - DNA, 915 bp, Homo sapiens
  source 1..915: mol_type = unassigned DNA; mol_type = unassigned DNA
actgtttggcctctagacagccaaagccttttgtcacccaggctggagtgccatggcacgatcatggttcactgcagcctcagcctcctaggctcaagccatcctcccatctcaacctcccgagtagctaggaccacaggcacgcaccaccaaaccagggagtttatagtccagtggaagagaaagactcagaaatcacataatcatagtccaacacagaatccatgcatagggcactgttggagcactgggagagtctacttcaatctgtgggttcaggacggggtcgctaaagtcttgcagaaagaagtcagtcttctgggatatggcttcttcgggaagatactgttaatggggattttggatggccatataatgaaataggaaaacgattaatggaagcccaggaggaaagacttggtgttattatagcagccatcttggattgtgagtgtgtctccaacaccatcttgaaggtgcagtgacttgcatatagtaggtgcttgatatttaccaagtaccccctgtgggtcaggccctactctcaccctaaggatacagcaggaagcaaagcagaggtggagaagatcccactaaacacacaggccgcttggaatgttgggccatctgtccttttgacatgaattttccctgtaatgggggtagagctggtaactgttggatcatctgattattggagacagaagtcctgtcacttgcccctgctgttaggaggtgggcttcctgaatggctttctgtatacatgaagaatttcaagaccttccgttaaggtggtcagagctaagtttcagcgtttacaagaggtctcttggctgacttgctataacttacagcaacctgatgtttggacaccttttcctttttttgtttttagtaaatatgatgagaaaaaa

SEQ ID NO: 3969 - DNA, 577 bp, Homo sapiens
  source 1..577: mol_type = unassigned DNA; mol_type = unassigned DNA
atttcttgttaccgcgcaagtgggataacctccccaccagtgtctagacacagtaggtgctcaataaataggtgtgggtttgcggtggcagaagagcgctatcccttaagtttctgacagtgagggggaaaaaggctaagcagggaaaggaagggaaaggggtaaactgagctcggcgcagtcgagagcgcgaaatagggagggcttcctgcaggccaggaatttggagaggccgaggctgggagaagaaaaatgcccggtgacggcggaggggaggtggaaggacgaacggctccgggaagggctgggagagactcacacgaagcagtttctgacctatcctgtcgtacacaagtcctcggcgtgctcggccggaccatcccctggaaagaaaggggcgtgtgacctttctctccccgatcctccagaccactgcgccgcccagggaggtcatccccgagagagcccccgcctcactcggagcacacattctagctctccccgggacttttccaagttgcatcactgtttggcctctagacagctggaacagtgaaccatggagctgtatttcggt

SEQ ID NO: 3970 - DNA, 1204 bp, Homo sapiens
  source 1..1204: mol_type = unassigned DNA; mol_type = unassigned DNA
gagacggaagtttacgacgcccagagcgctccttctggacgtgccctggactcgacttgggactgagtctgtgccgcctaggctggcagggactcggccagatgcactagcggcaaggctgggctgacaccgcctgggactcgctcgccgtacctccaaggggcccaggtcatgagggggcggctggggagacgcccgcccggtgcccgccctgggcccggcgggtgccccctgcccgccgcctgacgcaatccgaggcgcccttgctgcatgccggcgctggagaaacctcccctgccgttgcatcactcctgccaggtttgccacagaggtggagctgaaccaatcagcgggcgcgctgggcccgcggcgcggttaagtgagaagcagaatccgaagttgattggccaaaaggggatttgccccaccccaatcaccgcggcagctggccgcggtgggcgtggtctcccggcaagaaggtttaaagggcgcctccatggggggcgctcagctggagctaccgagcggtgccaggccaggtgtgtgcgtccgtcggtctttccgtgcccacgccggagaccagccccggaggccgcctgggcctatccctgtgccaggcaccatgaagcaggagtctgcagccccgaacaccccgcccacctcgcagtcccctacgccgtccgctcagttcccccgaaacgacggcgaccctcaagcgctgtggattttcgggtacggctccctggtgtggaggcccgacttcgcctacagcgacagccgtgtgggcttcgtgcgcggctacagccgccgtttctggcagggagacaccttccatcggggcagcgacaagatgcctggccgtgtggtgacgctccttgaagatcatgagggctgcacttggggcgtggcataccaagtgcaaggggagcagaaccctggttacctgggccctgcgcctgaagaggccattgccacgcagatcctggcctgccggggcttctccggccacaaccttgaatacttgctgcgtctggcagacttcatgcagctctgtgggcctcaggcgcaggacgagcacctggcagccatcgtggacgctgtgggcaccatgttgccctgcttctgccccaccgagcaggctctggcgctggtgtgaggggctgagcccctgcggggagtgctcatgtggacatcagggccagac

SEQ ID NO: 3971 - DNA, 1849 bp, Homo sapiens
  source 1..1849: mol_type = unassigned DNA; mol_type = unassigned DNA
ggagacgcccgcccggtgcccgccctgggcccggcgggtgccccctgcccgccgcctgacgcaatccgaggcgcccttgctgcatgccggcgctggagaaacctcccctgccgttgcatcactcctgccaggtttgccacagaggtggagctgaaccaatcagcgggcgcgctgggcccgcggcgcggttaagtgagaagcagaatccgaagttgattggccaaaaggggatttgccccaccccaatcaccgcggcagctggccgcggtgggcgtggtctcccggcaagaaggtttaaagggcgcctccatggggggcgctcagctggagctaccgagcggtgccaggccaggtgtgtgcgtccgtcggtctttccgtgcccacgccggagaccagccccggaggccgcctgggcctatccctgtgccaggcaccatgaagcaggagtctgcagccccgaacaccccgcccacctcgcagtcccctacgccgtccgctcagttcccccgaaacgacggcgaccctcaagcgctgtggattttcgggtacggctccctggtgtggaggcccgacttcgcctacagcgacagccgtgtgggcttcgtgcgcggctacagccgccgtttctggcagggagacaccttccatcggggcagcgacaagatgcctggccgtgtggtgacgctccttgaagatcatgagggctgcacttggggcgtggcataccaagtgcaaggggagcaggtaagcaaggccctgaagtacctgaatgtgcgagaggcagtgcttggtggctacgataccaaggaggtcaccttctatccccaagatgctcctgaccaaccactgaaggcattggcctatgtggccaccccacagaaccctggttacctgggccctgcgcctgaagaggccattgccacgcagatcctggcctgccggggcttctccggccacaaccttgaatacttgctgcgtctggcagacttcatgcagctctgtgggcctcaggcgcaggacgagcacctggcagccatcgtggacgctgtgggcaccatgttgccctgcttctgccccaccgagcaggctctggcgctggtgtgaggggctgagcccctgcggggagtgctcatgtggacatcagggccagacacccactccagtgcacaagacagacttgcgaccgcttgagcccactgagcagatatggtgggtggctggaggcttctctttctcagtccctgcctgtctgccagcctgcagctctcctgcttgacactgacttactacttgaaactttatttattgcaccatgttggtgtggtgggcaggtggagggcctgccctggacacaggggccctgctgagcagtggccccatcctggaacttgaccagattccccccagtgctgctgctaaccccacaccacccaggcctccacctccccagggagtctccaagagcctcgatcctctgctcactcagcccagccatccatagccctgggaattccacctgccaaggatcccagcaggctggatgagggatagtagggcatgaggagaaggagccctgtaaggactgaggccccggccagcccttctcctccaccagttccccagagcagagctggagctgatgcctggacacagctgctgagcctggcctgggcctcttacccacttggttgttttcttgtccctctgtctgtctgtctatctacttgtctgtctgggccactcctgcctgtgtgttggtctattcctgggaagctcatcactacaggccctggcaaccttcccagtctgtcccatactgttacccataaaactatctctttatctgtgc

SEQ ID NO: 3972 - DNA, 1498 bp, Homo sapiens
  source 1..1498: mol_type = unassigned DNA; mol_type = unassigned DNA
caggccaggtgtgtgcgtccgtcggtctttccgtgcccacgccggagaccagccccggaggccgcctgggcctatccctgtgccaggcaccatgaagcaggagtctgcagccccgaacaccccgcccacctcgcagtcccctacgccgtccgctcagttcccccgaaacgacggcgaccctcaagcgctgtggattttcgggtacggctccctggtgtggaggcccgacttcgcctacagcgacagccgtgtgggcttcgtgcgcggctacagccgccgtttctggcagggagacaccttccatcggggcagcgacaagatgcctggccgtgtggtgacgctccttgaagatcatgagggctgcacttggggcgtggcataccaagtgcaaggggagcaggtaagcaaggccctgaagtacctgaatgtgcgagaggcagtgcttggtggctacgataccaaggaggtcaccttctatccccaagatgctcctgaccaaccactgaaggcattggcctatgtggccaccccacagaaccctggttacctgggccctgcgcctgaagaggccattgccacgcagatcctggcctgccggggcttctccggccacaaccttgaatacttgctgcgtctggcagacttcatgcagctctgtgggcctcaggcgcaggacgagcacctggcagccatcgtggacgctgtgggcaccatgttgccctgcttctgccccaccgagcaggctctggcgctggtgtgaggggctgagcccctgcggggagtgctcatgtggacatcagggccagacacccactccagtgcacaagacagacttgcgaccgcttgagcccactgagcagatatggtgggtggctggaggcttctctttctcagtccctgcctgtctgccagcctgcagctctcctgcttgacactgacttactacttgaaactttatttattgcaccatgttggtgtggtgggcaggtggagggcctgccctggacacaggggccctgctgagcagtggccccatcctggaacttgaccagattccccccagtgctgctgctaaccccacaccacccaggcctccacctccccagggagtctccaagagcctcgatcctctgctcactcagcccagccatccatagccctgggaattccacctgccaaggatcccagcaggctggatgagggatagtagggcatgaggagaaggagccctgtaaggactgaggccccggccagcccttctcctccaccagttccccagagcagagctggagctgatgcctggacacagctgctgagcctggcctgggcctcttacccacttggttgttttcttgtccctctgtctgtctgtctatctacttgtctgtctgggccactcctgcctgtgtgttggtctattcctgggaagctcatcactacaggccctggcaaccttcccagtctgtcccatactgttacccataaaactatctcttta

SEQ ID NO: 3973 - DNA, 853 bp, Homo sapiens
  source 1..853: mol_type = unassigned DNA; mol_type = unassigned DNA
aaaatatttcttccctccctagcctggccgtgtggtgacgctccttgaagatcatgagggctgcacttggggcgtggcataccaagtgcaaggggagcaggtaagcaaggccctgaagtacctgaatgtgcgagaggcagtgcttggtggctacgataccaaggaggtcaccttctatccccaagatgctcctgaccaaccactgaaggcattggcctatgtggccaccccacagaaccctggttacctgggccctgcgcctgaagaggccattgccacgcagatcctggcctgccggggcttctccggccacaaccttgaatacttgctgcgtctggcagacttcatgcagctctgtgggcctcaggcgcaggacgagcacctggcagccatcgtggacgctgtgggcaccatgttgccctgcttctgccccaccgagcaggctctggcgctggtgtgaggggctgagcccctgcggggagtgctcatgtggacatcagggccagacacccactccagtgcacaagacagacttgcgaccgcttgagcccactgagcagatatggtgggtggctggaggcttctctttctcagtccctgcctgtctgccagcctgcagctctcctgcttgacactgacttactacttgaaactttatttattgcaccatgttggtgtggtgggcaggtggagggcctgccctggacacaggggccctgctgagcagtggccccatcctggaacttgaccagattccccccagtgctgctgctaaccccacaccacccaggcctccacctccccagggagtctccaagagcctcgatcctctgctcactcagcccagccatcc

SEQ ID NO: 3974 - DNA, 1560 bp, Homo sapiens
  source 1..1560: mol_type = unassigned DNA; mol_type = unassigned DNA
aaggtttaaagggcgcctccatggggggcgctcagctggagctaccgagcggtgccaggccaggtgtgtgcgtccgtcggtctttccgtgcccacgccggagaccagccccggaggccgcctgggcctatccctgtgccaggcaccatgaagcaggagtctgcagccccgaacaccccgcccacctcgcagtcccctacgccgtccgctcagttcccccgaaacgacggcgaccctcaagcgctgtggattttcgggtacggctccctggtgtggaggcccgacttcgcctacagcgacagccgtgtgggcttcgtgcgcggctacagccgccgtttctggcagggagacaccttccatcggggcagcgacaagatgcctggccgtgtggtgacgctccttgaagatcatgagggctgcacttggggcgtggcataccaagtgcaaggggagcaggtaagcaaggccctgaagtacctgaatgtgcgagaggcagtgcttggtggctacgataccaaggaggtcaccttctatccccaagatgctcctgaccaaccactgaaggcattggcctatgtggccaccccacagaaccctggttacctgggccctgcgcctgaagaggccattgccacgcagatcctggcctgccggggcttctccggccacaaccttgaatacttgctgcgtctggcagacttcatgcagctctgtgggcctcaggcgcaggacgagcacctggcagccatcgtggacgctgtgggcaccatgttgccctgcttctgccccaccgagcaggctctggcgctggtgtgaggggctgagcccctgcggggagtgctcatgtggacatcagggccagacacccactccagtgcacaagacagacttgcgaccgcttgagcccactgagcagatatggtgggtggctggaggcttctctttctcagtccctgcctgtctgccagcctgcagctctcctgcttgacactgacttactacttgaaactttatttattgcaccatgttggtgtggtgggcaggtggagggcctgccctggacacaggggccctgctgagcagtggccccatcctggaacttgaccagattccccccagtgctgctgctaaccccacaccacccaggcctccacctccccagggagtctccaagagcctcgatcctctgctcactcagcccagccatccatagccctgggaattccacctgccaaggatcccagcaggctggatgagggatagtagggcatgaggagaaggagccctgtaaggactgaggccccggccagcccttctcctccaccagttccccagagcagagctggagctgatgcctggacacagctgctgagcctggcctgggcctcttacccacttggttgttttcttgtccctctgtctgtctgtctatctacttgtctgtctgggccactcctgcctgtgtgttggtctattcctgggaagctcatcactacaggccctggcaaccttcccagtctgtcccatactgttacccataaaactatctctttatctgtgc

SEQ ID NO: 3975 - DNA, 11568 bp, Homo sapiens
  source 1..11568: mol_type = unassigned DNA; mol_type = unassigned DNA
cggcggcggcggcagcggcggcggcggcggcggcgcgggggttgagtcgtggtggtgcggacgcgctcgtgctcgggaactatcggattaaacttgaatcgagtgaaattacacaaaggagcgccgcggaggaggcggcccggggacccggacaccctgaaactcaccagagacccgttcgcccccggccaactccgtgcccgtggattcagccccctggccgcagctgccgagccaactccggagcccgctctgcgttttgttttcccctcggcactaggcagcggaggagcccgaccgacccggacctatatccagactttgcctgacactgcagggtccaagagaattaaagaaatatggaatgacatgaagaagattagttaaggattataggctttgagggcaaacacctcagtgaagtgaagcacaggcaagctcctgagctgtggtttggaggagccgtgtgttggaagaagatggcagatccaggaatgatgagtctttttggcgaggatgggaatattttcagtgaaggtcttgaaggcctcggagaatgtggttacccggaaaatccagtaaatcctatgggtcagcaaatgccaatagaccaaggctttgcctctttacagccatcccttcatcatccttcaactaatcaaaatcaaacaaagctgacacattttgatcactataatcagtatgaacaacaaaagatgcatctgatggatcagccgaacagaatgatgagcaacacccctgggaacggactcgcgtctccgcactcgcagtatcacacccctcccgttcctcaggtgccccatggtggcagtggtggcggtcagatgggtgtctaccctggcatgcagaatgagaggcatgggcaatcctttgtggacagcagctccatgtggggccccagggctgttcaggtaccagaccagatacgagccccctaccagcagcagcagccacagccgcagccaccgcagccggctccgtcggggccccctgcacagggccaccctcagcacatgcagcagatgggcagctatatggcacgtggggatttttccatgcagcagcatggtcagccacagcagaggatgagccagttttcccaaggccaagagggcctcaatcagggaaatccttttattgccacctcaggacctggccacttgtcccacgtgccccagcagagtcccagcatggcaccttccttgcgtcactcggtgcagcagttccatcaccacccctctactgctctccatggagaatccgttgcccacagtcccagattctccccgaatcctccccaacaaggggctgttaggccgcaaacccttaactttagttctcggagccagacagtcccctctcctactataaacaactcagggcagtattctcgatatccttacagtaacctaaatcagggattagttaacaatacagggatgaatcaaaatttaggccttacaaataatactccaatgaatcagtccgtaccaagataccccaatgctgtaggattcccatcaaacagtggtcaaggactaatgcaccagcagcccatccaccccagtggctcacttaaccaaatgaacacacaaactatgcatccttcacagcctcagggaacttatgcctctccacctcccatgtcacccatgaaagcaatgagtaatccagcaggcactcctcctccacaagtcaggccgggaagtgctgggataccaatggaagttggcagttatccaaatatgccccatcctcagccatctcaccagccccctggtgccatgggaatcggacagaggaatatgggccccagaaacatgcagcagtctcgtccatttataggcatgtcctcggcaccaagggaattgactgggcacatgaggccaaatggttgtcctggtgttggccttggagacccacaagcaatccaggaacgactgatacctggccaacaacatcctggtcaacagccatcttttcagcagttgccaacctgtcctccactgcagcctcacccgggcttgcaccaccagtcttcacctccacaccctcatcaccagccttgggcacagctccacccatcaccccagaacaccccgcagaaagtgcctgtgcatcagcattccccgtcggagccctttctagagaaaccagtgccggatatgactcaggttagtggaccgaatgctcagctagtgaagagtgatgattacctgccatcaatagaacagcagccacaacaaaagaagaagaaaaagaaaaacaaccacattgtagcagaggatcccagtaaaggttttggtaaagatgacttccctggtggggtagataaccaagaactaaataggaactcactggatgggtcccaagaagaaaaaaagaaaaagaaaaggtcaaaggcaaaaaaagacccgaaggaaccgaaagaacccaaggagaaaaaagagcccaaggaacccaagaccccgaaagcccctaagattcccaaagagccaaaggaaaagaaagcaaaaactgccacgccaaaacccaaatccagcaaaaagtcaagtaataagaaacctgactcagaagcaagtgctttgaagaaaaaggtcaacaagggaaaaacagaaggttctgaaaattcagacttagacaaaacacccccaccatctcctcctcctgaagaagatgaggacccaggtgttcagaagagacggtccagcagacaggtgaagagaaagcgctacactgaagacctggagttcaagatttctgatgaggaggcagatgatgcagatgctgctgggagggattccccctccaacacctcccagtcagaacagcaggaatctgttgatgcagaaggcccagtggtagaaaaaattatgagcagtcgttcagtaaaaaagcagaaggaatctggagaggaggtagaaattgaggaattctatgtgaaatacaaaaacttctcttatcttcattgtcagtgggcatctatagaagatctggaaaaagataagagaattcagcaaaaaattaaacgatttaaggcaaagcagggccagaacaagttcctttcagagattgaggatgagctttttaatccagattatgtggaggttgaccggataatggactttgcacgtagcacagatgaccggggagagcctgtgactcactatctggtgaagtggtgttcacttccttatgaagacagcacgtgggagcggaggcaggacatagatcaagcaaagatcgaggagtttgagaaactaatgtccagggagccggaaacagagcgtgtggagcgacctcctgctgatgattggaagaaatcggagagttccagggagtataaaaacaataacaaactcagggaataccagttggagggagtaaactggctacttttcaattggtacaacatgcgaaactgcattttagcagatgaaatgggtttgggaaaaactatccagtccattacatttctctatgagatatatttgaaaggaatccatggcccttttttagtaattgccccattgtccacaatccccaactgggaaagggaattccgaacctggacagagttgaacgtggttgtgtatcatgggagtcaagctagtcgtcggaccattcagttgtatgaaatgtacttcaaagatccccagggtcgagtgataaaggggtcctataagtttcatgccatcatcactacatttgagatgattttgactgattgtcctgagctgcggaatattccatggcgctgtgtagtcattgatgaagcccacaggctgaagaacaggaactgcaagctgttggagggactcaagatgatggacttggaacacaaagtgctgctgacgggaaccccactccagaacactgtggaagaactcttcagcttgcttcatttcttggaaccaagtcgcttcccttcagaaaccacatttatgcaagaatttggtgatctaaaaacagaagagcaggtgcaaaaacttcaagctattctaaagccaatgatgttgagacgtctcaaagaggatgtagaaaagaacttggcccccaaagaagaaactattattgaagttgagctaacaaacattcagaagaaatattaccgagccatccttgagaagaatttcacatttctttccaaaggcggtggtcaagctaacgtacctaacctattaaacactatgatggaattgcggaagtgctgcaatcatccgtaccttatcaatggtgctgaagagaaaattttggaagagtttaaagaaacacacaatgcagagtctccagattttcagctccaggcaatgatccaggctgctggcaagctagtgctgattgacaagctgctgccaaaactgaaggctggtggccacagggtgcttatcttttcccagatggtgcgctgcttggacatactggaagactacctcattcaaagacggtacccatatgaaaggatcgacggccgagtaagaggcaacctccgccaggcagctatcgacagattctccaaacctgattctgataggtttgttttcctcctgtgtacaagggcaggaggtttaggcattaacctcactgctgctgatacctgcatcatctttgattcagactggaatccccaaaatgacctccaggctcaggctagatgtcatagaataggacagagcaaatctgtgaaaatctacaggctgattacaagaaattcctatgaaagggaaatgttcgacaaggctagtttgaaactgggcctggataaagctgtgctacagtctatgagtggaagagaaaatgctaccaatggggtacaacagctttccaagaaagaaatagaggatcttctacgaaaaggggcctatggtgcactcatggatgaggaggatgaagggtctaaattctgtgaagaagatattgatcagatcctcctacgtcgaacccacaccattaccattgagtcagaagggaaaggttccacatttgctaaggccagttttgttgcatctggaaataggacagatatttccttggatgatccaaatttctggcaaaagtgggctaagaaggctgaattggatattgatgccttaaatgggaggaacaacctggttattgatactccaagagtgagaaagcagaccaggctctacagtgcagtgaaggaagatgagctgatggagttctcagacttggaaagtgattctgaagaaaagccctgtgcaaagccacggcgtccccaggataagtcacagggctatgcaaggagtgaatgtttcagggtggagaagaatctgcttgtctatggttggggacggtggacagacattctttcccacggacgctataaacgccaactcactgagcaagatgtagaaaccatctgcagaaccatcctggtgtactgtcttaatcattacaaaggggatgagaatatcaaaagcttcatctgggatctgatcacacccacagcggatggccagactcgagccttggtcaaccattccggtttgtcagctcctgtgccaaggggaaggaagggaaagaaggtgaaagcccagagcacacagccggtggtgcaggatgccgactggctggccagctgcaacccagatgccctgttccaggaggacagctacaagaaacacctgaagcatcactgtaacaaggtcctgctgcgtgtccgcatgctgtactacctaagacaagaagtgataggagaccaggcggataagatcttagagggtgctgactcaagtgaagccgatgtgtggatccctgaacctttccatgctgaagttcctgcagattggtgggataaggaagcagacaaatccctcttaattggagtgttcaaacatggctatgagaagtacaactccatgcgagctgaccccgcgctgtgctttctggaacgagtcggtatgcctgatgccaaggccatagctgccgagcaaagaggaacagacatgctagcagatggtggtgacgggggagaatttgatagagaagatgaagacccagaatataaaccaaccagaacaccgttcaaagatgaaatagatgaatttgcaaattctccttcagaggataaggaagaatccatggaaatacatgccacaggcaagcacagtgagagtaatgctgagttaggccaactttactggcctaacacttcaaccctgactacacgtctgcgccggctcattactgcctatcagcgcagctataaaaggcaacagatgaggcaagaggccctaatgaagactgaccggcgcagacggcggcctcgagaggaagtgagagctctggaagcggaaagggaagctattatatctgagaagcggcaaaagtggacaagaagagaagaggctgatttttaccgtgtggtatccacctttggggttatttttgaccctgtgaaacagcaatttgactggaaccaatttagagcctttgccaggcttgacaaaaaatctgatgagagtttggagaaatacttcagttgttttgtggccatgtgtaggcgagtatgtcgaatgcccgtcaagccagatgatgaaccgcccgacctctcctccataattgagccgatcacagaggagcgagcctctcgaactctgtaccgcattgagctgctacggaagatccgcgagcaggttctccatcacccccagctgggagagaggcttaagctctgccagccaagcttggatctgccagagtggtgggagtgtggacggcatgaccgagacttgctggttggtgctgctaaacacggggtcagtcggacggattatcacatcctcaatgaccctgagttatccttcttggatgcacataaaaactttgctcaaaacagaggggcaggtaatacatcttccttgaacccactggcagttggatttgtccagactcctccagtcatctcatctgctcatattcaagatgagagggtactggaacaagccgaaggcaaagtggaggagcctgaaaacccagctgccaaggagaaatgtgagggcaaagaagaggaagaagaaaccgatggcagcgggaaggagagcaagcaggaatgtgaggcagaggccagctctgtgaaaaatgaactgaaaggtgttgaggtcggcgcagacactgggtccaaatctatttcagagaaaggttccgaagaggatgaagaggaaaagctggaggatgacgataagtcggaagagtcttcccagcccgaagcaggagctgtctctagagggaagaattttgatgaagaaagcaatgcttccatgagcactgctagagatgaaacccgagatggattctacatggaggacggagatccttcagtagctcagctccttcatgaaagaacatttgccttctcgttttggcctaaggatagagtaatgataaaccgcttagacaacatctgtgaagcagtgttgaaaggcaaatggccagtaaataggcgccagatgtttgatttccaaggcctcatcccaggttacacacccaccacagtggacagccccttgcagaagaggagctttgctgagctctccatggtcggccaagccagcattagtgggagtgaggacatcactacgtctcctcagttgtcaaaggaagatgccctcaacctctctgtccctcgccagcggaggaggaggaggagaaaaatcgaaattgaggccgaaagagctgccaagaggcgaaatctcatggagatggttgcccagcttcgagagtctcaggtggtctcagaaaatggacaagaaaaagttgtagatttatcaaaggcctcaagagaggcaacaagctctacctcaaatttttcatctctttcttcaaagtttatcttgcctaatgtctcaacaccagtgtctgatgcctttaagactcaaatggaactgctccaagcaggcctttcgcgcacacccacaaggcatctccttaatggctccctagtggatggagagcctcccatgaagaggaggcggggaaggaggaaaaatgtggagggacttgatctgcttttcatgagccacaaacggacgtcattgagtgcagaggatgctgaggtgaccaaagcttttgaagaagatatagagaccccaccaacaagaaacattccttctcccggacagctggacccagacacacggatccctgttatcaatcttgaagatgggactaggctggtgggggaagatgctcctaaaaataaggatttagttgaatggctgaagctgcaccctacttacactgttgatatgccaagttatgtaccaaagaatgcagatgtgctgttttcctcatttcagaaaccgaaacagaaacgacatagatgtcgaaaccctaataaattggatataaacactttgacaggagaagaaagggtgcctgttgtcaataaacgaaatgggaagaagatgggtggagctatggcgcctccaatgaaggatctacccaggtggctggaagaaaatcctgaatttgcagttgctccagactggactgatatagttaagcagtctggttttgttcctgagtcgatgtttgaccgccttctcactgggcctgtagtgcggggagagggagcgagcagaagaggaagaaggcccaaaagtgagatcgccagagcagccgcggccgccgctgctgtggcctccacgtcagggatcaaccctttgctggtgaacagcctgtttgctggaatggacctgacgagccttcagaatctccagaatctccagtcgctccagctggcaggcctcatgggcttccctccaggactggcaacagctgccaccgccggaggcgatgcgaagaaccctgctgctgtgctgcccctgatgctgccaggaatggcgggcctgcccaacgtgtttggcttgggcgggctgttgaataaccctctgtcagctgctactggaaacaccactactgcttctagtcaaggagaaccggaagacagcacttcaaaaggagaggagaaaggaaatgagaatgaagacgagaacaaagactctgagaaaagcacagatgctgtttcggctgctgactctgcgaatggatctgttggtgctgctactgccccggctggattgccctcaaacccgctagccttcaaccctttcctcctgtccacaatggccccgggcctcttctacccatccatgtttctacctccaggactggggggattgacgctgcctgggttcccagcattggcaggacttcagaatgccgtgggctccagcgaagaaaaggctgctgacaaggctgagggaggaccctttaaagatggagagacccttgaaggcagcgatgccgaggagagcctggataagactgcagagtcctccctcttagaagacgaaatagcacagggtgaagagctagactcacttgatgggggggatgaaatagaaaacaatgaaaatgatgaataaccagtaccagttccagttcaagtgtttaaaacttttgacaagtggtagtcctactgtttacactcacagttaatgttcatacctagttttataagctgttctgtaacatagtgtagcaaaaaaaaaagttcaagtcatgttatacaggtgtgtcaaaaggtatcttggtcattaagtattgtgcagtgcattatttattatccctaggagagatgaaatttgagaggtgatcatgtctttttaaggaaacttacataatgctctgctttttttttttctcttggtaccattggtattataataaagagcaatttgtaactgagtggcactaatggaagaaagtgctgctcaaaggaagtatgaagttatatatttaattttttaattttaatttttaatttttttgctgtgaaggtcaagctgaaatttaccatacatatcatacttgctcatttgtttccctttttgactgtatgggggttcccacactcgtgcatacacacacatccatacactctgacaatctccacgctagtgtgaacgcctctgtcccgaggcgcagcaataataaggcagctgttgaatgtgaagggtccctttggaaaattaacctactgggagggttcttgccagacagaactacagttccattgtctcgtggtcttgtaatgcactggtaaaaacaaaataaatagatgaataaataaagagtgagagaagagagaatcaggtaccttttttaaattaaaggactttgttactttagccacaaagctaaaacagcattacctcagctctaaactagccttgaagtttacagacatgactttgtaaatgtattgtttttctttgttgtgatgtccttttatttttttctttgaaaactgctatcatgtaagataaaatgtaaattgctgccaactgtagtaatgatgcttttaataaaagtgacccatgatatgcagagatgtaattatagaatgtagtatatagggaaactggtgttcactctattttttttgtattcgcaatagatgcaaatacagcattctggcttttgtacagtttcttgatatatcctcttatactagattagcttttggtaagacactaaactgtctcgaagactagacaggaaggaaaaccttgaattactctcacataattccactccagatatctcaacagaaatgcatacaaaaagctcctattactccctcaaaagggcatctgagaccgagaatacttagaaatgtgtgcagcgtgtgataatgtggtacactgaagaacaaaagggcaaaagaaaaatgaggctttaacaggcacaatatctaggtcatttatccttggttaatgggtagaaaaacacaatgcggtagtgtcagcaagggacacaaaggcactctggtgtcctgcagaccagcgctcgatgccagaaaccagtgtgtggaaaaacccatgtggaattgaaacagacccacttaagcacgcacgcgcgcacgcacggtctcaggagctactgatttgtggacccctttttgacctttggtatttaaagtaaaatataatttgagatctactgttttcacctttttatgtcacctgaaccaacacaaagccatatttccatccagttaaaaagcaggggaagggatgtggacgagagtgtttcgtgtgtgttgccttcctccacacccttcccccaggacgtccgcacacagtccacctccagccagtgtgctgccagacaggtggtctaaattcctcccagactgtgagattcagttcgtttatgccccaagatgaaaatatgccccttaatgattctgggaaagaaacaacctgaaccctccaccttacagatcctgtgattgcttttatttatcatcgtcgttgtctgctgaaagtgaatgggccgtgcacactggaggaaagtgccttgaagagaatattttttgaaagggaattatttgaacacgggaaagtgaaactaggtctgcatgaagtataggaaatttaagtatttaagtaacaaagatgttagcagggagaatttgcttaataaaatgagtcattaaagggtgttttttttaaa

SEQ ID NO: 3976 - DNA, 500 bp, Homo sapiens
  source 1..500: mol_type = unassigned DNA; mol_type = unassigned DNA
ttgggctccaactcaagtgcgagcgggcgatgggcgcgcgggcgcggggcggctgagcagcggcggcggcggctcggggacggcggcgacccccgcctcccgcccccgccccccgctccggaccgaccacgccgcgctcgccgggagctgcggccgcaccggcgcgaacaaagtgcgttcctcccggcgcggcggcgccagcccgcgcggggaccgccaccgagcgaggacctatatccagactttgcctgacactgcagggtccaagagaattaaagaaatatggaatgacatgaagaagattagttaaggattataggctttgagggcaaacacctcagtgaagtgaagcacaggcaagctcctgagctgtggtttggaggagccgtgtgttggaagaagatggcagatccaggaatgatgagtctttttggcgaggatgggaatattttcagtgaaggtcttgaaggcctcggagaatgtggttacccggaaaatcc

SEQ ID NO: 3977 - DNA, 3456 bp, Homo sapiens
  source 1..3456: mol_type = unassigned DNA; mol_type = unassigned DNA
acctcagtgaagtgaagcacaggcaagctcctgagctgtggtttggaggagccgtgtgttggaagaagatggcagatccaggaatgatgagtctttttggcgaggatgggaatattttcagtgaaggtcttgaaggcctcggagaatgtggttacccggaaaatccagtaaatcctatgggtcagcaaatgccaatagaccaaggctttgcctctttacagccatcccttcatcatccttcaactaatcaaaatcaaacaaagctgacacattttgatcactataatcagtatgaacaacaaaagatgcatctgatggatcagccgaacagaatgatgagcaacacccctgggaacggactcgcgtctccgcactcgcagtatcacacccctcccgttcctcaggtgccccatggtggcagtggtggcggtcagatgggtgtctaccctggcatgcagaatgagaggcatgggcaatcctttgtggacagcagctccatgtggggccccagggctgttcaggtaccagaccagatacgagccccctaccagcagcagcagccacagccgcagccaccgcagccggctccgtcggggccccctgcacagggccaccctcagcacatgcagcagatgggcagctatatggcacgtggggatttttccatgcagcagcatggtcagccacagcagaggatgagccagttttcccaaggccaagagggcctcaatcagggaaatccttttattgccacctcaggacctggccacttgtcccacgtgccccagcagagtcccagcatggcaccttccttgcgtcactcggtgcagcagttccatcaccacccctctactgctctccatggagaatccgttgcccacagtcccagattctccccgaatcctccccaacaaggggctgttaggccgcaaacccttaactttagttctcggagccagacagtcccctctcctactataaacaactcagggcagtattctcgatatccttacagtaacctaaatcagggattagttaacaatacagggatgaatcaaaatttaggccttacaaataatactccaatgaatcagtccgtaccaagataccccaatgctgtaggattcccatcaaacagtggtcaaggactaatgcaccagcagcccatccaccccagtggctcacttaaccaaatgaacacacaaactatgcatccttcacagcctcagggaacttatgcctctccacctcccatgtcacccatgaaagcaatgagtaatccagcaggcactcctcctccacaagtcaggccgggaagtgctgggataccaatggaagttggcagttatccaaatatgccccatcctcagccatctcaccagccccctggtgccatgggaatcggacagaggaatatgggccccagaaacatgcagcagtctcgtccatttataggcatgtcctcggcaccaagggaattgactgggcacatgaggccaaatggttgtcctggtgttggccttggagacccacaagcaatccaggaacgactgatacctggccaacaacatcctggtcaacagccatcttttcagcagttgccaacctgtcctccactgcagcctcacccgggcttgcaccaccagtcttcacctccacaccctcatcaccagccttgggcacagctccacccatcaccccagaacaccccgcagaaagtgcctgtgcatcagcattccccgtcggagccctttctagagaaaccagtgccggatatgactcagaaaccgaaacagaaacgacatagatgtcgaaaccctaataaattggatataaacactttgacaggagaagaaagggtgcctgttgtcaataaacgaaatgggaagaagatgggtggagctatggcgcctccaatgaaggatctacccaggtggctggaagaaaatcctgaatttgcagttgctccagactggactgatatagttaagcagtctggttttgttcctgagtcgatgtttgaccgccttctcactgggcctgtagtgcggggagagggagcgagcagaagaggaagaaggcccaaaagtgagatcgccagagcagccgcggccgccgctgctgtggcctccacgtcagggatcaaccctttgctggtgaacagcctgtttgctggaatggacctgacgagccttcagaatctccagaatctccagtcgctccagctggcaggcctcatgggcttccctccaggactggcaacagctgccaccgccggaggcgatgcgaagaaccctgctgctgtgctgcccctgatgctgccaggaatggcgggcctgcccaacgtgtttggcttgggcgggctgttgaataaccctctgtcagctgctactggaaacaccactactgcttctagtcaaggagaaccggaagacagcacttcaaaaggagaggagaaaggaaatgagaatgaagacgagaacaaagactctgagaaaagcacagatgctgtttcggctgctgactctgcgaatggatctgttggtgctgctactgccccggctggattgccctcaaacccgctagccttcaaccctttcctcctgtccacaatggccccgggcctcttctacccatccatgtttctacctccaggactggggggattgacgctgcctgggttcccagcattggcaggacttcagaatgccgtgggctccagcgaagaaaaggctgctgacaaggctgagggaggaccctttaaagatggagagacccttgaaggcagcgatgccgaggagagcctggataagactgcagagtcctccctcttagaagacgaaatagcacagggtgaagagctagactcacttgatgggggggatgaaatagaaaacaatgaaaatgatgaataaccagtaccagttccagttcaagtgtttaaaacttttgacaagtggtagtcctactgtttacactcacagttaatgttcatacctagttttataagctgttctgtaacatagtgtagcaaaaaaaaaagttcaagtcatgttatacaggtgtgtcaaaaggtatcttggtcattaagtattgtgcagtgcattatttattatccctaggagagatgaaatttgagaggtgatcatgtctttttaaggaaacttacataatgctctgctttttttttttctcttggtaccattggtattataataaagagcaatttgtaactgagtggcactaatggaagaaagtgctgctcaaaggaagtatgaagttatatatttaattttttaattttaatttttaatttttttgctgtgaaggtcaagctgaaatttaccatacatatcatacttgctcatttgtttccctttttgactgtatgggggttcccacactcgtgcatacacacacatccatacactctgacaatctccacgctagtgtgaa

SEQ ID NO: 3978 - DNA, 4777 bp, Homo sapiens
  source 1..4777: mol_type = unassigned DNA; mol_type = unassigned DNA
atggcagatccaggaatgatgagtctttttggcgaggatgggaatattttcagtgaaggtcttgaaggcctcggagaatgtggttacccggaaaatccagtaaatcctatgggtcagcaaatgccaatagaccaaggctttgcctctttacagccatcccttcatcatccttcaactaatcaaaatcaaacaaagctgacacattttgatcactataatcagtatgaacaacaaaagatgcatctgatggatcagccgaacagaatgatgagcaacacccctgggaacggactcgcgtctccgcactcgcagtatcacacccctcccgttcctcaggtgccccatggtggcagtggtggcggtcagatgggtgtctaccctggcatgcagaatgagaggcatgggcaatcctttgtggacagcagctccatgtggggccccagggctgttcaggtaccagaccagatacgagccccctaccagcagcagcagccacagccgcagccaccgcagccggctccgtcggggccccctgcacagggccaccctcagcacatgcagcagatgggcagctatatggcacgtggggatttttccatgcagcagcatggtcagccacagcagaggatgagccagttttcccaaggccaagagggcctcaatcagggaaatccttttattgccacctcaggacctggccacttgtcccacgtgccccagcagagtcccagcatggcaccttccttgcgtcactcggtgcagcagttccatcaccacccctctactgctctccatggagaatccgttgcccacagtcccagattctccccgaatcctccccaacaaggggctgttaggccgcaaacccttaactttagttctcggagccagacagtcccctctcctactataaacaactcagggcagtattctcgatatccttacagtaacctaaatcagggattagttaacaatacagggatgaatcaaaatttaggccttacaaataatactccaatgaatcagtccgtaccaagataccccaatgctgtaggattcccatcaaacagtggtcaaggactaatgcaccagcagcccatccaccccagtggctcacttaaccaaatgaacacacaaactatgcatccttcacagcctcagggaacttatgcctctccacctcccatgtcacccatgaaagcaatgagtaatccagcaggcactcctcctccacaagtcaggccgggaagtgctgggataccaatggaagttggcagttatccaaatatgccccatcctcagccatctcaccagccccctggtgccatgggaatcggacagaggaatatgggccccagaaacatgcagcagtctcgtccatttataggcatgtcctcggcaccaagggaattgactgggcacatgaggccaaatggttgtcctggtgttggccttggagacccacaagcaatccaggaacgactgatacctggccaacaacatcctggtcaacagccatcttttcagcagttgccaacctgtcctccactgcagcctcacccgggcttgcaccaccagtcttcacctccacaccctcatcaccagccttgggcacagctccacccatcaccccagaacaccccgcagaaagtgcctgtgcatcagcattccccgtcggagccctttctagagaaaccagtgccggatatgactcaggttagtggaccgaatgctcagctagtgaagagtgatgattacctgccatcaatagaacagcagccacaacaaaagaagaagaaaaagaaaaacaaccacattgtagcagaggatcccagtaaaggttttggtaaagatgacttccctggtggggtagataaccaagaactaaataggaactcactggatgggtcccaagaagaaaaaaagaaaaagaaaaggtcaaaggcaaaaaaagacccgaaggaaccgaaagaacccaaggagaaaaaagagcccaaggaacccaagaccccgaaagcccctaagattcccaaagagccaaaggaaaagaaagcaaaaactgccacgccaaaacccaaatccagcaaaaagtcaagtaataagaaacctgactcagaagcaagtgctttgaagaaaaaggtcaacaagggaaaaacagaaggttctgaaaattcagacttagacaaaacacccccaccatctcctcctcctgaagaagatgaggacccaggtgttcagaagagacggtccagcagacaggtgaagagaaagcgctacactgaagacctggagttcaagatttctgatgaggaggcagatgatgcagatgctgctgggagggattccccctccaacacctcccagtcagaacagcaggaatctgttgatgcagaaggcccagtggtagaaaaaattatgagcagtcgttcagtaaaaaagcagaaggaatctggagaggaggtagaaattgaggaattctatgtgaaatacaaaaacttctcttatcttcattgtcagtgggcatctatagaagatctggaaaaagataagagaattcagcaaaaaattaaacgatttaaggcaaagcagggccagaacaagttcctttcagagattgaggatgagctttttaatccagattatgtggaggttgaccggataatggactttgcacgtagcacagatgaccggggagagcctgtgactcactatctggtgaagtggtgttcacttccttatgaagacagcacgtgggagcggaggcaggacatagatcaagcaaagatcgaggagtttgagaaactaatgtccagggagccggaaacagagcgtgtggagcgacctcctgctgatgattggaagaaatcggagagttccagggagtataaaaacaataacaaactcagggaataccagttggagggagtaaactggctacttttcaattggtacaacatgcgaaactgcattttagcagatgaaatgggtttgggaaaaactatccagtccattacatttctctatgagatatatttgaaaggaatccatggcccttttttagtaattgccccattgtccacaatccccaactgggaaagggaattccgaacctggacagagttgaacgtggttgtgtatcatgggagtcaagctagtcgtcggaccattcagttgtatgaaatgtacttcaaagatccccagggtcgagtgataaaggggtcctataagtttcatgccatcatcactacatttgagatgattttgactgattgtcctgagctgcggaatattccatggcgctgtgtagtcattgatgaagcccacaggctgaagaacaggaactgcaagctgttggagggactcaagatgatggacttggtcagtgaccatattggtgattgcactgaacctgaatagaattgttgctgacttgatagtcccgttgctcagaatttgatgcctgtaaacagtatttgaaaagcttgtcaaatattgtgatatattctctggcactttcagttattcaaaagttgttgccttttggattcttacattgttggctagtgtctgttaaacagttgtattatagcagagtgtaatcatgatagtttcactaaagtgagtttcaagtatttgttttaccctttgttcataaatacaggttgatcataccaaatacaaaaatcccagaatccaaaacgttttgagtacccacataatgctaaaaggaaatgctcattggagcattttggattttggattttctcatttgggatgttcaacccgtaagtataaatgcagatattccaaaatctaaaaatatctgaaatctgaaacactctggtcccaagaattttggataagggatacttaacctgtactgccatttcattaactgttgggccaagctttacttcagtgatgatagtccagttatttttcagtgctcataggttttgccatactgtggccagcaggacttgtagatgcaagttctcaatgagttgggtaggatatctggggttggtttagttcgcacagatgcttagaagtttggggcattacagtgcctcagatttgatctggagttttacaccacacttatcccatagtcttccagcttcccaagagatgatcaggtcttcctgattagattttctagatttttttttcagcaggagcatcatggaataacatatcgtaggagtagaaggatttgatttattttctgtctgatactgctgtgtgtgatttcctagtgggaattgcaacatgacctgtcatcctcaggcttcttttcactccatagtttatatagtggttatgatcacttatattttatttttaatgtacatttggaaagcaaagctcctgtcatttagcatgccttggatgatttgatgagtttcacggaagtacaaaaagggtttcaaagtatttttaatgctaatttctgcaggctaatttgatcttttgttaactgagagtttgagatgagaaggagtgttctgtatattcatggccatatgtttttagctgaagactggtattaccaaaaaacacctaaaagctttttgttgcagctgattctctgaaagagcagcttattttattcttaaagagattagaattgccagctatgcttttagtttaaaacaaacaaaatctagttttgcttaaaggaaaaagtctgactgaattatcctatttagggtgggatttcccatttttcttcctaatgaattattattaaagcgatcctaagatctgtctcaaa

SEQ ID NO: 3979 - DNA, 434 bp, Homo sapiens
  source 1..434: mol_type = unassigned DNA; mol_type = unassigned DNA
cagctccatgtggggccccagggctgttcaggcatgtcctcggcaccaagggaattgactgggcacatgaggccaaatggttgtcctggtgttggccttggagacccacaagcaatccaggaacgactgatacctggccaacaacatcctggtcaacagccatcttttcagcagttgccaacctgtcctccactgcagcctcacccgggcttgcaccaccagtcttcacctccacaccctcatcaccagccttgggcacagctccacccatcaccccagaacaccccgcagaaagtgcctgtgcatcagcattccccgtcggagccctttctagagaaaccagtgccggatatgactcaggttagtggaccgaatgctcagctagtgaagagtgatgattacctgccatcaatagaacagcagccacaacaaaa

SEQ ID NO: 3980 - DNA, 398 bp, Homo sapiens
  source 1..398: mol_type = unassigned DNA; mol_type = unassigned DNA
caccagccttgggcacagctccacccatcaccccagaacaccccgcagaaagtgcctgtgcatcagcattccccgtcggagccctttctagagaaaccagtgccggatatgactcagtaataagaaacctgactcagaagcaagtgctttgaagaaaaaggtcaacaagggaaaaacagaaggttctgaaaattcagacttagacaaaacacccccaccatctcctcctcctgaagaagatgaggacccaggtgttcagaagagacggtccagcagacaggtgaagagaaagcgctacactgaagacctggagttcaagatttctgatgaggaggcagatgatgcagatgctgctgggagggattccccctccaacacctcccagtcagaacagcagg

SEQ ID NO: 3981 - DNA, 527 bp, Homo sapiens
  source 1..527: mol_type = unassigned DNA; mol_type = unassigned DNA
agatgtttaccagtctactctatttgggagaatttgatagagaagatgaagacccagaatataaaccaaccagaacaccgttcaaagatgaaatagatgaatttgcaaattctccttcagaggataaggaagaatccatggaaatacatgccacaggcaagcacagtgagagtaatgctgagttaggccaactttactggcctaacacttcaaccctgactacacgtctgcgccggctcattactgcctatcagcgcagctataaaaggcaacagatgaggcaagaggccctaatgaagactgaccggcgcagacggcggcctcgagaggaagtgagagctctggaagcggaaagggaagctattatatctgagaagcggcaaaagtggacaagaagagaagaggctgatttttaccgtgtggtatccacctttggggttatttttgaccctgtgaaacagcaatttgactggaaccaatttagagcctttgccaggcttgacaaaaaatctgatgagagtttggag

SEQ ID NO: 3982 - DNA, 788 bp, Homo sapiens
  source 1..788: mol_type = unassigned DNA; mol_type = unassigned DNA
aataatcatcctaatcaccataacagggctgtctggtttaaaacaacacaaaaaatgagcttcagtcagcctaccccccaggctcgtctttcccagtattattgtgtaagaaacaaggatagagtaatgataaaccgcttagacaacatctgtgaagcagtgttgaaaggcaaatggccagtaaataggcgccagatgtttgatttccaaggcctcatcccaggttacacacccaccacagtggacagccccttgcagaagaggagctttgctgagctctccatggtcggccaagccagcattagtgggagtgaggacatcactacgtctcctcagttgtcaaaggaagatgccctcaacctctctgtccctcgccagcggaggaggaggaggagaaaaatcgaaattgaggccgaaagagctgccaagaggcgaaatctcatggagatggttgcccagcttcgagagtctcaggtggtctcagaaaatggacaagaaaaagttgtagatttatcaaaggcctcaagagaggcaacaagctctacctcaaatttttcatctctttcttcaaagtttatcttgcctaatgtctcaacaccagtgtctgatgcctttaagactcaaatggaactgctccaagcaggcctttcgcgcacacccacaaggcatctccttaatggctccctagtggatggagagcctcccatgaagaggaggcggggaaggaggaaaaatgtggagggacttgatctgcttttcatgagccacaaacggacgtcattgagtgc

SEQ ID NO: 3983 - DNA, 507 bp, Homo sapiens
  source 1..507: mol_type = unassigned DNA; mol_type = unassigned DNA
tcatgagccacaaacggacgtcattgagtgcagaggatgctgaggtgaccaaagcttttgaagaagatatagagaccccaccaacaagaaacattccttctcccggacagctggacccagacacacggatccctgttatcaatcttgaagatgggactaggctggtgggggaagatgctcctaaaaataaggatttagttgaatggctgaagctgcaccctacttacactgttgatatgccaagttatgtaccagtgagtattgcagagtttagagttggaaggaatcttgcaggccggtccacttcattcccttacaacatagaaatccctgacagctggtccctctgccttttccttgaatgtttcctggtctcaaacatttcccaggtctttgttgttgaatcttcttcattacagatactagcttcaggtctgtcttactgaaggcagccttacagttatttgaagatgcgcgttatgcatttccttactgtttgcttctccc

SEQ ID NO: 3984 - DNA, 4222 bp, Homo sapiens
  source 1..4222: mol_type = unassigned DNA; mol_type = unassigned DNA
gaggatgctgaggtgaccaaagcttttgaagaagatatagagaccccaccaacaagaaacattccttctcccggacagctggacccagacacacggatccctgttatcaatcttgaagatgggactaggctggtgggggaagatgctcctaaaaataaggatttagttgaatggctgaagctgcaccctacttacactgttgatatgccaagttatgtaccagtgagtattgcagagtttagagttggaaggaatcttgcaggccggtccacttcattcccttacaacatagaaatccctgacagctggtccctctgccttttccttgaatgtttcctggtctcaaacatttcccaggtctttgttgttgaatcttcttcattacagatactagcttcaggtctgtcttactgaaggcagccttacagttatttgaagatgcgcgttatgcatttccttactgtttgcttctcccatcaaactcatgtgacttcttcagttattctttccatggcatcgtttccaggcagtcttagtattggggtaacactgttgaatgcactttctccagtctccagacgaggccccgccatcccagagtgctatgaagccaattacttccagagatttgaccagttagtgcagcccaagattgtattagctgcttttatggcaactaatcctggtgccttatattaaacgttagacagttcatatctccaaatggtttgtcacacgaactgtttgctagctagcaatgcaagtcttttgctttctgtatttatgtgattgattttttaaaacttaaatgtagagttttacattttattttgttgggttcagcctagagttcttgccactcagaaagtacccccaccccctacaagatctgtctgtttgttggttagttctcattacagacagtctcatgttgttgatggggtatcatctctgtgttcattggagccactaactagaaattagtaaaagtactacagaaagcctcctttaaaagtatcatgacttggttaaacatttaaagaaaaactttaagtgaggttattgatagataaaaggaaaagccaattctcacttatgtattccttaatggacgggtaaaataggagttttttctttcaaagagaaaaatatggtttctaatattaataattaaaatgattcttgaaacttccataataattgaagatgatctgacagttctctttggcatttatatagagaagaataagtactaaataccaattttactaaatatgttttttcttttgcagaagaatgcagatgtgctgttttcctcatttcagaaaccgaaacagaaacgacatagatgtcgaaaccctaataaattggatataaacactttgacaggagaagaaagggtgcctgttgtcaataaacgaaatgggaagaaggtaaacgctgggaaagggaattgatcactatgcgatttcttagcccagaaggaagtgttttatcctgccttcttctataggggaaaagaatcctgtctgcccgaatgcgtgtgtgcgtgtatgtgtgtattatagaagggggagggagtagattaacagaaaggggagggaagactgtgtttttaatcatttgtcaaatgcctctacccagatgggtggagctatggcgcctccaatgaaggatctacccaggtggctggaagaaaatcctgaatttgcagttgctccagactggactgatatagttaagcagtctgtaagtacaaactgcatttctatcaagaaaggtagctatacaaaactgttttccttagtctttcttattttctgttggccattaattattcagttgtaacttagcttaaaagaattgacataatacatcattttcatacatcatttcatacatcattaatacatcattaatccaaagtgaattcatttatcagctccaatttaaaaggtttgtatggaaacatacattcacaatcttagaggtagacttctccaggggggattgccccagctaagcctacttaacagctcacctgtggaataggatgtatggtggttgagatcattaagattaactgtgatttctgatttaaaaacaaaacaaaacaaaacaaaacaaaaatacaacagttctgcctaaaagatttgttaccattagctttttaaaaattcgttcatgacatgctggttctttgttttaattatacattaaaaatgtctttcggtgtaacattctgttgatcttaacacacgtgtgagtttgtgaactgacaccgtagtcagaatagggttccatcccccacccccaccaccccgagttccctcacaccgtcctttccccgaccccagcccctggctgccgctgacctgttgtccatccctgtctttttgagaatgtcctgaaatggaagcatgaaggacataagtcttgaagcagtttctttcgctcatcatatggaaggtcatcgatggtcacatgtgtcacagttatctcctttctgttgccaagtagctgtctccattgcatagatgtgacactggacggcttagccctcacacactgaaggacatctgggttatttcctgatttttgaaactatgattagagctgctataagcaattgtgtacaggttttggtgtgaacataagttttcatttttctagggtagatactaaaatataattacattttccatatttcaaaaatacttttacatatatttgaaatatccaaaataacacattatagagggcataaaacatcctgggtttatattatgttatactattttataatttttctcccatacaatatctttttttttcttttttttttttttttttgagacaaggtgtttgtcacccaggctggagtgcagtggtgaaatcacagctcactacagcctcattctcctaggctcaagcaatcctcccacctcagcctcccaagcagctggcactacaggcacacatcaccaagcttggctagtttttgtattttttgtagagaaggcattttgccacgttgcccaggctggtctcaaactcacctcaagcaatctgcctgccctgacctcccaaagtgctgagattacaggtgtgagccactgtgcccagccaaaatttttttttaattgacagatatttaattgacaaaaattaattgatgaatcaaatatatatgcaaggtgtacagcacagtgtttttttcttttaagagacagggtcttgctgtgtcacccaggctggagtgcaatggtgcaatcatagctcactgcagcctcaaactcctgggctcaagcagtcctcccacctcagcctcctgattagccaagtagctgggatgacaagcatatgccaccacacctggatattttttttttattttgtagagatagggtcttgctatgtgccccaggctggtctcagactcctgggctcaagaaatcctctagtcttggcctcccaaagtgttgggattacaagcatgaaccacggcacctggcttcaaagtgatgatttgatataattatacattatgtactttcctttttaaaaatttgttatgggtacatagtaggtgtatatatagggtacatgagatattttgtacaagcacacagtgcataatgatcatgttgggtagatgaggtatgcatcacctcaagcatttaccctttgtattacaaacaatgtgattatactcttttagttattttaaaatatacagtaaattattgttgactgtgtagtcaccctgttgtgttatcaaaaactagatcttactcatcctgtctaactctatttttgtaccccataatgtactttctgatgtatgatttcttgagttagttatggatgcagctaacttgacatttacctcactgatgagtagccttgagcaatttttctgcagttcagcaagctaacataataataaaaacaagttttgctgtcattaagttttatcattgagctgttaggagggaagaactacttaggtatttccatttggaatggcaggttcaccacagaggctcacattgagatcaagttgtcttcgacagcctttatagccactgtttgcctcccctgtactccagggttttgttcctgagtcgatgtttgaccgccttctcactgggcctgtagtgcggggagagggagcgagcagaagaggaagaaggcccaaaagtgagatcgccagagcagc

SEQ ID NO: 3985 - DNA, 616 bp, Homo sapiens
  source 1..616: mol_type = unassigned DNA; mol_type = unassigned DNA
agaaaaactttaagtgaggttattgatagataaaaggaaaagccaattctcacttatgtattccttaatggacgggtaaaataggagttttttctttcaaagagaaaaatatggtttctaatattaataattaaaatgattcttgaaacttccataataattgaagatgatctgacagttctctttggcatttatatagagaagaataagtactaaataccaattttactaaatatgttttttcttttgcagaagaatgcagatgtgctgttttcctcatttcagaaaccgaaacagaaacgacatagatgtcgaaaccctaataaattggatataaacactttgacaggagaagaaagggtgcctgttgtcaataaacgaaatgggaagaagatgggtggagctatggcgcctccaatgaaggatctacccaggtggctggaagaaaatcctgaatttgcagttgctccagactggactgatatagttaagcagtctggttttgttcctgagtcgatgtttgaccgccttctcactgggcctgtagtgcggggagagggagcgagcagaagaggaagaaggcccaaaagtgagatcgccagagcagccgcggccg

SEQ ID NO: 3986 - DNA, 566 bp, Homo sapiens
  source 1..566: mol_type = unassigned DNA; mol_type = unassigned DNA
caaatgcctctacccagatgggtggagctatggcgcctccaatgaaggatctacccaggtggctggaagaaaatcctgaatttgcagttgctccagactggactgatatagttaagcagtctggttttgttcctgagtcgatgtttgaccgccttctcactgggcctgtagtgcggggagagggagcgagcagaagaggaagaaggcccaaaagtgagatcgccagagcagccgcggccgccgctgctgtggcctccacgtcagggatcaaccctttgctggtgaacagcctgtttgctggaatggacctgacgagccttcagaatctccagaatctccagtcgctccagctggcaggcctcatgggcttccctccaggactggcaacagctgccaccgccggaggcgatgcgaagaaccctgctgctgtgctgcccctgatgctgccaggaatggcgggcctgcccaacgtgtttggcttgggcgggctgttgaataaccctctgtcagctgctactggaaacaccactactgcttctagtcaaggagaaccggaagacagcact

SEQ ID NO: 3987 - DNA, 7665 bp, Homo sapiens
  source 1..7665: mol_type = unassigned DNA; mol_type = unassigned DNA
cgtgtccgagcgctggcggagcacgggccgccgcggcgcgcgcctacccccgcgcacacgtgcatgcagtgagccaggtgcatcagctgcacccgccctcgggcttcgcgcgcctccgctggagcccagctagcctcgcggctccggggccgaccgggtcggaactgctgcgtccccattccggacgcagagagcgcgcggggcgccggcgccgccggttaaagtgccgcggggcaggggccgggccgcggccacccgctcctcccgctccggtcccgactgtcgggctctcggccgagtcgccccggacaatcacaaagagtgtgtaggccagccccggtcacagagtgcaccgtatcctgtcacttctggatgtgagggagaagtgagtcatctcattcccctccgtggatcagaggacttggactagatagaagcatgtggtgtctcctacgaggcctgggccggcctggagccctggcacggggagccctggggcagcagcaatccctgggtgcccgggccctggccagcgcaggctctgagagccgggacgagtacagctatgtggtggtgggcgcgggctcggcgggctgcgtgctggctgggaggctcacggaggaccccgccgagcgcgtgctgctgctggaggccgggcccaaggacgtgctcgcggggagcaagcggctctcgtggaagatccacatgcccgcggccctggtggccaacctgtgcgacgacaggtacaactggtgctaccacacagaggtgcagcggggcctggacggccgcgtgctgtactggccacgcggccgcgtctggggtggctcctcatccctcaatgccatggtctacgtccgtgggcacgccgaggactacgagcgctggcagcgccagggcgcccgcggctgggactacgcgcactgcctgccctacttccgcaaggcgcagggccacgagctgggcgccagccggtaccggggcgccgatggcccgctgcgggtgtcccggggcaagaccaaccacccgctgcactgcgcattcctggaggccacgcagcaggccggctacccgctcaccgaggacatgaatggcttccagcaggagggcttcggctggatggacatgaccatccatgaaggcaaacggtggagcgcggcctgtgcctacctgcacccagcactgagccgcaccaacctcaaggccgaggccgagacgcttgtgagcagggtgctatttgagggcacccgtgcagtgggcgtggagtatgtcaagaatggccagagccacagggcttatgccagcaaggaggtgattctgagtggaggtgccatcaactctccacagctgctcatgctctctggcatcgggaatgctgatgacctcaagaaactgggcatccctgtggtgtgccacctacctggggttggccagaacctgcaagaccacctggagatctacattcagcaggcatgcacccgccctatcaccctccattcagcacagaagcccctgcggaaggtctgcattggtctggagtggctctggaaattcacaggggagggagccactgcccatctggaaacaggtgggttcatccgcagccagcctggggtcccccacccggacatccagttccatttcctgccatcccaagtgattgaccacgggcgggtccccacccagcaggaggcttaccaggtacatgtggggcccatgcggggcacgagtgtgggctggctcaaactgagaagtgccaatccccaagaccaccctgtgatccagcccaactacttgtcaacagaaactgatattgaggatttccgtctgtgtgtgaagctcaccagagaaatttttgcacaggaagccctggctccgttccgagggaaagagctccagccaggaagccacattcagtcagataaagagatagatgcctttgtgcgggcaaaagccgacagcgcctaccacccctcgtgcacctgtaagatgggccagccctccgatcccactgccgtggtggatccgcagacaagggtcctcggggtggaaaacctcagggtcgtcgatgcctccatcatgcctagcatggtcagcggcaacctgaacgcccccacaatcatgatcgcagagaaggcagctgacattatcaaggggcagcctgcactctgggacaaagatgtccctgtctacaagcccaggacgctggccacccagcgctaagacagttgctgctggaggatgaccagggaagccccctgataagccaagagggccagcacagcccttgctcccaggctcctgcctgaaactatctagcacactaggacccaggtggtaccctactcagtggctgagaattggataaagtcttgggaaatgagacaagtactgggcagtgaatccagctccttttccccagcctttccctgtgggccatttggggaaggccagcattcagcctgagatgttcctccctgcctcctggagggacagaaggggaggatggttaactcctgccgcatcctttttcttgtgttcacgtggcattctctaacccagggcagtggttccttcccaggccatgcacagaggctgggtgcctgccagacccacggagggttcgcgaaggaaggggcatcctccttcttgagctgcaagctttagctgaggcagtaagtcacacagtagttagttcagcctgggctggcacataagtccccagtgtccctgttgagaggggaaagttgcctgctggttgaaaaactggcttttcctttctcgctgcctaatttcactctcagagtgaggcaggtaactggggctccactgggtcactctgagagggttgtggctctggttcttattaaaccagggccaggtgcagggctcacacctgtaatcccagcactttgggaaggtcacttgagctcaggagttcaagaccagcctgggcaacatagtgagaccttgtctctggaaaacaattagctgggcatggtggtacacacctgtagtcccagctacttgggaggctgaggcgggaggatggctttagcccaggaggttgaggctcctgtgaaccctgatggcaccactgcactccagcctgggtgacagggtgagaccctgtctcaaaaaaaaaaaaaaaaaaaaaaacctgagatttttttggaccttattcaaggggagaggagtctggagggaatgccgcttggcttcactaccaaaggttttatgacttagcattttaaaaggttttccttttaccaagaaatgcagaaaccaagagcaaaccccacgtaccagatcactgattcctactgaagcagctagcccgagaaaggactctctcatactggtcttgggaaatgacttggcagcctgagccatcccagcagtggacaaggatggttaattcttattctgtagacgtccacaggaacagactaggatggaaaacacagttaagcacagccatgcaccctgtggctgtagaaatgcccctgtgtgaaagaaaaataaattcaagactggagttttggaggaaaaaaaatacaagtagcatttacaacagctctttgctctttaaatttcttaccattcaataaagtgatccagtcactcacatttgaactgagatgccttctccagactgttctgacaaggtaatgaaaataaaatgcacttggatttttccagacatccacatccaccgtcaagggctgggaagaaaagcattgttgcgtggaaacctgcagctatactaggcccagaataaggacgggaggaaattgggggattccaggctttgctcggatctgagaggattggggcggcttacagactggggcggggggggggggcgtccgacagccacaagttagttttctgagaaaaaccttcgagagaggcagcaggaagaaacccatcacacctctccttttaaaaatcttaagcagctcttgtttaatcttacctgtattttttaaaatttttgttcgaagagagggtcaagaaagaaaattctaaaccggccaagagacttatttctcctacggagggtccccacctgccccacagcagcagtccatggccatcagtcacctgggtctcggggctgcctgcaagagtgcagaaacaggagttcaggtgccagccccgtaacttggagggcctcgtgcagctttcctgctggagcgtgtgtggattcaggggcaggggatagtcctggaccaaccatgactgtgctgacccttcttctctggaacaggtatggatatggcagggtgacagtcacttagttctaccatctctgtgtcccatgggtgtgtcagtgtctgagaccatggtgggttcagtctggtggctgtattttaaaataagcaaaacgtcatatggtaagaggagcccattggtgatgctgctcaattgcacccaggcccttctttcactctcaaatacttagccatgttctacacaatcgcacaatttggccataaacaggaatgaggtttaaaagaaaagatggtaagtgtcacatgtccagaacctgagcgttcccctgccatgaagggagtctttcattcaccccaggaggagaggctgtcacctgaggaagccagcatgggggagaaaggcacttgctacaaagtggggtgcacagagggtacccccccatcttcagtctcatagggaattgggccccttggccaaaagcttgcagtacctaaaaacagagaaacgtgctttgcaaaaatggctcaaagagcacaacagaatgcgctgtccatgtgcccagtgctctcaggagccctgacctattgcagaagcctgtgttgaagccgctgcactagtagaaggcagctcctgatggaataggggataggggtgggctgtgtgggagccaagagcatctggcagcctgactggagatggtgagttcctgaagcaggagttgtaggcacccaaacatctagtctttctgcttgtagcgaaggttgcaggcatcatctccacgaattcaaatagattcttcttggctaggcatggtggctcacgcctgtaatcccagcactttgcaaggctgaggtgggtggatcacttgaggccaggagtttgagaccagcctggccaacatggtgaaaccccgtctctactaaaaatacaaaaattagctgggcatggtggtgcacgcctgtagtcccagctacttgggaggccgatacaggagaatcgcttgaacctgggtggcgcaggctgcagtgagccaagattgcaccactgcactccaccctgggtgacagagtgagactgtctcaaaaaaaaacaacaaaaaaacagattcttctccacccaaccatgtcccgccactcagaagtggtttcatgcttctactgataagccaacttaacatcagatccaatacagattttttaaagataaaataccatctctactggacctgtttagtggctcaggctgccctcacaggacatccctgagaccaccctgtcactcttgatgttggaaccagggcccaggcctgctcctcattgtctcctgccctcctagtccccaggagaggaaaagaaatactgttttagagaaataacattttcaacaaaacatccctggagtcagattttgagttggggtgggctaatcagggagtcggggctctctgcgtgatgtcagttctatggctaactggtttttctaaaccagccagctgcctatcaaaacagtacaacttttctaggaaatgcaattggcaaagacacttacgatgctgagaagtacacaaggtgaaactgctccagtttttctcatagcagggtcagcaggaaagcaagtggtgcccctggtcccatctcacacaggtgagactgcaccgagaggtaacgtggccctcacagcccaccacgcctggccttcgcccaattctgaaacttcgtaggatagagctggaaagtgccacatggtgaagcgagatccagctgtctgggtggatgtcggagtccataggctgagcagagatggttcttagtgaggttctcgctgccagttgacggtgaaatcatagctgccatttacattttgtgagattatgaaaaacataagactaaagaaactaaatgtgttattcctgtggacacaaaaatgtgtgtttttcagatggggaggggaccaaaaaggaaaaacatttcatcttaaaactttcctaagacaagggaaaacaaaaaaccatgctctacaacttcaaatttttcttacaaagaaaaatttaatattcgatgagaggttgaaccaggcttaaagcagacatactaggaaatggtgcagcctgtaagaatgccagtttgtaagtactgactttggaaaagatcatcgcctctatcagacacttagggtcctggtctggcaattttggcctgatgtgatgccacaagacccaacagagagagacacagagtccaggataatgttgacagtggtgtagccctttaggagaaatggcgctccctgcggctggtattaggttaccattggcaccgaaggaaccaggaggataagaatatccataatttcagagctgccctggcacagtacctgccctgtcggaggctctcactggcaaatgacagctctgtgcaaggagcactcccaagtataaaaattattacacagttttattctgaagaacattttgcattttaataaaaaaggatttatgtcaggaaagagtcatttacaaaccttgaagtgtttttgcctggatcagagtaagaatgtcttaagaagaggtttgtaaggtcttcataacaaagtggtgtttgttatttacaaaaaaaaaaaaaaaaaaaaaaattaacaggttgtctgtatactattaaaaattttggaccaaaattgctacctatcatctatctttttgattgcagggaatccctgccaaggtaacctgacagtcggcctaattctgttgacagaaaatgaagccttgacggttctaattatccaaaagtgggttttcatcaggacgtacagtcagagtgtgagtgcattctaatgaaaacttcagccctcattcaattgcatataaaagccctcaaagagaacatacagtacagcagttttgtaaaaggcaacaatacgatttgtacagaccccgacactccaatcctatagatcaccacgttgctcctctgtccccagcaccccttatttcttaagcagcaccaccagtccccagaggacaagagcagctatatctcatccacctatgcatttctgcaccagcgatgcaaaaaacaccctgggtgggccacagagaaaaccgtaactatggatacccaaggggcagagcagccagctggacctgctctgtaattcacttacttacttaccagagggtggttcaagtcaaacaaacaaaaccaaagacagttgcaacccatggtggatccaaaggtacagtatcaaaatcatggaactcttgcccaaagaaaagactgcaaatagtcatctggtatatcttgtggaaagatgataggtttatagtgactcaaaatattttagaaaaatttctgtagtgtcaagttctttcaaacttaaaattttaaccccagaggattttcgctgaataaatgagaattggctcta

SEQ ID NO: 3988 - DNA, 631 bp, Homo sapiens
  source 1..631: mol_type = unassigned DNA; mol_type = unassigned DNA
tcggcacacaggctttgagacaaccagggtgcggagacaatcacaaagagtgtgtaggccagccccggtcacagagtgcaccgtatcctgtcacttctggatgtgagggagaagtgagtcatctcattcccctccgtggatcagaggacttggactagatagaagcatgtggtgtctcctacgaggcctgggccggcctggagccctggcacggggagccctggggcagcagcaatccctgggtgcccgggccctggccagcgcaggctctgagagccgggacgagtacagctatgtggtggtgggcgcgggctcggcgggctgcgtgctggctgggaggctcacggaggaccccgccgagcgcgtgctgctgctggaggccgggcccaaggacgtgctcgcggggagcaagcggctctcgtggaagatccacatgcccgcggccctggtggccaacctgtgcgacgacaggtacaactggtgctaccacacagaggtgcagcggggcctggacggccgcgtgctgtactggccacgcggccgcgtctggggtggctcctcatccctcaatgccatggtctacgtccgtgggcacgccgaggactacgagcgctggcagcgccagggcgcc

SEQ ID NO: 3989 - DNA, 565 bp, Homo sapiens
  source 1..565: mol_type = unassigned DNA; mol_type = unassigned DNA
ggctagtccctctgagacgagcgagcaggcagccattcactaacatgcgttcattccacaatcacaaagagtgtgtaggccagccccggtcacagagtgcaccgtatcctgtcacttctggatgtgagggagaagtgagtcatctcattcccctccgtggatcagaggacttggactagatagaagcatgtggtgtctcctacgaggcctgggccggcctggagccctggcacggggagccctggggcagcagcaatccctgggtgcccgggccctggccagcgcaggctctgagagccgggacgagtacagctatgtggtggtgggcgcgggctcggcgggctgcgtgctggctgggaggctcacggaggaccccgccgagcgcgtgctgctgctggaggccgggcccaaggacgtgctcgcggggagcaagcggctctcgtggaagatccacatgcccgcggccctggtggccaacctgtgcgacgacaggtacaactggtgctaccacacagaggtgcagcggggcctggacggccgcgtgctgtactggccacgcggccgc

SEQ ID NO: 3990 - DNA, 2550 bp, Homo sapiens
  source 1..2550: mol_type = unassigned DNA; mol_type = unassigned DNA
ccgctcctggctgcccgctcctcccggccctgcggcccccgcctgccctttaaaagagcggggcctgcgccggccgcgccacaccgcggggaccaggaggcacgctggttttccggggccgctccatcgcgccttcctcctgcgcctcgcttctccggtccagccgccatcttcctttccgcacaggggccgccgagcggggccatgcagccaacgctgcttctcagcctcctgggagccgtggggctggcggctgtcaattccatgccagtggataacaggaaccacaatgaaggaatggtgactcgctgcatcattgaggtcctctcaaatgccttgtcgaagtccagcgctccacccatcacccctgagtgccgccaagtcctgaagacgagtagaaaagacgtcaaagacaaagagacaactgaaaatgaaaacacaaagtttgaagtaagattgttaagagacccagctgatgcctcggaagcccacgagtcctccagcaggggagaggcaggagccccaggggaggaggacatccaaggcccaacaaaggcagacacagagaaatgggcagagggaggcgggcacagccgagagcgagcggatgagccccagtggagcctctatccctccgacagccaagtctctgaagaagtgaagacacgccattctgagaagagccagagagaggatgaggaggaggaggagggagagaactatcaaaaaggggagcgaggggaagatagcagtgaagagaaacaccttgaagagccaggagagacacaaaacgcttttctcaatgaaagaaagcaggcttcagctataaaaaaagaggagttagtggccagatcggaaacacatgctgccgggcattctcaggagaagacacatagccgagagaagagtagccaggagagtggagaggagacagggagccaggagaatcacccccaggagtctaaaggccaaccccgaagccaggaagaatctgaggaaggtgaggaagatgccacctctgaggtggacaaacgacgcacgaggcccagacaccaccacgggaggagcaggcccgacaggtcctctcaaggagggagtcttccctctgaggaaaagggacacccccaggaggaatctgaggagtcaaacgtcagcatggccagtttaggggaaaagagggaccaccattcaacccactacagggcttcagaggaagaacctgaatatggagaagaaataaagggttatccaggcgtccaggcccctgaggacctggagtgggagcgctataggggcagaggaagtgaagaatacagggctccaagacctcagagtgaggagagttgggatgaggaggacaagagaaactaccccagcttagagcttgataagatggcacatggatatggtgaagaaagtgaggaagagaggggccttgagccgggaaagggacgccatcacagaggcaggggaggggagccacgtgcctatttcatgtctgacaccagagaagagaaaaggttcttgggtgaaggacaccaccgtgtccaagaaaaccagatggacaaggcaaggaggcatccacaaggtgcgtggaaagagctggacagaaattatctcaactacggtgaggaaggagccccagggaagtggcagcagcagggagacctgcaggacactaaagaaaacagggaggaagctaggtttcaagataaacaatatagctcccatcacacagctgaaaagaggaagagattaggggaactgttcaacccatactacgaccctctccagtggaagagcagccattttgaaagaagagacaacatgaatgacaattttctcgagggtgaggaggaaaatgagctgaccttgaacgagaagaatttcttcccagaatacaactatgactggtgggagaaaaagcccttctctgaggatgtgaactgggggtatgagaagagaaacctcgccagggtccccaagctggacctgaaaaggcaatatgacagggtggcccaactggaccagctccttcactacaggaagaagtcagctgagtttccagacttctatgattctgaggagccggtgagcacccaccaggaggcagaaaatgaaaaggacagggctgaccagacagtcctgacagaggacgagaaaaaagaactcgaaaacttggctgcaatggatttggaactacagaagatagctgagaaattcagccaaaggggctgactgtcattggagcggtgggcactgttaagaagcagccatcacatgatctgtttttcaccacttcactgaaagacaccatttatctacccaagggcagaaagtagaacttactattcattaaatgtttgacacaattggaattgtctttaatttctgtcagaatgctattgaaaatgtgaattgcatgacttgtagcatattcttttctgcaaaatagacatattaacatgcttatgacaatgactgtgctactgtctttggaaaaatgtttgtctcagttggaaataataaaagattcacctgagaccaaaa

SEQ ID NO: 3991 - DNA, 1129 bp, Homo sapiens
  source 1..1129: mol_type = unassigned DNA; mol_type = unassigned DNA
cacgctggttttccggggccgctccatcgcgccttcctcctgcgcctcgcttctccggtccagccgccatcttcctttccgcacaggggccgccgagcggggccatgcagccaacgctgcttctcagcctcctgggagccgtggggctggcggtcatttatttgcagaagatattacagatttccagcggaaagagaaagtgctgaaatgggtgtgttctcaagtagccatttggaggatgaaagaacactgtcaattccatgccagtggataacaggaaccacaatgaaggaatggtgactcgctgcatcattgaggtcctctcaaatgccttgtcgaagtccagcgctccacccatcacccctgagtgccgccaagtcctgaagacgagtagaaaagacgtcaaagacaaagagacaactgaaaatgaaaacacaaagtttgaagtaagattgttaagagacccagctgatgcctcggaagcccacgagtcctccagcaggggagaggcaggagccccaggggaggaggacatccaaggcccaacaaaggcagacacagagaaatgggcagagggaggcgggcacagccgagagcgagcggatgagccccagtggagcctctatccctccgacagccaagtctctgaagaagtgaagacacgccattctgagaagagccagagagaggatgaggaggaggaggagggagagaactatcaaaaaggggagcgaggggaagatagcagtgaagagaaacaccttgaagagccaggagagacacaaaacgcttttctcaatgaaagaaagcaggcttcagctataaaaaaagaggagttagtggccagatcggaaacacatgctgccgggcattctcaggagaagacacatagccgagagaagagtagccaggagagtggagaggagacagggagccaggagaatcacccccaggagtctaaaggccaaccccgaagccaggaagaatctgaggaaggtgaggaagatgccacctctgaggtggacaaacgacgcacgaggcccagacaccaccacgggaggagcaggcccgacaggtcctctcaaggagggagtcttccctctgaggaaaagggacacccccaggagga

SEQ ID NO: 3992 - DNA, 2030 bp, Homo sapiens
  source 1..2030: mol_type = unassigned DNA; mol_type = unassigned DNA
acggatgcataaacgagcttgttcaggcaaaggccttgcgggtgaaaaatgaggtaattaattatggaagacatccataaccatgtttttgtcaaggaagtaagttttgggaggatatatttttggaaacagagatacggagagagagccacagatctttacctatttggggtaggcagagaaggaccaaggagggcattcttgttttattagacttagtttggtttaaacttttttttttttgagacggagtctggccctgtcacccaggctggagtacagtggcacgatcatggctcactgcaacctccgcctcctgggttcaagcaattctcctgcctcagcctcccaggtagctggcgcgtgccaccacgcctggctaattttttgtagttttagtagagacagggttttgtcatgttagccaggttggtctcgatctcctgaccttgtgatccaccagccttggcctcccaaagtgctgggattacaagcatgagccaccgcacccagccctagcttaaacttttaattgaaataaaatatatagaaaatggaacagatcatgagtatacagcttaatacgcacacctgtgtaaccagcactgagattaaaaaatgggacatttctggttccccagaagtcccctccttgtctgtggtctagatttgatttataccggatctaaaatagcatttgtttccaaatatatttaagacattgccaggggaaaaacaacaactaatgtggggtgattttgtcagttggggtcacacagctttcaaaaaccaactcaagtcattttccattctttttctccttcaaagctgtcaattccatgccagtggataacaggaaccacaatgaaggaatggtgactcgctgcatcattgaggtcctctcaaatgccttgtcgaagtccagcgctccacccatcacccctgagtgccgccaagtcctgaagacgagtaagtgtcccacacggcaggcagatcttggtcactgcagtgatccttgttcctactccctccacatcaccttctactttatctacaaatgacctgggggcataatgcactaggaagagtattgattgactaggccagtatctgggagacagaagatatgactcctagttcctgctttaccacttcgcagctgtgtgactataggaaagacagtttgcctctcttttcctcaaagtaaaatgaaggagttgaactcagtgatagtctttcagatgtctatccgttcttaaattccttagttccatactttggatttttagaaccggacttcctttgggtggagggggtttgggaaatgctggtttgtgattagatgaggaggggggttatggaagtgttggacaatgacagagggagatttaaaaatcattcttctctttgccttttgctcttctgacagtgagaatcaggaagctgagaagcaagaaacttagaaaggtgacttaaaattctggcctatttacacaacaaattagctaagatattttaatgtatagcttactagaatagaaggtgccaccaaatggtaccaggagttccaggcctgagaactggaagggtttcaggtagaggcagtgcattccagtgaggcagactaatggctttctgagtccagcctgtgaagtgttctcaatatgaaaccatttctgctgaaaataaaatttgaacagtaatataagcagtacccattggaaattgacattatgaggtcaattttacaaaactatgcagtctctgttatgcatgaagccacactgattcaaacaaatccagaaaacactgccctcttcaacactgtcctctgcttttaaacttttagtcaggctgggaacagtagattttatcttattttttcacctttaaaaatctttcaggtgggcatagtggctcacacctgtaatcccagcactttgggaggccgaggcaggtggatcacctgaggtcagcagtttgagaccagcctggccaacatggtgaaaccctgtctctactaaaaatac

SEQ ID NO: 3993 - DNA, 619 bp, Homo sapiens
  source 1..619: mol_type = unassigned DNA; mol_type = unassigned DNA
ctgaaggaccacaggccccggatggtgtgggacagccaggcctcagagcacttcttcgagtacaagaagagccgcagtgggaggcacgtcgtcttctacccaaccctgaagtccctgcaggtgcggctggagctggcccgggagctgggcgttggggtctctatctgggagctgggccagggcctggactacttctacgacctgctctagagagccacccagacgtccccaccgagtccagcacggcaagggtgcaggggctgccctagaaatgggctcagaggagcctggcccaccctcttgaaactggtcctggaccttggctcagctctgccgcctcaggacgggagctggggagggggtcctgggtcggacccaaggcacccacacttgagaaagcctccgcctggacgtcagggaggcctgcgagctgccacagtgcaggtgcagccgttcccaccgccctgctgctgcttgacacgggcataggagatacaagtggtgtgtgcggcggttcatgcctgtaatcccagtactttggaaagccgtggcgggaggaacgctgggcaacatggtgaaaccccgtctctaccccctaaaaatagaaaaattagcaaga

SEQ ID NO: 3994 - DNA, 602 bp, Homo sapiens
  source 1..602: mol_type = unassigned DNA; mol_type = unassigned DNA
cccgaagtccaagtggcgaagcaaaatcctcctggggctcaacttctatggtatggactacgcgacctccaaggatgcccgtgagcctgttgtcggggccaggtacatccagacactgaaggaccacaggccccggatggtgtgggacagccaggcctcagagcacttcttcgagtacaagaagagccgcagtgggaggcacgtcgtcttctacccaaccctgaagtccctgcaggtgcggctggagctggcccgggagctgggcgttggggtctctatctgggagctgggccagggcctggactacttctacgacctgctctaggacgggagctggggagggggtcctgggtcggacccaaggcacccacacttgagaaagcctccgcctggacgtcagggaggcctgcgagctgccacagtgcaggtgcagccgttcccaccgccctgctgctgcttgacacgggcataggagatacaagtggtgtgtgcggcggttcatgcctgtaatcccagtactttggaaagccgtggcgggaggaacgctgggcaacatggtgaaaccccgtctctaccccctaaaaatagaaaaattagcaaga

SEQ ID NO: 3995 - DNA, 3374 bp, Homo sapiens
  source 1..3374: mol_type = unassigned DNA; mol_type = unassigned DNA
gaatgcgcggtgactcaaaagtgctggccacgcgctcgttcatccaagcgcgaggggctgagttgggaacttggtttgcctcctggggctccggctcgtgcaatgtgcaaggcgggggtgcggaccgagagagcgcgcgtttcgggcagtccccgctggagacagcgcagtgggcgccatcggcctggggatggagatggtccactcaggcgggggtcggggggacgccaggagtggtgactccgggtccccgggggagcgtgccggggcggagcccaccgcgcggttctcccggcaccgccgagccgggcagaggccctggagcccaaggccccgcgcggccccacgccaagggcgccaggcctgcctaagagccgtggcgctgggaacccggctacccctgggccgggaacctgataaccagctccagcgcgagcaccaggggcgctcaaggtgaacgcgccgggcccggggtccgcccccggcgcggccccgccccggccccggccccggccccggccccgactttcgggcagccctgcccagtcccctgtcctggcccagcccctctccatcccagcgtgccgtgcgcggcggcggcgcgcgggcgcctggggcgggacttccggcgcgctggagcgttttccggccgtgcgtttgtggccgtccggcctccctgacatgcagccctctggaccccgaggttggaccctactgtgacacacctaccatgcggacactcttcaacctcctctggcttgccctggcctgcagccctgttcacactaccctgtcaaagtcagatgccaaaaaagccgcctcaaagacgctgctggagaagagtcagttttcagataagccggtgcaagaccggggtttggtggtgacggacctcaaagctgagagtgtggttcttgagcatcgcagctactgctcggcaaaggcccgggacagacactttgctggggatgtactgggctatgtcactccatggaacagccatggctacgatgtcaccaaggtctttgggagcaagttcacacagatctcacccgtctggctgcagctgaagagacgtggccgtgagatgtttgaggtcacgggcctccacgacgtggaccaagggtggatgcgagctgtcaggaagcatgccaagggcctgcacatagtgcctcggctcctgtttgaggactggacttacgatgatttccggaacgtcttagacagtgaggatgagatagaggagctgagcaagaccgtggtccaggtggcaaagaaccagcatttcgatggcttcgtggtggaggtctggaaccagctgctaagccagaagcgcgtgggcctcatccacatgctcacccacttggccgaggctctgcaccaggcccggctgctggccctcctggtcatcccgcctgccatcacccccgggaccgaccagctgggcatgttcacgcacaaggagtttgagcagctggcccccgtgctggatggtttcagcctcatgacctacgactactctacagcgcatcagcctggccctaatgcacccctgtcctgggttcgagcctgcgtccaggtcctggacccgaagtccaagtggcgaagcaaaatcctcctggggctcaacttctatggtatggactacgcgacctccaaggatgcccgtgagcctgttgtcggggccaggtacatccagacactgaaggaccacaggccccggatggtgtgggacagccaggcctcagagcacttcttcgagtacaagaagagccgcagtgggaggcacgtcgtcttctacccaaccctgaagtccctgcaggtgcggctggagctggcccgggagctgggcgttggggtctctatctgggagctgggccagggcctggactacttctacgacctgctctaggtgggcattgcggcctccgcggtggacgtgttcttttctaagccatggagtgagtgagcaggtgtgaaatacaggcctccactccgtttgctgtgacgggtctgctgcagtcctcagtcgggggtcctgggcaccatgtgactccccatcctcccatgaggggtccctgccctggatgagtcctagctgggggacaccctgagagctcgagcccctcccacccgggcatccgctggctgcctcctgtcagctgggcaggcggggcccacagtacctgccccaccaggacagcctggctcaggcctttctgggctgcttctcacatcctgggctggatgtgggtttggaagctctggaaccatcccggactcgcccactcctggattcgagggccctcgcagggacagctctgcccagcatcaccccagggcctggcagtgatagagctgagagctccacccccacatacctgccacccacctggccagccacagcacgtgtgtcacctgcagagagccacccagacgtccccaccgagtccagcacggcaagggtgcaggggctgccctagaaatgggctcagaggagcctggcccaccctcttgaaactggtcctggaccttggctcagctctgccgcctcaggtagcacgacccccaggccagcctggacacatcagggagcatggtgaggggcaacggcaggacccgtgggccatatcgggacaggcatttccagcgaggggtggggcagaggacatgtggctggcaggctacacccaccctgccatgcagcggtgtccaggctctggggaggccctggggaatttggaggcatcatgagccaaggcctggtggccctcgttcccctgcccctcgtcaccatcctgtccttggctggccgtgaggactcccctcctcaccactgggtcccacagggctgaggtgggcagtagagggcataggtgggtacatgtcccgggcaaggtctctcggggggacagaagtgagtccagggagtgggtgggcctgggcgtccctcactcagaatgccgtggggtgaggacggtgaggacagggtgggcactgggttctggtttagagtcagtaatgttagggcgcagtgggcagggggtcaggacatctccagccggtggtgaggaagcatggtggggtctcctccacaggacgggagctggggagggggtcctgggtcggacccaaggcacccacacttgagaaagcctccgcctggacgtcagggaggcctgcgagctgccacagtgcaggtgcagccgttcccaccgccctgctgctgcttgacacgggcataggagatacaagtggtgtgtgcggcggttcatgcctgtaatcccagtactttggaaagccgtggcgggaggaacgctgggcaacatggtgaaaccccgtctctaccccctaaaaatagaaaaattagcaag

SEQ ID NO: 3996 - DNA, 1171 bp, Homo sapiens
  source 1..1171: mol_type = unassigned DNA; mol_type = unassigned DNA
aggatgcccgtgagcctgttgtcggggccaggtacatccagacactgaaggaccacaggccccggatggtgtgggacagccaggcctcagagcacttcttcgagtacaagaagagccgcagtgggaggcacgtcgtcttctacccaaccctgaagtccctgcaggtgcggctggagctggcccgggagctgggcgttggggtctctatctgggagctgggccagggcctggactacttctacgacctgctctaggtgggcattgcggcctccgcggtggacgtgttcttttctaagccatggagtgagtgagcaggtgtgaaatacaggcctccactccgtttgctgtgacgggtctgctgcagtcctcagtcgggggtcctgggcaccatgtgactccccatcctcccatgaggggtccctgccctggatgagtcctagctgggggacaccctgagagctcgagcccctcccacccgggcatccgctggctgcctcctgtcagctgggcaggcggggcccacagtacctgccccaccaggacagcctggctcaggcctttctgggctgcttctcacatcctgggctggatgtgggtttggaagctctggaaccatcccggactcgcccactcctggattcgagggccctcgcagggacagctctgcccagcatcaccccagggcctggcagtgatagagctgagagctccacccccacatacctgccacccacctggccagccacagcacgtgtgtcacctgcagagagccacccagacgtccccaccgagtccagcacggcaagggtgcaggggctgccctagaaatgggctcagaggagcctggcccaccctcttgaaactggtcctggaccttggctcagctctgccgcctcaggacgggagctggggagggggtcctgggtcggacccaaggcacccacacttgagaaagcctccgcctggacgtcagggaggcctgcgagctgccacagtgcaggtgcagccgttcccaccgccctgctgctgcttgacacgggcataggagatacaagtggtgtgtgcggcggttcatgcctgtaatcccagtactttggaaagccgtggcgggaggaacgctgggcaacatggtgaaaccccgtctctaccccctaaaaatagaaaaattagc

SEQ ID NO: 3997 - DNA, 1289 bp, Homo sapiens
  source 1..1289: mol_type = unassigned DNA; mol_type = unassigned DNA
cggcgcgctggagcgttttccggccgtgcgtttgtggccgtccggcctccctgacatgcagccctctggaccccgaggttggaccctactgtgacacacctaccatgcggacactcttcaacctcctctggcttgccctggcctgcagccctgttcacactaccctgtcaaagtcagatgccaaaaaagccgcctcaaagacgctgctggagaagagtcagttttcagataagccggtgcaagaccggggtttggtggtgacggacctcaaagctgagagtgtggttcttgagcatcgcagctactgctcggcaaaggcccgggacagacactttgctggggatgtactgggctatgtcactccatggaacagccatggctacgatgtcaccaaggtctttgggagcaagttcacacagatctcacccgtctggctgcagctgaagagacgtggccgtgagatgtttgaggtcacgggcctccacgacgtggaccaagggtggatgcgagctgtcaggaagcatgccaagggcctgcacatagtgcctcggctcctgtttgaggactggacttacgatgatttccggaacgtcttagacagtgaggatgagatagaggagctgagcaagaccgtggtccaggtggcaaagaaccagcatttcgatggcttcgtggtggaggtctggaaccagctgctaagccagaagcgcgtgaccgaccagctgggcatgttcacgcacaaggagtttgagcagctggcccccgtgctggatggtttcagcctcatgacctacgactactctacagcgcatcagcctggccctaatgcacccctgtcctgggttcgagcctgcgtccaggtcctggacccgaagtccaagtggcgaagcaaaatcctcctggggctcaacttctatggtatggactacgcgacctccaaggatgcccgtgagcctgttgtcggggccaggtacatccagacactgaaggaccacaggccccggatggtgtgggacagccaggcctcagagcacttcttcgagtacaagaagagccgcagtgggaggcacgtcgtcttctacccaaccctgaagtccctgcaggtgcggctggagctggcccgggagctgggcgttggggtctctatctgggagctgggccagggcctggactacttctacgacctgctctaggtgggcattgcggcctccgcggtggacgtgttcttttctaagccatggagtgagtgagcaggtgtgaaatacaggcctccactccgtttgctgtga

SEQ ID NO: 3998 - DNA, 1431 bp, Homo sapiens
  source 1..1431: mol_type = unassigned DNA; mol_type = unassigned DNA
gtgcgtttgtggccgtccggcctccctgacatgcagccctctggaccccgaggttggaccctactgtgacacacctaccatgcggacactcttcaacctcctctggcttgccctggcctgcagccctgttcacactaccctgtcaaagtcagatgccaaaaaagccgcctcaaagacgctgctggagaaggtgaagttttgctcttgttgcccaggctggagcgcaatggcgcgatcttggctcaccgcaacctctgccacccagagtcagttttcagataagccggtgcaagaccggggtttggtggtgacggacctcaaagctgagagtgtggttcttgagcatcgcagctactgctcggcaaaggcccgggacagacactttgctggggatgtactgggctatgtcactccatggaacagccatggctacgatgtcaccaaggtctttgggagcaagttcacacagatctcacccgtctggctgcagctgaagagacgtggccgtgagatgtttgaggtcacgggcctccacgacgtggaccaagggtggatgcgagctgtcaggaagcatgccaagggcctgcacatagtgcctcggctcctgtttgaggactggacttacgatgatttccggaacgtcttagacagtgaggatgagatagaggagctgagcaagaccgtggtccaggtggcaaagaaccagcatttcgatggcttcgtggtggaggtctggaaccagctgctaagccagaagcgcgtgggcctcatccacatgctcacccacttggccgaggctctgcaccaggcccggctgctggccctcctggtcatcccgcctgccatcacccccgggaccgaccagctgggcatgttcacgcacaaggagtttgagcagctggcccccgtgctggatggtttcagcctcatgacctacgactactctacagcgcatcagcctggccctaatgcacccctgtcctgggttcgagcctgcgtccaggtcctggacccgaagtccaagtggcgaagcaaaatcctcctggggctcaacttctatggtatggactacgcgacctccaaggatgcccgtgagcctgttgtcggggccaggtacatccagacactgaaggaccacaggccccggatggtgtgggacagccaggcctcagagcacttcttcgagtacaagaagagccgcagtgggaggcacgtcgtcttctacccaaccctgaagtccctgcaggtgcggctggagctggcccgggagctgggcgttggggtctctatctgggagctgggccagggcctggactacttctacgacctgctctaggtgggcattgcggcctccgcggtggacgtgttcttttctaagccatggagtgagtgagcaggtgtgaaatacaggcctccactccgtttgctgtg

SEQ ID NO: 3999 - DNA, 1477 bp, Homo sapiens
  source 1..1477: mol_type = unassigned DNA; mol_type = unassigned DNA
gcgctggagcgttttccggccgtgcgtttgtggccgtccggcctccctgacatgcagatttccacccagaagacagagaaggagccagtggtcatggaatgggctggggtcaaagactgggtgcctgggagctgaggcagccaccgtttcagcctggccagccctctggaccccgaggttggaccctactgtgacacacctaccatgcggacactcttcaacctcctctggcttgccctggcctgcagccctgttcacactaccctgtcaaagtcagatgccaaaaaagccgcctcaaagacgctgctggagaagagtcagttttcagataagccggtgcaagaccggggtttggtggtgacggacctcaaagctgagagtgtggttcttgagcatcgcagctactgctcggcaaaggcccgggacagacactttgctggggatgtactgggctatgtcactccatggaacagccatggctacgatgtcaccaaggtctttgggagcaagttcacacagatctcacccgtctggctgcagctgaagagacgtggccgtgagatgtttgaggtcacgggcctccacgacgtggaccaagggtggatgcgagctgtcaggaagcatgccaagggcctgcacatagtgcctcggctcctgtttgaggactggacttacgatgatttccggaacgtcttagacagtgaggatgagatagaggagctgagcaagaccgtggtccaggtggcaaagaaccagcatttcgatggcttcgtggtggaggtctggaaccagctgctaagccagaagcgcgtgggcctcatccacatgctcacccacttggccgaggctctgcaccaggcccggctgctggccctcctggtcatcccgcctgccatcacccccgggaccgaccagctgggcatgttcacgcacaaggagtttgagcagctggcccccgtgctggatggtttcagcctcatgacctacgactactctacagcgcatcagcctggccctaatgcacccctgtcctgggttcgagcctgcgtccaggtcctggacccgaagtccaagtggcgaagcaaaatcctcctggggctcaacttctatggtatggactacgcgacctccaaggatgcccgtgagcctgttgtcggggccaggtacatccagacactgaaggaccacaggccccggatggtgtgggacagccaggcctcagagcacttcttcgagtacaagaagagccgcagtgggaggcacgtcgtcttctacccaaccctgaagtccctgcaggtgcggctggagctggcccgggagctgggcgttggggtctctatctgggagctgggccagggcctggactacttctacgacctgctctaggtgggcattgcggcctccgcggtggacgtgttcttttctaagccatggagtgagtgagcaggtgtgaaatacaggcctccactccgtttgc

SEQ ID NO: 4000 - DNA, 553 bp, Homo sapiens
  source 1..553: mol_type = unassigned DNA; mol_type = unassigned DNA
ctgaaaggacttggtggggtggcttcttccgaggaagctcctggaagatgtttttcctgaggtttcctctaatacagggttcacacggcctggggctctggccaccccaccaggtgttgtcccccagaccactggggacagtggctgccccgagtggccctgcccctgctgagagccacagcctttgggggtacagggtggggctgtgggggagctgggtgggctcccaaatccatatcctggtctccccaggtacatccagacactgaaggaccacaggccccggatggtgtgggacagccaggcctcagagcacttcttcgagtacaagaagagccgcagtgggaggcacgtcgtcttctacccaaccctgaagtccctgcaggtgcggctggagctggcccgggagctgggcgttggggtctctatctgggagctgggccagggcctggactacttctacgacctgctctaggtgggcattgcggcctccgcggtggacgtgttcttttctaagccatggagtgagtgagcaggtgtgaaatacaggcct

SEQ ID NO: 4001 - DNA, 323 bp, Homo sapiens
  source 1..323: mol_type = unassigned DNA; mol_type = unassigned DNA
ccagctgggcatgttcacgcacaaggagtttgagcagctggcccccgtgctggatggtttcagcctcatgacctacgactactctacagcgcatcagcctggccctaatgcacccctgtcctgggttcgagcctgcgtccaggtcctggacccgaagtccaagtggcgaagcaaaatcctcctggggctcaacttctatggtacatccagacactgaaggaccacaggccccggatggtgtgggacagccaggcctcagagcacttcttcgagtacaagaagagccgcagtgggaggcacgtcgtcttctacccaaccctgaa

SEQ ID NO: 4002 - DNA, 976 bp, Homo sapiens
  source 1..976: mol_type = unassigned DNA; mol_type = unassigned DNA
tgcagccctctggaccccgaggttggaccctactgtgacacacctaccatgcggacactcttcaacctcctctggcttgccctggcctgcagccctgttcacactaccctgtcaaagtcagatgccaaaaaagccgcctcaaagacgctgctggagaagagtcagttttcagataagccggtgcaagaccggggtttggtggtgacggacctcaaagctgagagtgtggttcttgagcatcgcagctactgctcggcaaaggcccgggacagacactttgctggggatgtactgggctatgtcactccatggaacagccatggctacgatgtcaccaaggtctttgggagcaagttcacacagatctcacccgtctggctgcagctgaagagacgtggccgtgagatgtttgaggtcacgggcctccacgacgtggaccaagggtggatgcgagctgtcaggaagcatgccaagggcctgcacatagtgcctcggctcctgtttgaggactggacttacgatgatttccggaacgtcttagacagtgaggatgagatagaggagctgagcaagaccgtggtccaggtggcaaagaaccagcatttcgatggcttcgtggtggaggtctggaaccagctgctaagccagaagcgcgtgggcctcatccacatgctcacccacttggccgaggctctgcaccaggcccggctgctggccctcctggtcatcccgcctgccatcacccccgggcctggccctaatgcacccctgtcctgggttcgagcctgcgtccaggtcctggacccgaagtccaagtggcgaagcaaaatcctcctggggctcaacttctatggtatggactacgcgacctccaaggatgcccgtgagcctgttgtcggggccagacactgaaggaccacaggccccggatggtgtgggacagccaggcctcagagcacttcttcgagtacaagaa

SEQ ID NO: 4003 - DNA, 321 bp, Homo sapiens
  source 1..321: mol_type = unassigned DNA; mol_type = unassigned DNA
ctgggttcgagcctgcgtccaggtcctggacccgaagtccaagtggcgaagcaaaatcctcctggggctcaacttctatggtatggactacgcgacctccaaggatgcccgtgagcctgttgtcggggccaggaagctgtgcaccaccaggctgtgtcttctgtctgctgcctccaggacacggaatcgttttctaatggtggctcagggcggctcacagcataccatgactgctctacctttggagccaggacagccctagcagccggtgggtcaagtccaaggggtgctgcatgtggtgactcacgcctgtaatcatta

SEQ ID NO: 4004 - DNA, 878 bp, Homo sapiens
  source 1..878: mol_type = unassigned DNA; mol_type = unassigned DNA
ccatggctacgatgtcaccaaggtctttgggagcaagttcacacagatctcacccgtctggctgcagctgaagagacgtggccgtgagatgtttgaggtcacgggcctccacgacgtggaccaagggtggatgcgagctgtcaggaagcatgccaagggcctgcacatagtgcctcggctcctgtttgaggactggacttacgatgatttccggaacgtcttagacagtgaggatgagatagaggagctgagcaagaccgtggtccaggtggcaaagaaccagcatttcgatggcttcgtggtggaggtctggaaccagctgctaagccagaagcgcgtgggcctcatccacatgctcacccacttggccgaggctctgcaccaggcccggctgctggccctcctggtcatcccgcctgccatcacccccgggaccgaccagctgggcatgttcacgcacaaggagtttgagcagctggcccccgtgctggatggtttcagcctcatgacctacgactactctacagcgcatcagcctggccctaatgcacccctgtcctgggttcgagcctgcgtccaggtcctggacccgaagtccaagtggcgaagcaaaatcctcctggggctcaacttctatggtatggactacgcgacctccaaggatgcccgtgagcctgttgtcggggccagtgttcatggagcctcttgagtctgcattcgtactcttagcaaacttggaaaatttgaggccaaattcttcaaatattttttctgtttcttctcttctgtcttctcgtttggagaccacaaacactagatccattgaatttgtcccacagctcacgaatacaccttttaccttttggaattcttttttt

SEQ ID NO: 4005 - DNA, 408 bp, Homo sapiens
  source 1..408: mol_type = unassigned DNA; mol_type = unassigned DNA
gttcacgcacaaggagtttgagcagctggcccccgtgctggatggtttcagcctcatgacctacgactactctacagcgcatcagcctggccctaatgcacccctgtcctgggttcgagcctgcgtccaggtcctggacccgaagtccaagtggcgaagcaaaatcctcctggggctcaacttctatggtatggactacgcgacctccaaggatgcccgtgagcctgttgtcggggccaggtgagccaagggctctccctgccgtgctgaaggtgtcactgggcgcgggtgggtgtgggtgtaaggagacagagtgatggggagggtctcggtcccctggggcttctgccccacagagtcagagataggggctgggccaggagccggtcctgcttggtgcccacccca

SEQ ID NO: 4006 - DNA, 834 bp, Homo sapiens
  source 1..834: mol_type = unassigned DNA; mol_type = unassigned DNA
cctccctgacccagatttccacccagaagacagagaaggagccagtggtcatggaatgggctggggtcaaagactgggtgcctgggagctgaggcagccaccgtttcagcctggccagccctctggaccccgaggttggaccctactgtgacacacctaccatgcggacactcttcaacctcctctggcttgccctggcctgcagccctgttcacactaccctgtcaaagtcagatgccaaaaaagccgcctcaaagacgctgctggagaagagtcagttttcagataagccggtgcaagaccggggtttggtggtgacggacctcaaagctgagagtgtggttcttgagcatcgcagctactgctcggcaaaggcccgggacagacactttgctggggatgtactgggctatgtcactccatggaacagccatggctacgatgtcaccaaggtctttgggagcaagttcacacagatctcacccgtctggctgcagctgaagagacgtggccgtgagatgtttgaggcccggctgctggccctcctggtcatcccgcctgccatcacccccgggaccgaccagctgggcatgttcacgcacaaggagtttgagcagctggcccccgtgctggatggtttcagcctcatgacctacgactactctacagcgcatcagcctggccctaatgcacccctgtcctgggttcgagcctgcgtccaggtcctggacccgaagtccaagtggcgaagcaaaatcctcctggggctcaacttctatggtatggactacgcgacctccaaggatgcccgtgagcctgttgtcggggccaggt

SEQ ID NO: 4007 - DNA, 1019 bp, Homo sapiens
  source 1..1019: mol_type = unassigned DNA; mol_type = unassigned DNA
tccttcctccctgacccagatttccacccagaagacagagaaggagccagtggtcatggaatgggctggggtcaaagactgggtgcctgggagctgaggcagccaccgtttcagcctggccagccctctggaccccgaggttggaccctactgtgacacacctaccatgcggacactcttcaacctcctctggcttgccctggcctgcagccctgttcacactaccctgtcaaagtcagatgccaaaaaagccgcctcaaagacgctgctggagaagagtcagttttcagataagccggtgcaagaccggggtttggtggtgacggacctcaaagctgagagtgtggttcttgagcatcgcagctactgctcggcaaaggcccgggacagacactttgctggggatgtactgggctatgtcactccatggaacagccatggctacgatgtcaccaaggtctttgggagcaagttcacacagatctcacccgtctggctgcagctgaagagacgtggccgtgagatgtttgaggtcacgggcctccacgacgtggaccaaggttctcatccttcctgcttgactgtgcttgccccacaggctgaaaagagtggtggatgcgagctgtcaggaagcatgccaagggcctgcacatagtgcctcggctcctgtttgaggactggacttacgatgatttccggaacgtcttagacagtgaggatgagatagaggagctgagcaagaccgtggtccaggtggcaaagaaccagcatttcgatggcttcgtggtggaggtctggaaccagctgctaagccagaagcgcgtgggcctcatccacatgctcacccacttggccgaggctctgcaccaggcccggctgctggccctcctggtcatcccgcctgccatcacccccgggaccgaccagctgggcatgttcacgcacaaggagtttgagcagctggcccccgtgctggatggtttcagcctcatgacctacgactactctacagcgcatca

SEQ ID NO: 4008 - DNA, 991 bp, Homo sapiens
  source 1..991: mol_type = unassigned DNA; mol_type = unassigned DNA
gcctccctgacatgcaggtgagccccgcggcggccggcccctgctcctcctccttgcacggcctcagtttccctcccgcaaagtgggcgcgccgggcagcgaggctcggccccgggaggacgggcgtggggtcgcgggcgacgccgggcggatttccacccagaagacagagaaggagccagtggtcatggaatgggctggggtcaaagactgggtgcctgggagctgaggcagccaccgtttcagcctggccagccctctggaccccgaggttggaccctactgtgacacacctaccatgcggacactcttcaacctcctctggcttgccctggcctgcagccctgttcacactaccctgtcaaagtcagatgccaaaaaagccgcctcaaagacgctgctggagaaggctggagcgcaatggcgcgatcttggctcaccgcaacctctgccacccaggttcaagcgattctcctgcttcagcctcccgagtagctgggactacagagtcagttttcagataagccggtgcaagaccggggtttggtggtgacggacctcaaagctgagagtgtggttcttgagcatcgcagctactgctcggcaaaggcccgggacagacactttgctggggatgtactgggctatgtcactccatggaacagccatggctacgatgtcaccaaggtctttgggagcaagttcacacagatctcacccgtctggctgcagctgaagagacgtggccgtgagatgtttgaggtcacgggcctccacgacgtggaccaagggtggatgcgagctgtcaggaagcatgccaagggcctgcacatagtgcctcggctcctgtttgaggactggacttacgatgatttccggaacgtcttagacagtgaggatgagatagaggagctgagcaagaccgtggtccaggtggcaaagaaccagcatttcgatggcttcgtggtggaggtctggaaccagctgctaa

SEQ ID NO: 4009 - DNA, 752 bp, Homo sapiens
  source 1..752: mol_type = unassigned DNA; mol_type = unassigned DNA
ctggtgtgtgtccctctcttcctgggcttccggcctctgaactagaatgtttcaaggcctaggagtgacaggacgtggtcagcaatagtggcccaggtcctgcccttgggtgacccaggccaaggtctcctagttagaacaggacagagtcacgaggctgccactgttgggaagggccctgcctgtgctgactctgcaaatgaggagtcgcccagagccgccgcgaccccacccaggagcactggccagcctggggaagacacaaacccagccccaaaggccccacagccaccaggcacctccaacaaccaggtccctctggaccccgaggttggaccctactgtgacacacctaccatgcggacactcttcaacctcctctggcttgccctggcctgcagccctgttcacactaccctgtcaaagtcagatgccaaaaaagccgcctcaaagacgctgctggagaagagtcagttttcagataagccggtgcaagaccggggtttggtggtgacggacctcaaagctgagagtgtggttcttgagcatcgcagctactgctcggcaaaggcccgggacagacactttgctggggatgtactgggctatgtcactccatggaacagccatggctacgatgtcaccaaggtctttgggagcaagttcacacagatctcacccgtctggctgcagctgaagagacgtggccgtgagatgtttgaggtcacgggcctccacgacgtggaccaagg

SEQ ID NO: 4010 - DNA, 578 bp, Homo sapiens
  source 1..578: mol_type = unassigned DNA; mol_type = unassigned DNA
gcactggccagcctggggaagacacaaacccagccccaaaggccccacagccaccaggcacctccaacaaccagatttccacccagaagacagagaaggagccagtggtcatggaatgggctggggtcaaagactgggtgcctgggagctgaggcagccaccgtttcagcctggccagccctctggaccccgaggttggaccctactgtgacacacctaccatgcggacactcttcaacctcctctggcttgccctggcctgcagccctgttcacactaccctgtcaaagtcagatgccaaaaaagccgcctcaaagacgctgctggagaagagtcagttttcagataagccggtgcaagaccggggtttggtggtgacggacctcaaagctgagagtgtggttcttgagcatcgcagctactgctcggcaaaggcccgggacagacactttgctggggatgtactgggctatgtcactccatggaacagccatggctacgatgtcaccaaggtctttgggagcaagttcacacagatctcacccgtctggctgcagctgaagagacgtggccgtgag

SEQ ID NO: 4011 - DNA, 571 bp, Homo sapiens
  source 1..571: mol_type = unassigned DNA; mol_type = unassigned DNA
gttttccggccgtgcgtttgtggccgtccggcctccctgacatgcaggtgagccccgcggcggccggcccctgctcctcctccttgcacggcctcagtttccctcccgcaaagtgggcgcgccgggcagcgaggctcggccccgggaggacgggcgtggggtcgcgggcgacgccgggcggccctctggaccccgaggttggaccctactgtgacacacctaccatgcggacactcttcaacctcctctggcttgccctggcctgcagccctgttcacactaccctgtcaaagtcagatgccaaaaaagccgcctcaaagacgctgctggagaagagtcagttttcagataagccggtgcaagaccggggtttggtggtgacggacctcaaagctgagagtgtggttcttgagcatcgcagctactgctcggcaaaggcccgggacagacactttgctggggatgtactgggctatgtcactccatggaacagccatggctacgatgtcaccaaggtctttgggagcaagttcacacagatctcacccgtctggctgcagctgaagagacg

SEQ ID NO: 4012 - DNA, 523 bp, Homo sapiens
  source 1..523: mol_type = unassigned DNA; mol_type = unassigned DNA
ccggccgtgcgtttgtggccgtccggcctccctgacatgcagatttccacccagaagacagagaaggagccagtggtcatggaatgggctggggtcaaagactgggtgcctgggagctgaggcagccaccgtttcagcctggccagcctctcggaactgccgtggctgttcaagcactcactgcctttgcctgtggctccatgtactgggtgctgctgtgcttgccctccctctggaccccgaggttggaccctactgtgacacacctaccatgcggacactcttcaacctcctctggcttgccctggcctgcagccctgttcacactaccctgtcaaagtcagatgccaaaaaagccgcctcaaagacgctgctggagaagagtcagttttcagataagccggtgcaagaccggggtttggtggtgacggacctcaaagctgagagtgtggttcttgagcatcgcagctactgctcggcaaaggcccgggacagacactttgctggggatgtactgggctat

SEQ ID NO: 4013 - DNA, 438 bp, Homo sapiens
  source 1..438: mol_type = unassigned DNA; mol_type = unassigned DNA
agacacaaacccagccccaaaggccccacagccaccaggcacctccaacaaccaggtgtgagtaatttttttttttttttgagacagggtcctatctgtcgcccaggctggagtgcagcagtgcaatcacagctcactgcagccttgatgtcctgggctcaagtgatcagcctcccgaagtgctgggattacggcgtgagccaccactcccagccttcgagtgcttttgaggatgtctgtgagaggcatcctcaggctggggacccaggaatatcccagccctctggaccccgaggttggaccctactgtgacacacctaccatgcggacactcttcaacctcctctggcttgccctggcctgcagccctgttcacactaccctgtcaaagtcagatgccaaaaaagccgcctcaaagacgctgctggagaaggtaag

SEQ ID NO: 4014 - DNA, 594 bp, Homo sapiens
  source 1..594: mol_type = unassigned DNA; mol_type = unassigned DNA
acagccaccaggcacctccaacaaccaggtgtgagtaatttttttttttttttgagacagggtcctatctgtcgcccaggctggagtgcagcagtgcaatcacagctcactgcagccttgatgtcctgggctcaagtgatcagcctcccgaagtgctgggattacggcgtgagccaccactcccagccttcgagtgcttttgaggatgtctgtgagaggcatcctcaggctggggacccaggaatatcccaggtaaggcatggggtctcctaaagcagggatccagtcagcagcagaaacactcatctctgcaggcctcctcaccccaccggcctgcccctgccctactctgtcccccccatgcccacggcagacaggcagtgggcaagcaggagggcctcagggcaggtcagacctgggcctacagggcagagcctggacctccgccagggcactccacacccaccccggccctctggaccccgaggttggaccctactgtgacacacctaccatgcggacactcttcaacctcctctggcttgccctggcctgcagccctgttcacactaccctgtcaaagtcagatgccaa

SEQ ID NO: 4015 - DNA, 3255 bp, Homo sapiens
  source 1..3255: mol_type = unassigned DNA; mol_type = unassigned DNA
atgcggacactcttcaacctcctctggcttgccctggcctgcagccctgttcacactaccctgtcaaagtcagatgccaaaaaagccgcctcaaagacgctgctggagaaggtgaagttttgctcttgttgcccaggctggagcgcaatggcgcgatcttggctcaccgcaacctctgccacccagagtcagttttcagataagccggtgcaagaccggggtttggtggtgacggacctcaaagctgagagtgtggttcttgagcatcgcagctactgctcggcaaaggcccgggacagacactttgctggggatgtactgggctatgtcactccatggaacagccatggctacgatgtcaccaaggtctttgggagcaagttcacacagatctcacccgtctggctgcagctgaagagacgtggccgtgagatgtttgaggtcacgggcctccacgacgtggaccaagggtggatgcgagctgtcaggaagcatgccaagggcctgcacatagtgcctcggctcctgtttgaggactggacttacgatgatttccggaacgtcttagacagtgaggatgagatagaggagctgagcaagaccgtggtccaggtggcaaagaaccagcatttcgatggcttcgtggtggaggtctggaaccagctgctaagccagaagcgcgtgggcctcatccacatgctcacccacttggccgaggctctgcaccaggcccggctgctggccctcctggtcatcccgcctgccatcacccccgggaccgaccagctgggcatgttcacgcacaaggagtttgagcagctggcccccgtgctggatggtttcagcctcatgacctacgactactctacagcgcatcagcctggccctaatgcacccctgtcctgggttcgagcctgcgtccaggtcctggacccgaagtccaagtggcgaagcaaaatcctcctggggctcaacttctatggtatggactacgcgacctccaaggatgcccgtgagcctgttgtcggggccaggtacatccagacactgaaggaccacaggccccggatggtgtgggacagccaggcctcagagcacttcttcgagtacaagaagagccgcagtgggaggcacgtcgtcttctacccaaccctgaagtccctgcaggtgcggctggagctggcccgggagctgggcgttggggtctctatctgggagctgggccagggcctggactacttctacgacctgctctaggtgggcattgcggcctccgcggtggacgtgttcttttctaagccatggagtgagtgagcaggtgtgaaatacaggcctccactccgtttgctgtgacgggtctgctgcagtcctcagtcgggggtcctgggcaccatgtgactccccatcctcccatgaggggtccctgccctggatgagtcctagctgggggacaccctgagagctcgagcccctcccacccgggcatccgctggctgcctcctgtcagctgggcaggcggggcccacagtacctgccccaccaggacagcctggctcaggcctttctgggctgcttctcacatcctgggctggatgtgggtttggaagctctggaaccatcccggactcgcccactcctggattcgagggccctcgcagggacagctctgcccagcatcaccccagggcctggcagtgatagagctgagagctccacccccacatacctgccacccacctggccagccacagcacgtgtgtcacctgcagagagccacccagacgtccccaccgagtccagcacggcaagggtgcaggggctgccctagaaatgggctcagaggagcctggcccaccctcttgaaactggtcctggaccttggctcagctctgccgcctcaggtagcacgacccccaggccagcctggacacatcagggagcatggtgaggggcaacggcaggacccgtgggccatatcgggacaggcatttccagcgaggggtggggcagaggacatgtggctggcaggctacacccaccctgccatgcagcggtgtccaggctctggggaggccctggggaatttggaggcatcatgagccaaggcctggtggccctcgttcccctgcccctcgtcaccatcctgtccttggctggccgtgaggactcccctcctcaccactgggtcccacagggctgaggtgggcagtagagggcataggtgggtacatgtcccgggcaaggtctctcggggggacagaagtgagtccagggagtgggtgggcctgggcgtccctcactcagaatgccgtggggtgaggacggtgaggacagggtgggcactgggttctggtttagagtcagtaatgttagggcgcagtgggcagggggtcaggacatctccagccggtggtgaggaagcatggtggggtctcctccacaggacgggagctggggagggggtcctgggtcggacccaaggcacccacacttgagaaagcctccgcctggacgtcagggaggcctgcgagctgccacagtgcaggtgcagccgttcccaccgccctgctgctgcttgacacgggcataggagatacaagtggtgtgtgcggcggttcatgcctgtaatcccagtactttggaaagccgtggcgggaggaacgctgggcaacatggtgaaaccccgtctctaccccctaaaaatagaaaaattagcaagacatggtggcatgtgcctgtactcctggctactcaggaggctgagatgggaggatcgcttgatgaggttgaggctgcagtgagctgtgaccgactgcactccaaaaaccttgtctaaaaaaacacaagctgccactggctttggggcactgaccttgtctccccagaggtgctgacgctaacattcaagttgttctcgggggtcctgtggcttctgttggagtgagggtgggggacacgcaggtctgggagggtggtgtgggcctggagctaggcattgccagatcagcattgggtggaggcaggggtggggatgccacacaggatgggatgtctagagcgggctgtgtctcccggggggatgggcagagggtggggcaggaattagctggaaatgagattgtggggtgcagtttggggatcagatgccccaacctgaactgaccgtcatccctgtggccagggtccccacacaaccctcacccctggctgtgagaatcctgaggcaccttgatgcattttttttcatgccctgtg

SEQ ID NO: 4016 - DNA, 3537 bp, Homo sapiens
  source 1..3537: mol_type = unassigned DNA; mol_type = unassigned DNA
ctggtgtgtgtccctctcttcctgggcttccggcctctgaactagaatgtttcaaggcctaggagtgacaggacgtggtcagcaatagtggcccaggtcctgcccttgggtgacccaggccaaggtctcctagttagaacaggacagagtcacgaggctgccactgttgggaagggccctgcctgtgctgactctgcaaatgaggagtcgcccagagccgccgcgaccccacccaggagcactggccagcctggggaagacacaaacccagccccaaaggccccacagccaccaggcacctccaacaaccaggtccctctggaccccgaggttggaccctactgtgacacacctaccatgcggacactcttcaacctcctctggcttgccctggcctgcagccctgttcacactaccctgtcaaagtcagatgccaaaaaagccgcctcaaagacgctgctggagaagagtcagttttcagataagccggtgcaagaccggggtttggtggtgacggacctcaaagctgagagtgtggttcttgagcatcgcagctactgctcggcaaaggcccgggacagacactttgctggggatgtactgggctatgtcactccatggaacagccatggctacgatgtcaccaaggtctttgggagcaagttcacacagatctcacccgtctggctgcagctgaagagacgtggccgtgagatgtttgaggtcacgggcctccacgacgtggaccaagggtggatgcgagctgtcaggaagcatgccaagggcctgcacatagtgcctcggctcctgtttgaggactggacttacgatgatttccggaacgtcttagacagtgaggatgagatagaggagctgagcaagaccgtggtccaggtggcaaagaaccagcatttcgatggcttcgtggtggaggtctggaaccagctgctaagccagaagcgcgtgggcctcatccacatgctcacccacttggccgaggctctgcaccaggcccggctgctggccctcctggtcatcccgcctgccatcacccccgggaccgaccagctgggcatgttcacgcacaaggagtttgagcagctggcccccgtgctggatggtttcagcctcatgacctacgactactctacagcgcatcagcctggccctaatgcacccctgtcctgggttcgagcctgcgtccaggtcctggacccgaagtccaagtggcgaagcaaaatcctcctggggctcaacttctatggtatggactacgcgacctccaaggatgcccgtgagcctgttgtcggggccaggtacatccagacactgaaggaccacaggccccggatggtgtgggacagccaggcctcagagcacttcttcgagtacaagaagagccgcagtgggaggcacgtcgtcttctacccaaccctgaagtccctgcaggtgcggctggagctggcccgggagctgggcgttggggtctctatctgggagctgggccagggcctggactacttctacgacctgctctaggtgggcattgcggcctccgcggtggacgtgttcttttctaagccatggagtgagtgagcaggtgtgaaatacaggcctccactccgtttgctgtgacgggtctgctgcagtcctcagtcgggggtcctgggcaccatgtgactccccatcctcccatgaggggtccctgccctggatgagtcctagctgggggacaccctgagagctcgagcccctcccacccgggcatccgctggctgcctcctgtcagctgggcaggcggggcccacagtacctgccccaccaggacagcctggctcaggcctttctgggctgcttctcacatcctgggctggatgtgggtttggaagctctggaaccatcccggactcgcccactcctggattcgagggccctcgcagggacagctctgcccagcatcaccccagggcctggcagtgatagagctgagagctccacccccacatacctgccacccacctggccagccacagcacgtgtgtcacctgcagagagccacccagacgtccccaccgagtccagcacggcaagggtgcaggggctgccctagaaatgggctcagaggagcctggcccaccctcttgaaactggtcctggaccttggctcagctctgccgcctcaggtagcacgacccccaggccagcctggacacatcagggagcatggtgaggggcaacggcaggacccgtgggccatatcgggacaggcatttccagcgaggggtggggcagaggacatgtggctggcaggctacacccaccctgccatgcagcggtgtccaggctctggggaggccctggggaatttggaggcatcatgagccaaggcctggtggccctcgttcccctgcccctcgtcaccatcctgtccttggctggccgtgaggactcccctcctcaccactgggtcccacagggctgaggtgggcagtagagggcataggtgggtacatgtcccgggcaaggtctctcggggggacagaagtgagtccagggagtgggtgggcctgggcgtccctcactcagaatgccgtggggtgaggacggtgaggacagggtgggcactgggttctggtttagagtcagtaatgttagggcgcagtgggcagggggtcaggacatctccagccggtggtgaggaagcatggtggggtctcctccacaggacgggagctggggagggggtcctgggtcggacccaaggcacccacacttgagaaagcctccgcctggacgtcagggaggcctgcgagctgccacagtgcaggtgcagccgttcccaccgccctgctgctgcttgacacgggcataggagatacaagtggtgtgtgcggcggttcatgcctgtaatcccagtactttggaaagccgtggcgggaggaacgctgggcaacatggtgaaaccccgtctctaccccctaaaaatagaaaaattagcaagacatggtggcatgtgcctgtactcctggctactcaggaggctgagatgggaggatcgcttgatgaggttgaggctgcagtgagctgtgaccgactgcactccaaaaaccttgtctaaaaaaacacaagctgccactggctttggggcactgaccttgtctccccagaggtgctgacgctaacattcaagttgttctcgggggtcctgtggcttctgttggagtgagggtgggggacacgcaggtctgggagggtggtgtgggcctggagctaggcattgccagatcagcattgggtggaggcaggggtggggatgccacacaggatgggatgtctagagcgggctgtgtctcccggggggatgggcagagggtggggcaggaattagctggaaatgagattgtggggtgcagtttggggatcagatgccccaacctgaactgaccgtcatccctgtggccagggtccccacacaaccctcacccctggctgtgagaatcctgaggcaccttgatgcattttttttcatgccctgtg

SEQ ID NO: 4017 - DNA, 8023 bp, Homo sapiens
  source 1..8023: mol_type = unassigned DNA; mol_type = unassigned DNA
agggatcctacctcttttgaccggagatgttgaaaagcacgaccaaagtttttggcttggtctcttgctttccacaacgagataaagtctgaagcctgtaactctccctgtcccgcgggagcgtgcaaagggagggaagataagcggcgtgggtgaggggtggcggcgcagaacccaggaagggagcagaggcgagagccagcctccggcaggagggcgtagaccccggtgccagccagaacggctccagccttcccgcggccagagagccagcggcgggaggggacgggcgggacctccgcggacagccccgggtgcggaccagcgggcagcggccggcgagaccctccctggatccgcccagagcttaccggaccctgcgcgcccccgtcccggctcccggccggctcgggggagaaggcgcccgaggggaggcgccggacagatcgcgtttcggaggcggcgcaggtgctgtaaactgcaaaccataatcctgtcttaatactgcaaacaaatcatagtggaactaaggggaacttaatttactgtttccaggttaactaaggtctcagctgtaaaccaaaagtgagaggagacattaagattttcattcttaccgggttgtcttcttcctgaagagcaatggagccgcttttacttggaagaggactaatcgtatatctaatgttcctcctgttaaaattctcaaaagcaattgaaataccatcttcagttcaacaggttccaacaatcataaaacagtcaaaagtccaagttgcctttcccttcgatgagtattttcaaattgaatgtgaagctaaaggaaatccagaaccaacattttcgtggactaaggatggcaaccctttttatttcactgaccatcggataattccatcgaacaattcaggaacattcaggatcccaaacgaggggcacatatctcactttcaagggaaataccgctgctttgcttcaaataaactgggaatcgctatgtcagaagaaatagaatttatagttccaagtgttccaaaattcccaaaagaaaaaattgaccctcttgaagtggaggagggagatccaattgtcctcccatgcaatcctcccaaaggcctcccacctttacacatttattggatgaatattgaattagaacacatcgaacaagatgaaagagtatacatgagccaaaagggagatctatacttcgcaaacgtggaagaaaaggacagtcgcaatgactactgttgctttgctgcatttccaagattaaggactattgtacagaaaatgccaatgaaactaacagttaacagtttaaagcatgctaatgactcaagttcatccacagaaattggttccaaggcaaattccatcaagcaaagaaaacccaaactgctgttgcctcccactgagagtggcagtgagtcttcaattaccatcctcaaaggggaaatcttgctgcttgagtgttttgctgaaggcttgccaactccacaggttgattggaacaaaattggtggtgacttaccaaaggggagagaaacaaaagaaaattatggcaagactttgaagatagagaatgtctcctaccaggacaaaggaaattatcgctgcacagccagcaatttcttgggaacagccactcacgattttcacgttatagtagaagagcctcctcgctggacaaagaagcctcagagtgctgtgtatagcaccggaagcaatggcatcttgttatgtgaggctgaaggagaacctcaacccacaatcaagtggagagtcaatggctccccagttgacaatcatccatttgctggtgatgttgtcttccccagggaaatcagttttaccaaccttcaaccaaatcatactgctgtgtaccagtgtgaagcctcaaatgtccatggaactatccttgccaatgccaatattgatgttgtggatgtccgtccattgatacaaaccaaagatggagaaaattacgctacagtggttgggtacagtgctttcttacattgcgagttctttgcttcacctgaggcagtcgtgtcctggcagaaggtggaagaagtgaaacccctggagggcaggcggtatcatatctatgaaaatggcacattgcagatcaacagaaccaccgaagaagatgctgggtcttactcatgttgggtagaaaatgctataggaaaaactgcagtcacagccaatttggatattagaaatgctacaaaacttagagtttctcctaagaatcctcgtatccccaaattgcatatgcttgaattacattgtgaaagcaaatgtgactcacatttgaaacacagtttgaagttgtcctggagtaaagatggagaagcctttgaaattaatggcacagaagatggcaggataattattgatggagctaatttgaccatatctaatgtaactttagaggaccaaggtatttactgctgttcagctcatactgctctagacagtgctgccgatataactcaagtaactgttcttgatgttccggatccaccagaaaaccttcacttgtctgaaagacagaacaggagtgttcggctgacctgggaagctggagctgaccacaacagcaatattagcgagtatattgttgaatttgaaggaaacaaagaagagcctggaaggtgggaggaactgaccagagtccaaggaaagaaaaccacagttatcttacctttggctccatttgtgagataccagttcagggtcatagccgtgaacgaagtagggagaagtcagcctagccagccgtcagaccatcatgaaacaccaccagcagctccagataggaatccacaaaacataagggttcaagcctctcaacccaaggaaatgattataaagtgggagcctttgaaatccatggagcagaatggaccaggcctagagtacagagtgacctggaagccacagggagccccagtggagtgggaagaagaaacagtcacaaaccacacattgcgggtgatgacgcctgctgtctatgccccttatgatgtcaaggtccaggctatcaatcaactaggatctgggcctgaccctcagtcagtgactctctattctggagaagactatcctgatacagctccagtgatccatggggtggacgttataaacagtacattagttaaagttacctggtcaacagttccaaaggacagagtacatggacgtctgaaaggctatcagataaattggtggaaaacaaaaagtctgttggatggaagaacacatcccaaagaagtgaacattctaagattttcaggacaaagaaactctggaatggttccttccttagatgcctttagtgaatttcatttaacagtcttagcctataactctaaaggagctggtcctgaaagtgagccttatatatttcaaacaccagaaggagtacctgaacagccaacttttctaaaggtcatcaaagttgataaagacactgccactttatcttggggactacctaagaaattaaatggaaacttaactggctatcttttgcaatatcagataataaatgacacctacgagattggagaattaaatgatattaacattacaactccatcaaagcccagctggcacctctcaaacctgaatgcaactaccaagtacaaattctacttgagggcttgcacttcacagggctgtggaaaaccgatcacggaggaaagctccaccttaggagaagggagtaaaggtatcgggaagatatcaggagtaaatcttactcaaaagactcacccaatagaggtatttgagccgggagctgaacatatagttcgcctaatgactaagaattggggcgataatgatagcatttttcaagatgtaattgagacaagagggagagaatatgctggtttatatgatgacatctccactcaaggctggtttattggactgatgtgtgcgattgctcttctcacactactattattaactgtttgctttgtgaagaggaatagaggtggaaagtactcagttaaagaaaaggaagatttgcatccagacccagaaattcagtcagtaaaagatgaaacctttggtgaatacagtgacagtgatgaaaagcctctcaaaggaagccttcggtcccttaatagggatatgcagcctactgaaagtgctgacagcttagtcgaatacggagagggagaccatggtctcttcagtgaagatggatcatttattggtgcctacgctggatctaaggagaagggatctgttgaaagcaatggaagttctacagcaacttttccccttcgggcataaacacaacatatgtaagcaacgctactggttcaccccaaccttccatatttatctgttcaaaggagcaagaactttcatataggaatagaaacatgctggccgaagatttcatccagaagtcaacatcctgcaattatgttgaaaagagtagtactttcttcaaaatataaaatgccaagcacttcaggcctatgttttgcttatattgttttcaggtgctcaaaatgcaaaacacaaaacaaatcctgcatttagatacacctcaactaaatccaaagtccccattcagtatattccatatttgcctgattttactattcggtgtgtttgcatagatgttgctacttggtgggtttttctccgtatgcacattggtatacagtctctgagaactggcttggtgactttgcttcactacaggttaaaagaccataagcaaactggttatttaaaatgtaaaaaggaatatgaaagtcttattaaaacacttcattgaaaatatacagtctaaatttattatttaaattttactagcaaaagtcttaggtgaacaatcaactagtatttgttgagctcctatttgcccagagatggtcatatttaaacagaagtatacgtttttcagtttcaacatgaatttttttatttctgtcagttatgacatccacaagcatcactttttgtgtctgttttttttttttttcttggactaaattcaactgcatggaagcggtggtcagaaggttgttttatacgagaacaggcagaaagtgcccattgttcaggattctaatagctacatctacttaatatcttcatttctaaattgactgcttttacctttttctcatgtttatataatggtatgcttgcatatatttcatgaatacattgtacatattatgttaatatttacacaatttaaaatatagatgtgttttattttgaagtgagaaaatgaacattaacaggcatgtttgtacagctagaatatattagtaagatactgtttttcgtcattccagagctacaactaataacacgaggttccaaagctgaagactttgtataaagtatttgggttttgttcttgtattgctttctttcaacagtttcaaaataaaatatcatataaatattgagggaaatgttttcatatttttcaaaataggtttttattgttgaatgtacatctaccccagcccctcaaaagaaaaactgtttacatagaaattcctacacatacgtttgcgtatatgttattttaaacatctttgtggtgagaattttttccccgatattctccttctgtcaaagtcagaacaaattcagggaatttattttctggcagttgtgctccagtccttttaaaattgtacatgaacatgttttagaaacaatatggaggatgatgcatacatgtcggtcaagttcagcgctcgacattttatggaaagatttttttaaccttaccacgaaatacttaactactgtttaagtgaattgacttatttcactttagtttttgaactgtgattattggtatactgttatatcctcaacttggatttatggtaaccccttatagttcatggagaccaaaatttggggtatttataatagtcagcgcaggaatgcacatggaatatctacttgtccttttgaacctcacgagtcatccagaatgtatagacaggaaaagcatgtcttatttaaaactgtaatttatgggctcaggatctgaccgcagtcccgggagtaagcatttcaaagggggaaggcagtgtggtccctaccctgtgtgaatgtgaggatgtagacatccatcagtgcaactcgagctccatcctcctccgatttctaaggttccagttttctggagggacagtcatcatgttttgatttatctgggagaaaactgtggtgcacagcttgtgaggagggcaaggttgtgacgttcgagcttagttctggtgttattctgtctcctcttctttgtcatcagccaaaacgtggtttttaaagagagtcatgcaggttagaaataatgtcaaaaatatttaggaatttaataacctttaagtcagaaactaaaacaaatactgaaatattagctcttcctacacttcgtgttcccctttagctgcctgaaaatcaagattgctcctgctcagatcttctgagtggctaaaacttatggatatgaaaaatgagattgaatgatgactatgctttgctatcattgttacctttcctcaatactatttggcaactactgggactcttcagcacaaaaggaatagatctatgattgaccctgattttaattgtgaaattatatgattcatatattttatgaatcagaataaccttcaaataaaataaatctaagtcggttaaaatggatttcatgattttccctcagaaaatgagtaacagagtccacggcgtgcaatggtaattataaattggtgatgcttgtttgcaaattgcccactcgtgataagtcaacagccaatatttaaaactttgttcgttactggctttaccctaactttctctagtctactgtcaatatcattttaatgtaattgattgtatatagtctcaagaatggttggtgggcatgagttcctagagaactgtccaagggttgggaaaatccaaattctcttcctggttccagcactgattttgtacataaacattaggcaggttgcttaacctttttatttcaaactctctcaactctaaagtgctaataataatctcagttaccttatctttgtcacagggtgttcttttttatgaagaaaaatttgaaaatgataaaagctaagatgccttctaacttcataagcaaacctttaactaattatgtatctgaaagtcacccccacataccaactcaacttttttcctgtgaacacataaatatatttttatagaaaaacaaatctacataaaataaatctactgtttagtgagcagtatgatttgtacatgccattgaaaattattaatcagaagaaaattaagcagggtctttgctatacaaaagtgttttccactaattttgcatgcgtatttataagaaaaatgtgaatttggtggttttattctatcggtataaaggcattgatattttagatgcacccgtgtttgtaaaaatgtagagcacaatggaattatgctggaagtctcaaataatatttttttcctattttatactcatggaagagataagctaaagaggggacaataatgagaaatgttggtgtgcttttctaagcatttaaaacataattgccaattgaaaccctaaatatgtttacataccattaagatatgattcatgtaacaatgttaaattaattataatgggattgggtttgttatctgtggtagtatatatcctagtgttcctatagtgaaataagtagggttcagccaaagctttctttgttttgtaccttaaattgttcgattacgtcatcaaaagagatgaaaggtatgtagaacaggttcacgtgattacctttttcttttggcttggattaatattcatagtagaactttataaaacgtgtttgtattgtaggtggtgtttgtattatgcttatgactatgtatggtttgaaaatattttcattatacatgaaattcaactttccaaataaaagttctacttcatgtaatccaaaaa

SEQ ID NO: 4018 - DNA, 662 bp, Homo sapiens
  source 1..662: mol_type = unassigned DNA; mol_type = unassigned DNA
caggaagggagcagaggcgagagccagcctccggcaggagggcgtagaccccggtgccagccagaacggctccagccttcccgcggccagagagccagcggcgggaggggacgggcgggacctccgcggacagccccgggtgcggaccagcgggcagcggccggcgagaccctccctggatccgcccagagcttaccggaccctgcgcgcccccgtcccggctcccggccggctcgggggagaaggcgcccgaggggaggcgccggacagatcgcgtttcggaggcggcgcaggtgctgtaaactgcaaaccataatcctgtcttaatactgcaaacaaatcatagtggaactaaggggaacttaatttactgaatctcttgtttggaaatttcctcccagaatacccaacctctcaagaattttaaaacgatggagtaaaataatcttcaagctctgattagattacaacatatgaatgctaattttgtttttacaggtttcaacacccaaatttatctgaacttagggcacaataagcagtttaactgttagaaatcttatgagattgagtttgtgcctatcagatgaatacatatttgtatataacatttcaattattgctacatttatgtataatttatccaaaagcgatgttatcca

SEQ ID NO: 4019 - DNA, 5235 bp, Homo sapiens
  source 1..5235: mol_type = unassigned DNA; mol_type = unassigned DNA
caggaagggagcagaggcgagagccagcctccggcaggagggcgtagaccccggtgccagccagaacggctccagccttcccgcggccagagagccagcggcgggaggggacgggcgggacctccgcggacagccccgggtgcggaccagcgggcagcggccggcgagaccctccctggatccgcccagagcttaccggaccctgcgcgcccccgtcccggctcccggccggctcgggggagaaggcgcccgaggggaggcgccggacagatcgcgtttcggaggcggcgcaggtgctgtaaactgcaaaccataatcctgtcttaatactgcaaacaaatcatagtggaactaaggggaacttaatttactgtttccaggttaactaaggtctcagctgtaaaccaaaagtgagaggagacattaagattttcattcttaccgggttgtcttcttcctgaagagcaatggagccgcttttacttggaagaggactaatcgtatatctaatgttcctcctgttaaaattctcaaaagcaattgaaataccatcttcagttcaacaggttccaacaatcataaaacagtcaaaagtccaagttgcctttcccttcgatgagtattttcaaattgaatgtgaagctaaaggaaatccagaaccaacattttcgtggactaaggatggcaaccctttttatttcactgaccatcggataattccatcgaacaattcaggaacattcaggatcccaaacgaggggcacatatctcactttcaagggaaataccgctgctttgcttcaaataaactgggaatcgctatgtcagaagaaatagaatttatagttccaagtgttccaaaattcccaaaagaaaaaattgaccctcttgaagtggaggagggagatccaattgtcctcccatgcaatcctcccaaaggcctcccacctttacacatttattggatgaatattgaattagaacacatcgaacaagatgaaagagtatacatgagccaaaagggagatctatacttcgcaaacgtggaagaaaaggacagtcgcaatgactactgttgctttgctgcatttccaagattaaggactattgtacagaaaatgccaatgaaactaacagttaacagttcaaattccatcaagcaaagaaaacccaaactgctgttgcctcccactgagagtggcagtgagtcttcaattaccatcctcaaaggggaaatcttgctgcttgagtgttttgctgaaggcttgccaactccacaggttgattggaacaaaattggtggtgacttaccaaaggggagagaaacaaaagaaaattatggcaagactttgaagatagagaatgtctcctaccaggacaaaggaaattatcgctgcacagccagcaatttcttgggaacagccactcacgattttcacgttatagtagaagagcctcctcgctggacaaagaagcctcagagtgctgtgtatagcaccggaagcaatggcatcttgttatgtgaggctgaaggagaacctcaacccacaatcaagtggagagtcaatggctccccagttgacaatcatccatttgctggtgatgttgtcttccccagggaaatcagttttaccaaccttcaaccaaatcatactgctgtgtaccagtgtgaagcctcaaatgtccatggaactatccttgccaatgccaatattgatgttgtggatgtccgtccattgatacaaaccaaagatggagaaaattacgctacagtggttgggtacagtgctttcttacattgcgagttctttgcttcacctgaggcagtcgtgtcctggcagaaggtggaagaagtgaaacccctggagggcaggcggtatcatatctatgaaaatggcacattgcagatcaacagaaccaccgaagaagatgctgggtcttactcatgttgggtagaaaatgctataggaaaaactgcagtcacagccaatttggatattagaaatgctacaaaacttagagtttctcctaagaatcctcgtatccccaaattgcatatgcttgaattacattgtgaaagcaaatgtgactcacatttgaaacacagtttgaagttgtcctggagtaaagatggagaagcctttgaaattaatggcacagaagatggcaggataattattgatggagctaatttgaccatatctaatgtaactttagaggaccaaggtatttactgctgttcagctcatactgctctagacagtgctgccgatataactcaagtaactgttcttgatgttccggatccaccagaaaaccttcacttgtctgaaagacagaacaggagtgttcggctgacctgggaagctggagctgaccacaacagcaatattagcgagtatattgttgaatttgaaggaaacaaagaagagcctggaaggtgggaggaactgaccagagtccaaggaaagaaaaccacagttatcttacctttggctccatttgtgagataccagttcagggtcatagccgtgaacgaagtagggagaagtcagcctagccagccgtcagaccatcatgaaacaccaccagcagctccagataggaatccacaaaacataagggttcaagcctctcaacccaaggaaatgattataaagtgggagcctttgaaatccatggagcagaatggaccaggcctagagtacagagtgacctggaagccacagggagccccagtggagtgggaagaagaaacagtcacaaaccacacattgcgggtgatgacgcctgctgtctatgccccttatgatgtcaaggtccaggctatcaatcaactaggatctgggcctgaccctcagtcagtgactctctattctggagaagactatcctgatacagctccagtgatccatggggtggacgttataaacagtacattagttaaagttacctggtcaacagttccaaaggacagagtacatggacgtctgaaaggctatcagataaattggtggaaaacaaaaagtctgttggatggaagaacacatcccaaagaagtgaacattctaagattttcaggacaaagaaactctggaatggttccttccttagatgcctttagtgaatttcatttaacagtcttagcctataactctaaaggagctggtcctgaaagtgagccttatatatttcaaacaccagaaggagtacctgaacagccaacttttctaaaggtcatcaaagttgataaagacactgccactttatcttggggactacctaagaaattaaatggaaacttaactggctatcttttgcaatatcagataataaatgacacctacgagattggagaattaaatgatattaacattacaactccatcaaagcccagctggcacctctcaaacctgaatgcaactaccaagtacaaattctacttgagggcttgcacttcacagggctgtggaaaaccgatcacggaggaaagctccaccttaggagaagggagtaaaggtatcgggaagatatcaggagtaaatcttactcaaaagactcacccaatagaggtatttgagccgggagctgaacatatagttcgcctaatgactaagaattggggcgataatgatagcatttttcaagatgtaattgagacaagagggagagaatatgctggtttatatgatgacatctccactcaaggctggtttattggactgatgtgtgcgattgctcttctcacactactattattaactgtttgctttgtgaagaggaatagaggtggaaagtactcagttaaagaaaaggaagatttgcatccagacccagaaattcagtcagtaaaagatgaaacctttggtgaatacagtgacagtgatgaaaagcctctcaaaggaagccttcggtcccttaatagggatatgcagcctactgaaagtgctgacagcttagtcgaatacggagagggagaccatggtctcttcagtgaagatggatcatttattggtgcctacgctggatctaaggagaagggatctgttgaaagcaatggaagttctacagcaacttttccccttcgggcataaacacaacatatgtaagcaacgctactggttcaccccaaccttccatatttatctgttcaaaggagcaagaactttcatataggaatagaaacatgctggccgaagatttcatccagaagtcaacatcctgcaattatgttgaaaagagtagtactttcttcaaaatataaaatgccaagcacttcaggcctatgttttgcttatattgttttcaggtgctcaaaatgcaaaacacaaaacaaatcctgcatttagatacacctcaactaaatccaaagtccccattcagtatattccatatttgcctgattttactattcggtgtgtttgcatagatgttgctacttggtgggtttttctccgtatgcacattggtatacagtctctgagaactggcttggtgactttgcttcactacaggttaaaagaccataagcaaactggttatttaaaatgtaaaaaggaatatgaaagtcttattaaaacacttcattgaaaatatacagtctaaatttattatttaaattttactagcaaaagtcttaggtgaacaatcaactagtatttgttgagctcctatttgcccagagatggtcatatttaaacagaagtatacgtttttcagtttcaacatgaatttttttatttctgtcagttatgacatccacaagcatcactttttgtgtctgttttttttttttttcttggactaaattcaactgcatggaagcggtggtcagaaggttgttttatacgagaacaggcagaaagtgcccattgttcaggattctaatagctacatctacttaatatcttcatttctaaattgactgcttttacctttttctcatgtttatataatggtatgcttgcatatatttcatgaatacattgtacatattatgttaatatttacacaatttaaaatatagatgtgttttattttgaagtgagaaaatgaacattaacaggcatgtttgtacagctagaatatattagtaagatactgtttttcgtcattccagagctacaactaataacacgaggttccaaagctgaagactttgtataaagtatttgggttttgttcttgtattgctttctttcaacagtttcaaaataaaatatcatataaatattg

SEQ ID NO: 4020 - DNA, 572 bp, Homo sapiens
  source 1..572: mol_type = unassigned DNA; mol_type = unassigned DNA
agaggcgagagccagcctccggcaggagggcgtagaccccggtgccagccagaacggctccagccttcccgcggccagagagccagcggcgggaggggacgggcgggacctccgcggacagccccgggtgcggaccagcgggcagcggccggcgagaccctccctggatccgcccagagcttaccggaccctgcgcgcccccgtcccggctcccggccggctcgggggagaaggcgcccgaggggaggcgccggacagatcgcgtttcggaggcggcgcagtttccaggttaactaaggtctcagctgtaaaccaaaagtgagaggagacattaagattttcattcttaccgggttgtcttcttcctgaagagcaatggagccgcttttacttggaagaggactaatcgtatatctaatgttcctcctgttaaaattctcaaaagcaattgaaataccatcttcagttcaacaggttccaacaatcataaaacagtcaaaagtccaagttgcctttcccttcgatgagtattttcaaattgaatgtgaagctaaaggaaatccagaaccaac

SEQ ID NO: 4021 - DNA, 543 bp, Homo sapiens
  source 1..543: mol_type = unassigned DNA; mol_type = unassigned DNA
tcggacagctcggggtcagtcgacggagcacaccgggcgcccgaatccgccgggtcccactcacgcccgccggccgccggtgctgtaaactgcaaaccataatcctgtcttaatactgcaaacaaatcatagtggaactaaggggaacttaatttactgtttccaggttaactaaggtctcagctgtaaaccaaaagtgagaggagacattaagattttcattcttaccgggttgtcttcttcctgaagagcaatggagccgcttttacttggaagaggactaatcgtatatctaatgttcctcctgttaaaattctcaaaagcaattgaaataccatcttcagttcaacaggttccaacaatcataaaacagtcaaaagtccaagttgcctttcccttcgatgagtattttcaaattgaatgtgaagctaaaggaaatccagaaccaacattttcgtggactaaggatggcaaccctttttatttcactgaccatcggataattccatcgaacaattcaggaacattcaggatcccaaacga

SEQ ID NO: 4022 - DNA, 2564 bp, Homo sapiens
  source 1..2564: mol_type = unassigned DNA; mol_type = unassigned DNA
gaaaatgccgccagcctggagcggggaatccatggaccgtggggttgtggggttggggagcacgaaaacccagagaggggctagagctccacctccccagaccgccgaggggcgagagggcgcgccgggggccgtggttgccatggctcctggtagcggagcccggggggctggagatgccggtcgcggatggtcccttcttcctctttgtgcctctctctttctctcgctttttttttttttttggagtgtgagtgtgcgtggggaggcagcacggagaaagtgattaatttggggagcagggattggagccgggaggctggggaaagccagcccctccgttcccactctccgggctcgctgcgagccacagtgtctcagccaggggcagggccggggaactcctgcgaaaaaccacgggccggaggagcagcagccgcgcgggcccaggtgctgtaaactgcaaaccataatcctgtcttaatactgcaaacaaatcatagtggaactaaggggaacttaatttactgaatctcttgtttggaaatttcctcccagaatacccaacctctcaagaattttaaaacgatggagtaaaataatcttcaagctctgattagattacaacatatgaatgctaattttgtttttacaggtttcaacacccaaatttatctgaacttagggcacaataagcagtttaactgttagaaatcttatgagattgagtttgtgcctatcagatgaatacatatttgtatataacatttcaattattgctacatttatgtataatttatccaaaagcgatgttatccatgcatcttaacagaaggcttaagtagttgaatgacagggactacatttttgctgcagaagatcatgataaaacatgtgctgtgtggtcaccttgggtaatgtgccgagactgcttgatggtacttatctctacacactgcatctcatactgatttatggatttggatgacttattttatgtcaaagacataaagagagtagagaagagagaatagtattttcatttcagtcttaaaaaagttctatcctatgagatgttaacagctgccttctcttggtggtctgtgaagtttttataaagatattgattattttccaatgacacacaaatctactgctagagaccattcaaatgcttagttacaccagggcttggctcctgtaccctgaggaggacacgattaaccaaatcctcctttttaaatgttctcaggacaatgagctgcacatacggcacaaatgcaatttgcttgaccaatcttgcctctgtctccttctatctccgtttacatgcttcatgctcagttgaaattaattctctacacattggtctcatgaacacatctttgagagcagagttcaagttaaatttttattttcatcattacctctgagaacacaatctggggcatattagacgctttgtaagtgtagaggtggggagaaagaagaagaaagagaggaacagaaggagggaaagattttcctgatagatcactttctggacactttctgtgctgagaagttctgagattgcctctctggatcctgctatcttggcagtcttgctaagagtttccatttacacttaaacatggttactgatgcgtcttaatgttgccttaactatcaggtttctgatagccccacatagccaagtgggaccctggtcaagaagttcacctctgttaaataaatatgcatagattttcaacatctcttcacatgcattcagaggtgatgaaagattccactggatgctagaacattgtgcataaataatcgaagttgtatgctcttcagcaatgatgctaccccatatcctttttttttctttcccatgatatgaggatatgagtgcagcagaactagctccatgcccttgtcccagaattaatcattcctatccatatttgatgtctttaccttttaaatatttatgggctgttatgttcctttcttgttgttcacccactctggggacattcagaagcctcacatttcttccttagccaaacaccccattcccttcatcctctctcagctgttctttggattacctccaaattgcatacataattttggtattgaggtgccaaaaatgcatttgtttcaactggagttttattgaagttgcttttactcaaatcaagtacacaaataaatttgatttccaaggcatgaaaattcagttaggtctccgaagggaagctgaggtatacttatatttcattataatgctacaggtagattttaagtcactaggaaaatgacatctcaaaatcaaaagattatagaatgagcactatatgaagaattacattttaaagcataggtctgtgatcattttgtaggtttttgttgttactgtcagtctattggtttttattaataattttattgaggtataactgatacacaaacgacatatttaatgtgtacaatttgatgagtttggacatatccgaggactcatgagactgtcactgcaatcaaggtaataaatgtatttattacttccaaaa

SEQ ID NO: 4023 - DNA, 3960 bp, Homo sapiens
  source 1..3960: mol_type = unassigned DNA; mol_type = unassigned DNA
aaaatgccgccagcctggagcggggaatccatggaccgtggggttgtggggttggggagcacgaaaacccagagaggggctagagctccacctccccagaccgccgaggggcgagagggcgcgccgggggccgtggttgccatggctcctggtagcggagcccggggggctggagatgccggtcgcggatggtcccttcttcctctttgtgcctctctctttctctcgctttttttttttttttggagtgtgagtgtgcgtggggaggcagcacggagaaagtgattaatttggggagcagggattggagccgggaggctggggaaagccagcccctccgttcccactctccgggctcgctgcgagccacagtgtctcagccaggggcagggccggggaactcctgcgaaaaaccacgggccggaggagcagcagccgcgcgggcccaggtgctgtaaactgcaaaccataatcctgtcttaatactgcaaacaaatcatagtggaactaaggggaacttaatttactgtttccaggttaactaaggtctcagctgtaaaccaaaagtgagaggagacattaagattttcattcttaccgggttgtcttcttcctgaagagcaatggagccgcttttacttggaagaggactaatcgtatatctaatgttcctcctgttaaaattctcaaaagcaattgaaataccatcttcagttcaacaggttccaacaatcataaaacagtcaaaagtccaagttgcctttcccttcgatgagtattttcaaattgaatgtgaagctaaaggaaatccagaaccaacattttcgtggactaaggatggcaaccctttttatttcactgaccatcggataattccatcgaacaattcaggaacattcaggatcccaaacgaggggcacatatctcactttcaagggaaataccgctgctttgcttcaaataaactgggaatcgctatgtcagaagaaatagaatttatagttccaagtgttccaaaattcccaaaagaaaaaattgaccctcttgaagtggaggagggagatccaattgtcctcccatgcaatcctcccaaaggcctcccacctttacacatttattggatgaatattgaattagaacacatcgaacaagatgaaagagtatacatgagccaaaagggagatctatacttcgcaaacgtggaagaaaaggacagtcgcaatgactactgttgctttgctgcatttccaagattaaggactattgtacagaaaatgccaatgaaactaacagttaacagttcaaattccatcaagcaaagaaaacccaaactgctgttgcctcccactgagagtggcagtgagtcttcaattaccatcctcaaaggggaaatcttgctgcttgagtgttttgctgaaggcttgccaactccacaggttgattggaacaaaattggtggtgacttaccaaaggggagagaaacaaaagaaaattatggcaagactttgaagatagagaatgtctcctaccaggacaaaggaaattatcgctgcacagccagcaatttcttgggaacagccactcacgattttcacgttatagtagaagagcctcctcgctggacaaagaagcctcagagtgctgtgtatagcaccggaagcaatggcatcttgttatgtgaggctgaaggagaacctcaacccacaatcaagtggagagtcaatggctccccagttgacaatcatccatttgctggtgatgttgtcttccccagggaaatcagttttaccaaccttcaaccaaatcatactgctgtgtaccagtgtgaagcctcaaatgtccatggaactatccttgccaatgccaatattgatgttgtggatgtccgtccattgatacaaaccaaagatggagaaaattacgctacagtggttgggtacagtgctttcttacattgcgagttctttgcttcacctgaggcagtcgtgtcctggcagaaggtggaagaagtgaaacccctggagggcaggcggtatcatatctatgaaaatggcacattgcagatcaacagaaccaccgaagaagatgctgggtcttactcatgttgggtagaaaatgctataggaaaaactgcagtcacagccaatttggatattagaaatgctacaaaacttagagtttctcctaagaatcctcgtatccccaaattgcatatgcttgaattacattgtgaaagcaaatgtgactcacatttgaaacacagtttgaagttgtcctggagtaaagatggagaagcctttgaaattaatggcacagaagatggcaggataattattgatggagctaatttgaccatatctaatgtaactttagaggaccaaggtatttactgctgttcagctcatactgctctagacagtgctgccgatataactcaagtaactgttcttgatgttccggatccaccagaaaaccttcacttgtctgaaagacagaacaggagtgttcggctgacctgggaagctggagctgaccacaacagcaatattagcgagtatattgttgaatttgaaggaaacaaagaagagcctggaaggtgggaggaactgaccagagtccaaggaaagaaaaccacagttatcttacctttggctccatttgtgagataccagttcagggtcatagccgtgaacgaagtagggagaagtcagcctagccagccgtcagaccatcatgaaacaccaccagcagctccagataggaatccacaaaacataagggttcaagcctctcaacccaaggaaatgattataaagtgggagcctttgaaatccatggagcagaatggaccaggcctagagtacagagtgacctggaagccacagggagccccagtggagtgggaagaagaaacagtcacaaaccacacattgcgggtgatgacgcctgctgtctatgccccttatgatgtcaaggtccaggctatcaatcaactaggatctgggcctgaccctcagtcagtgactctctattctggagaagactatcctgatacagctccagtgatccatggggtggacgttataaacagtacattagttaaagttacctggtcaacagttccaaaggacagagtacatggacgtctgaaaggctatcagataaattggtggaaaacaaaaagtctgttggatggaagaacacatcccaaagaagtgaacattctaagattttcaggacaaagaaactctggaatggttccttccttagatgcctttagtgaatttcatttaacagtcttagcctataactctaaaggagctggtcctgaaagtgagccttatatatttcaaacaccagaaggagtacctgaacagccaacttttctaaaggtcatcaaagttgataaagacactgccactttatcttggggactacctaagaaattaaatggaaacttaactggctatcttttgcaatatcagataataaatgacacctacgagattggagaattaaatgatattaacattacaactccatcaaagcccagctggcacctctcaaacctgaatgcaactaccaagtacaaattctacttgagggcttgcacttcacagggctgtggaaaaccgatcacggaggaaagctccaccttaggagaagggagtaaaggtatcgggaagatatcaggagtaaatcttactcaaaagactcacccaatagaggtatttgagccgggagctgaacatatagttcgcctaatgactaagaattggggcgataatgatagcatttttcaagatgtaattgagacaagagggagagaatatgctggtttatatgatgacatctccactcaaggctggtttattggactgatgtgtgcgattgctcttctcacactactattattaactgtttgctttgtgaagaggaatagaggtggaaagtactcag

SEQ ID NO: 4024 - DNA, 723 bp, Homo sapiens
  source 1..723: mol_type = unassigned DNA; mol_type = unassigned DNA
gagccacagtgtctcagccaggggcagggccggggaactcctgcgaaaaaccacgggccggaggagcagcagccgcgcgggcccagtttccaggttaactaaggtctcagctgtaaaccaaaagtgagaggagacattaagattttcattcttaccgggttgtcttcttcctgaagagcaatggagccgcttttacttggaagaggactaatcgtatatctaatgttcctcctgttaaaattctcaaaagcaattgaaataccatcttcagttcaacaggttccaacaatcataaaacagtcaaaagtccaagttgcctttcccttcgatgagtattttcaaattgaatgtgaagctaaaggaaatccagaaccaacattttcgtggactaaggatggcaaccctttttatttcactgaccatcggataattccatcgaacaattcaggaacattcaggatcccaaacgaggggcacatatctcactttcaagggaaataccgctgctttgcttcaaataaactgggaatcgctatgtcagaagaaatagaatttatagttccaagtgttccaaaattcccaaaagaaaaaattgaccctcttgaagtggaggagggagatccaattgtcctcccatgcaatcctcccaaaggcctcccacctttacacatttattggatgaatattgaattagaacacatcgaacaagatgaaagagtatac

SEQ ID NO: 4025 - DNA, 555 bp, Homo sapiens
  source 1..555: mol_type = unassigned DNA; mol_type = unassigned DNA
agtgtctcagccaggggcagggccggggaactcctgcgaaaaaccacgggccggaggagcagcagccgcgcgggcccagtaagaagaattgaaaaataattcacagagaattgattcccatgatgcgttcacctatgtcctgctcagaacacatctaggatcatttcagcgctgatagactgttcaaggagatgcagcctaactcaagaaaaattcatcatgctcctcctctttccttctccagttttgttcccacatatgaacattaaatgaaaatttatgaagttcctgctgagtgaaaatcactgctggataggtgaattccaagatgaaatagatagactttctggcctgaagttgcttactgttaccactgaatatatgcccataaaatattaaaatagacctaaatgccttttctgaggtctggaactctcaaagtgttgtgagcctccaatctaattaaagaactcactcaagtataatgcaaaatagaggatgaaaaatgccatacgaatgtatagataatgttttatgggagattagaatagagaa

SEQ ID NO: 4026 - DNA, 594 bp, Homo sapiens
  source 1..594: mol_type = unassigned DNA; mol_type = unassigned DNA
agaaagggaagaaggcaaacaggaaaagagccagaagagcagagttcccagcagaggggaagcaagtggagaggcggtgtggaggaatcaatttggccccatctggaatggacagaaggctagaacctgcagtgcagtgagtgtgggagaaaccagctggcacaaggtgctgtaaactgcaaaccataatcctgtcttaatactgcaaacaaatcatagtggaactaaggggaacttaatttactgtttccaggttaactaaggtctcagctgtaaaccaaaagtgagaggagacattaagattttcattcttaccgggttgtcttcttcctgaagagcaatggagccgcttttacttggaagaggactaatcgtatatctaatgttcctcctgttaaaattctcaaaagcaattgaaataccatcttcagttcaacaggttccaacaatcataaaacagtcaaaagtccaagttgcctttcccttcgatgagtattttcaaattgaatgtgaagctaaaggaaatccagaaccaacattttcgtggactaaggatggcaaccctttttatttcactgaccatcggataattcc

SEQ ID NO: 4027 - DNA, 462 bp, Homo sapiens
  source 1..462: mol_type = unassigned DNA; mol_type = unassigned DNA
ctaatcgtatatctaatgttcctcctgttaaaattctcaaaagcaattgaaataccatcttcagttcaacaggttccaacaatcataaaacagtcaaaagtccaagttgcctttcccttcgatgagtattttcaaattgaatgtgaagctaaaggaaatccagaaccaacattttcgtggactaaggatggcaaccctttttatttcactgaccatcggataattccatcgaacaattcaggaacattcaggatcccaaacgaggggcacatatctcactttcaagggaaataccgctgctttgcttcaaataaactgggaatcgctatgtcagaagaaatagaatttatagttccaagtaagtactataacgggaatttcattttacaagtgttttagtgaagtgttaaataggagttagattgggttccaatgaaataaagcagttattaactaaatcaa

SEQ ID NO: 4028 - DNA, 399 bp, Homo sapiens
  source 1..399: mol_type = unassigned DNA; mol_type = unassigned DNA
gatgtccgtccattgatacaaaccaaagatggagaaaattacgctacagtggttgggtacagtgctttcttacattgcgagttctttgcttcacctgaggcagtcgtgtcctggcagaaggtggaagaagtgaaacccctggagggcaggcggtatcatatctatgaaaatggcacattgcagatcaacagaaccaccgaagaagatgctgggtcttactcatgttgggtagaaaatgctataggaaaaactgcagtcacagccaatttggatattagaagtatttttatttcactgttactttgcatgaattgtcacatgggttcagtctgtcttcatttgcccaaatggaataataccatttaagttggagtaccagataaagttctttgaaccgtt

SEQ ID NO: 4029 - DNA, 651 bp, Homo sapiens
  source 1..651: mol_type = unassigned DNA; mol_type = unassigned DNA
gctcaaatggcttaggaagcaggcagctgcagctgtggggctggccgcccctccaccaggagctcggataattattgatggagctaatttgaccatatctaatgtaactttagaggaccaaggtatttactgctgttcagctcatactgctctagacagtgctgccgatataactcaagtaactgttcttgatgttccggatccaccagaaaaccttcacttgtctgaaagacagaacaggagtgttcggctgacctgggaagctggagctgaccacaacagcaatattagcgagtatattgttgaatttgaaggaaacaaagaagagcctggaaggtgggaggaactgaccagagtccaaggaaagaaaaccacagttatcttacctttggctccatttgtgagataccagttcagggtcatagccgtgaacgaagtagggagaagtcagcctagccagccgtcagaccatcatgaaacaccaccagcagctccagataggaatccacaaaacataagggttcaagcctctcaacccaaggaaatgattataaagtgggagcctttgaaatccatggagcagaatggaccaggcctagagtacagagtgacctggaagccacagggagccccagtggagtgggaagaaga

SEQ ID NO: 4030 - DNA, 707 bp, Homo sapiens
  source 1..707: mol_type = unassigned DNA; mol_type = unassigned DNA
ggatccaccagaaaaccttcacttgtctgaaagacagaacaggagtgttcggctgacctgggaagctggagctgaccacaacagcaatattagcgagtatattgttgaatttgaaggaaacaaagaagagcctggaaggtgggaggaactgaccagagtccaaggaaagaaaaccacagttatcttacctttggctccatttgtgagataccagttcagggtcatagccgtgaacgaagtagggagaagtcagcctagccagccgtcagaccatcatgaaacaccaccagcagctccagataggaatccacaaaacataagggttcaagcctctcaacccaaggaaatgattataaagtgggagtaattctgaggatggtcttgtgaagaaagcatcatgaacgccttattctagatctggagatggcatccaggattatgaatgtcttgcccatcaccacacaaccagaaatccgcaaagctaggatttatgtatgaggatctttggactccaaacctcactttttcctcctttacatatctcggttaaatgttattaaatagacttcaccatttgaattttgcataaaaatgcccatctacccagataattttaattattctagggtcatttccaaattttttctgtaacagtggggcattttattttctctctactacttggatgtatttaatgaccagtatat

SEQ ID NO: 4031 - DNA, 1104 bp, Homo sapiens
  source 1..1104: mol_type = unassigned DNA; mol_type = unassigned DNA
agtcagtgactctctattctggagaagactatcctgatacagctccagtgatccatggggtggacgttataaacagtacattagttaaagttacctggtcaacagttccaaaggacagagtacatggacgtctgaaaggctatcagataaattggtggaaaacaaaaagtctgttggatggaagaacacatcccaaagaagtgaacattctaagattttcaggacaaagaaactctggaatggttccttccttagatgcctttagtgaatttcatttaacagtcttagcctataactctaaaggagctggtcctgaaagtgagccttatatatttcaaacaccagaaggagtacctgaacagccaacttttctaaaggtcatcaaagttgataaagacactgccactttatcttggggactacctaagaaattaaatggaaacttaactggctatcttttgcaatatcagataataaatgacacctacgagattggagaattaaatgatattaacattacaactccatcaaagcccagctggcacctctcaaacctgaatgcaactaccaagtacaaattctacttgagggcttgcacttcacagggctgtggaaaaccgatcacggaggaaagctccaccttaggagaagggaaatatgctggtttatatgatgacatctccactcaaggctggtttattggactgatgtgtgcgattgctcttctcacactactattattaactgtttgctttgtgaagaggaatagaggtggaaagtactcagttaaagaaaaggaagatttgcatccagacccagaaattcagtcagtaaaagatgaaacctttggtgaatacagtgacagtgatgaaaagcctctcaaaggaagccttcggtcccttaatagggatatgcagcctactgaaagtgctgacagcttagtcgaatacggagagggagaccatggtctcttcagtgaagatggatcatttattggtgcctacgctggatctaaggagaagggatctgttgaaagcaatggaagttctacagcaacttttccccttcgggcataaacacaacatatgtaagcaacgctactgg

SEQ ID NO: 4032 - DNA, 7311 bp, Homo sapiens
  source 1..7311: mol_type = unassigned DNA; mol_type = unassigned DNA
tttccaggttaactaaggtctcagctgtaaaccaaaagtgagaggagacattaagattttcattcttaccgggttgtcttcttcctgaagagcaatggagccgcttttacttggaagaggactaatcgtatatctaatgttcctcctgttaaaattctcaaaagcaattgaaataccatcttcagttcaacaggttccaacaatcataaaacagtcaaaagtccaagttgcctttcccttcgatgagtattttcaaattgaatgtgaagctaaaggaaatccagaaccaacattttcgtggactaaggatggcaaccctttttatttcactgaccatcggataattccatcgaacaattcaggaacattcaggatcccaaacgaggggcacatatctcactttcaagggaaataccgctgctttgcttcaaataaactgggaatcgctatgtcagaagaaatagaatttatagttccaagtgttccaaaattcccaaaagaaaaaattgaccctcttgaagtggaggagggagatccaattgtcctcccatgcaatcctcccaaaggcctcccacctttacacatttattggatgaatattgaattagaacacatcgaacaagatgaaagagtatacatgagccaaaagggagatctatacttcgcaaacgtggaagaaaaggacagtcgcaatgactactgttgctttgctgcatttccaagattaaggactattgtacagaaaatgccaatgaaactaacagttaacagtttaaagcatgctaatgactcaagttcatccacagaaattggttccaaggcaaattccatcaagcaaagaaaacccaaactgctgttgcctcccactgagagtggcagtgagtcttcaattaccatcctcaaaggggaaatcttgctgcttgagtgttttgctgaaggcttgccaactccacaggttgattggaacaaaattggtggtgacttaccaaaggggagagaaacaaaagaaaattatggcaagactttgaagatagagaatgtctcctaccaggacaaaggaaattatcgctgcacagccagcaatttcttgggaacagccactcacgattttcacgttatagtagaagagcctcctcgctggacaaagaagcctcagagtgctgtgtatagcaccggaagcaatggcatcttgttatgtgaggctgaaggagaacctcaacccacaatcaagtggagagtcaatggctccccagttgacaatcatccatttgctggtgatgttgtcttccccagggaaatcagttttaccaaccttcaaccaaatcatactgctgtgtaccagtgtgaagcctcaaatgtccatggaactatccttgccaatgccaatattgatgttgtggatgtccgtccattgatacaaaccaaagatggagaaaattacgctacagtggttgggtacagtgctttcttacattgcgagttctttgcttcacctgaggcagtcgtgtcctggcagaaggtggaagaagtgaaacccctggagggcaggcggtatcatatctatgaaaatggcacattgcagatcaacagaaccaccgaagaagatgctgggtcttactcatgttgggtagaaaatgctataggaaaaactgcagtcacagccaatttggatattagaaatgctacaaaacttagagtttctcctaagaatcctcgtatccccaaattgcatatgcttgaattacattgtgaaagcaaatgtgactcacatttgaaacacagtttgaagttgtcctggagtaaagatggagaagcctttgaaattaatggcacagaagatggcaggataattattgatggagctaatttgaccatatctaatgtaactttagaggaccaaggtatttactgctgttcagctcatactgctctagacagtgctgccgatataactcaagtaactgttcttgatgttccggatccaccagaaaaccttcacttgtctgaaagacagaacaggagtgttcggctgacctgggaagctggagctgaccacaacagcaatattagcgagtatattgttgaatttgaaggaaacaaagaagagcctggaaggtgggaggaactgaccagagtccaaggaaagaaaaccacagttatcttacctttggctccatttgtgagataccagttcagggtcatagccgtgaacgaagtagggagaagtcagcctagccagccgtcagaccatcatgaaacaccaccagcagctccagataggaatccacaaaacataagggttcaagcctctcaacccaaggaaatgattataaagtgggagcctttgaaatccatggagcagaatggaccaggcctagagtacagagtgacctggaagccacagggagccccagtggagtgggaagaagaaacagtcacaaaccacacattgcgggtgatgacgcctgctgtctatgccccttatgatgtcaaggtccaggctatcaatcaactaggatctgggcctgaccctcagtcagtgactctctattctggagaagactatcctgatacagctccagtgatccatggggtggacgttataaacagtacattagttaaagttacctggtcaacagttccaaaggacagagtacatggacgtctgaaaggctatcagataaattggtggaaaacaaaaagtctgttggatggaagaacacatcccaaagaagtgaacattctaagattttcaggacaaagaaactctggaatggttccttccttagatgcctttagtgaatttcatttaacagtcttagcctataactctaaaggagctggtcctgaaagtgagccttatatatttcaaacaccagaaggagtacctgaacagccaacttttctaaaggtcatcaaagttgataaagacactgccactttatcttggggactacctaagaaattaaatggaaacttaactggctatcttttgcaatatcagataataaatgacacctacgagattggagaattaaatgatattaacattacaactccatcaaagcccagctggcacctctcaaacctgaatgcaactaccaagtacaaattctacttgagggcttgcacttcacagggctgtggaaaaccgatcacggaggaaagctccaccttaggagaagggaaatatgctggtttatatgatgacatctccactcaaggctggtttattggactgatgtgtgcgattgctcttctcacactactattattaactgtttgctttgtgaagaggaatagaggtggaaagtactcagttaaagaaaaggaagatttgcatccagacccagaaattcagtcagtaaaagatgaaacctttggtgaatacagtgacagtgatgaaaagcctctcaaaggaagccttcggtcccttaatagggatatgcagcctactgaaagtgctgacagcttagtcgaatacggagagggagaccatggtctcttcagtgaagatggatcatttattggtgcctacgctggatctaaggagaagggatctgttgaaagcaatggaagttctacagcaacttttccccttcgggcataaacacaacatatgtaagcaacgctactggttcaccccaaccttccatatttatctgttcaaaggagcaagaactttcatataggaatagaaacatgctggccgaagatttcatccagaagtcaacatcctgcaattatgttgaaaagagtagtactttcttcaaaatataaaatgccaagcacttcaggcctatgttttgcttatattgttttcaggtgctcaaaatgcaaaacacaaaacaaatcctgcatttagatacacctcaactaaatccaaagtccccattcagtatattccatatttgcctgattttactattcggtgtgtttgcatagatgttgctacttggtgggtttttctccgtatgcacattggtatacagtctctgagaactggcttggtgactttgcttcactacaggttaaaagaccataagcaaactggttatttaaaatgtaaaaaggaatatgaaagtcttattaaaacacttcattgaaaatatacagtctaaatttattatttaaattttactagcaaaagtcttaggtgaacaatcaactagtatttgttgagctcctatttgcccagagatggtcatatttaaacagaagtatacgtttttcagtttcaacatgaatttttttatttctgtcagttatgacatccacaagcatcactttttgtgtctgttttttttttttttcttggactaaattcaactgcatggaagcggtggtcagaaggttgttttatacgagaacaggcagaaagtgcccattgttcaggattctaatagctacatctacttaatatcttcatttctaaattgactgcttttacctttttctcatgtttatataatggtatgcttgcatatatttcatgaatacattgtacatattatgttaatatttacacaatttaaaatatagatgtgttttattttgaagtgagaaaatgaacattaacaggcatgtttgtacagctagaatatattagtaagatactgtttttcgtcattccagagctacaactaataacacgaggttccaaagctgaagactttgtataaagtatttgggttttgttcttgtattgctttctttcaacagtttcaaaataaaatatcatataaatattgagggaaatgttttcatatttttcaaaataggtttttattgttgaatgtacatctaccccagcccctcaaaagaaaaactgtttacatagaaattcctacacatacgtttgcgtatatgttattttaaacatctttgtggtgagaattttttccccgatattctccttctgtcaaagtcagaacaaattcagggaatttattttctggcagttgtgctccagtccttttaaaattgtacatgaacatgttttagaaacaatatggaggatgatgcatacatgtcggtcaagttcagcgctcgacattttatggaaagatttttttaaccttaccacgaaatacttaactactgtttaagtgaattgacttatttcactttagtttttgaactgtgattattggtatactgttatatcctcaacttggatttatggtaaccccttatagttcatggagaccaaaatttggggtatttataatagtcagcgcaggaatgcacatggaatatctacttgtccttttgaacctcacgagtcatccagaatgtatagacaggaaaagcatgtcttatttaaaactgtaatttatgggctcaggatctgaccgcagtcccgggagtaagcatttcaaagggggaaggcagtgtggtccctaccctgtgtgaatgtgaggatgtagacatccatcagtgcaactcgagctccatcctcctccgatttctaaggttccagttttctggagggacagtcatcatgttttgatttatctgggagaaaactgtggtgcacagcttgtgaggagggcaaggttgtgacgttcgagcttagttctggtgttattctgtctcctcttctttgtcatcagccaaaacgtggtttttaaagagagtcatgcaggttagaaataatgtcaaaaatatttaggaatttaataacctttaagtcagaaactaaaacaaatactgaaatattagctcttcctacacttcgtgttcccctttagctgcctgaaaatcaagattgctcctgctcagatcttctgagtggctaaaacttatggatatgaaaaatgagattgaatgatgactatgctttgctatcattgttacctttcctcaatactatttggcaactactgggactcttcagcacaaaaggaatagatctatgattgaccctgattttaattgtgaaattatatgattcatatattttatgaatcagaataaccttcaaataaaataaatctaagtcggttaaaatggatttcatgattttccctcagaaaatgagtaacagagtccacggcgtgcaatggtaattataaattggtgatgcttgtttgcaaattgcccactcgtgataagtcaacagccaatatttaaaactttgttcgttactggctttaccctaactttctctagtctactgtcaatatcattttaatgtaattgattgtatatagtctcaagaatggttggtgggcatgagttcctagagaactgtccaagggttgggaaaatccaaattctcttcctggttccagcactgattttgtacataaacattaggcaggttgcttaacctttttatttcaaactctctcaactctaaagtgctaataataatctcagttaccttatctttgtcacagggtgttcttttttatgaagaaaaatttgaaaatgataaaagctaagatgccttctaacttcataagcaaacctttaactaattatgtatctgaaagtcacccccacataccaactcaacttttttcctgtgaacacataaatatatttttatagaaaaacaaatctacataaaataaatctactgtttagtgagcagtatgatttgtacatgccattgaaaattattaatcagaagaaaattaagcagggtctttgctatacaaaagtgttttccactaattttgcatgcgtatttataagaaaaatgtgaatttggtggttttattctatcggtataaaggcattgatattttagatgcacccgtgtttgtaaaaatgtagagcacaatggaattatgctggaagtctcaaataatatttttttcctattttatactcatggaagagataagctaaagaggggacaataatgagaaatgttggtgtgcttttctaagcatttaaaacataattgccaattgaaaccctaaatatgtttacataccattaagatatgattcatgtaacaatgttaaattaattataatgggattgggtttgttatctgtggtagtatatatcctagtgttcctatagtgaaataagtagggttcagccaaagctttctttgttttgtaccttaaattgttcgattacgtcatcaaaagagatgaaaggtatgtagaacaggttcacgtgattacctttttcttttggcttggattaatattcatagtagaactttataaaacgtgtttgtattgtaggtggtgtttgtattatgcttatgactatgtatggtttgaaaatattttcattatacatgaaattcaactttccaaataaaagttctacttcatgtaatcc

SEQ ID NO: 4033 - DNA, 620 bp, Homo sapiens
  source 1..620: mol_type = unassigned DNA; mol_type = unassigned DNA
gggccagtgggaatttatagccaaggagcagtgtgggggtcagtggatggaaaattactcaaaggaagcgttggggtaaggtggatctggctaaacctaacaggattctcactgaagacaggccagggtgatcagacatcacctgggggatggtgcaggatgagaaacctggtcagacattgaggcgatcggatgttgatgttgctggttcttggtaaaacgacttagctagtgtcctttgctaaaactggattttacaaggacgtgcacaaacaggcctagcaggagattcagaagcctgactaaaatttggccaaggaaaaaaatccttgtcaccaggaaagtgaggactattgtcaccaaattcagactgccaattgttaaacatttacctgcacatactgggctcatcttcattattggtaaaatgagctagatgctattttccattagctcacactccaattccaatcgacctgaccatcagaagagacaaaaagggaaaatcctggccagttctcccctacctgatcaaccagtagcataatcagatttgcaagacctcaagaaaagaaacctgaaaatgccactggaggtgtgtgttttgccaaagaaaaaag

SEQ ID NO: 4034 - DNA, 560 bp, Homo sapiens
  source 1..560: mol_type = unassigned DNA; mol_type = unassigned DNA
ttgaggcgatcggatgttgatgttgctggttcttggtaaaacgacttagctagtgtcctttgctaaaactggattttacaaggacgtgcacaaacaggcctagcaggagattcagaagcctgactaaaatttggccaaggaaaaaaatccttgtcaccaggaaagtgaggactattgtcaccaaattcagggagctgcttccacctgtctcctgtgcccttggtttctgctaatcctacattccaagaataaaagtcttcctatgcgttcctaggcagaagccaagtttccctgctttgggcacgttcaaaatagaaggtattttccgcttctcttgcttctgagcacccacgaaatcaacacatccccaaaacacgcgttgagggagtaagggaaagtgtcctgcacccgccaccctcccgcgctaagagcggcagaggaccccacagcttcgtacttccccggaggagctcctggagtaggagacggcttctagcctggaagaaccccgggtgcgacagttgtgccaggaaacttcaagagtattccctcggctgggc

SEQ ID NO: 4035 - DNA, 625 bp, Homo sapiens
  source 1..625: mol_type = unassigned DNA; mol_type = unassigned DNA
tttctctaacattctgttaagatatgtcctgatctcctaaagccacagaatcccagagactcaaagtaaattttctcttcggcaaatcagaaggctctgcataaatactgccaattgttaaacatttacctgcacatactgggctcatcttcattattggtaaaatgagctagatgctattttccattagctcacactccaattccaatcgacctgaccatcagaagagacaaaaagggaaaatcctggccagttctcccctacctgatcaaccagtagcataatcagatttgcaagacctcaagaaaagaaacctgaaaatgccactggaggtgtgtgttttgccaaagaaaaaagaatcaaaaacaaaacctgcaggatgaggacaaacaaacaaagagcagggacagagtctcactatgttgacaccctggacaacactcttgaagtactcttttcccagggaggacacagtcatggcatgcaaggggctcagccatgaaccttgtgatggatgaggaaaagatattctttttctccccttacagtttctggcagccaacatggggtggctgtgacaccccactagttccagaacctgcagatgagatcctgggacaaccaa

SEQ ID NO: 4036 - DNA, 512 bp, Homo sapiens
  source 1..512: mol_type = unassigned DNA; mol_type = unassigned DNA
cccagagactcaaagtaaattttctcttcggcaaatcagaaggctctgcataaatactgccaattgttaaacatttacctgcacatactgggctcatcttcattattggtaaaatgagctagatgctattttccattagctcacactccaattccaatcgacctgaccatcagaagagacaaaaagggaaaatcctggccagttctcccctacctgatcaaccagtagcataatcagatttgcaagacctcaagaaaagaaacctgaaaatgccactggaggtgtgtgttttgccaaagaaaaaagaatcaaaaacaaaacctgcaggatgaggacaaacaaacaaagagcaggggctcagccatgaaccttgtgatggatgaggaaaagatattctttttctccccttacagtttctggcagccaacatggggtggctgtgacaccccactagttccagaacctgcagatgagatcctgggacaaccaataaaaaaacaacaaaaagttaa

SEQ ID NO: 4037 - DNA, 695 bp, Homo sapiens
  source 1..695: mol_type = unassigned DNA; mol_type = unassigned DNA
tctcttcggcaaatcagaaggctctgcataaatactgccaattgttaaacatttacctgcacatactgggctcatcttcattattggtaaaatgagctagatgctattttccattagctcacactccaattccaatcgacctgaccatcagaagagacaaaaagggaaaatcctggccagttctcccctacctgatcaaccagtagcataatcagatttgcaagacctcaagaaaagaaacctgaaaatgccactggaggtgtgtgttttgccaaagaaaaaagaatcaaaaacaaaacctgcaggatgaggacaaacaaacaaagagcagggacagagtctcactatgttgacaccctggacaacactcttgaagtactcttttcccagggaggacacagtcatggcatgcaagacgagataccgatcctcagagaatctaagtgatttgctcaggttcacagttagtaagtggtaaagcaaggaactgaggtgtcggggctcacaacatgataacccaaaataatggcaccttggcacagggctcagccatgaaccttgtgatggatgaggaaaagatattctttttctccccttacagtttctggcagccaacatggggtggctgtgacaccccactagttccagaacctgcagatgagatcctgggacaaccaataaaaaaacaacaaaaa

SEQ ID NO: 4038 - DNA, 989 bp, Homo sapiens
  source 1..989: mol_type = unassigned DNA; mol_type = unassigned DNA
gccatgaaccttgtgatggatgaggaaaagatattctttttctccccttacagtttctggcagccaacatggggtggctgtgacaccccactagttccagaacctgcagatgagatcctgggacaaccaataaaaaaacaacaaaaaggagctgcttccacctgtctcctgtgcccttggtttctgctaatcctacattccaagaataaaagtcttcctatgcgttcctaggcagaagccaagtttccctgctttgggcacgttcaaaatagaaggtattttccgcttctcttgcttctgagcacccacgaaatcaacacatccccaaaacacgcgttgagggagtaagggaaagtgtcctgcacccgccaccctcccgcgctaagagcggcagaggaccccacagcttcgtacttccccggaggagctcctggagtaggagacggcttctagcctggaagaaccccgggtgcgacagttgtgccaggaaacttcaagagtattccctcggctgggcgcacgcagtacatccccaatgctccaatttgaactttgactcggccacgaccaccccactccagtctcactctacggtgctttctcccctgttggtgctgagggcttttgagactacctgccccgcgctccctaagtccgagggaccgaggcgaggacctgtcccgctgagctggcacgacccacgcagggcaggcggcacttacgcggcgcagtcggtgctcctccctgagccgcggcgcgcaaggaccccagccggttgtccttgcagcgcttcccaaatcaggcagaagtgaggcagccccacccagtcacgaggaccctgcagaactcgagcctttaagcgctcctctaggctcacatgacccagacccacagggcaaaaagtgcgtcgtcgtgtcccaacctcctggtcccagaaacctggccgcatcaagtcagcgcttcccatgctggaagaagcaagcagcccc

SEQ ID NO: 4039 - DNA, 578 bp, Homo sapiens
  source 1..578: mol_type = unassigned DNA; mol_type = unassigned DNA
ctcctctaggctcacatgacccagacccacagggcaaaaagtgcgtcgtcgtgtcccaacctcctggtcccagaaacctggccgcatcaagtcagcgcttcccatgctggaagaagcaagcagccccagggtggaatcttaaaaattaatgaagagcatcggcggggtgccattcaggacttacttgcaagcccaggatttacatttggaaagcgagtggtgtttgattcccactgtttaaaaaggcaacacacgttcgctgatggtctacattccagctgcactagcaatgctgaagaataccagcctcctatatggaaatcatacttatatcagttacagcaagaggcacctcgtcccaagagaatcatttgtcctcgggaggtggaaaacagaccaaaatattatggaagagagtttcatgggatcatctctcgggagcaggcggatgagcttcttggaggcgtggagggtgcctacatccttagagaaagccagcggcaaccaggatgctacacgctggctctcaggtttggaaaccagaccttaaactacaggctcttccacgacgggaaaca

SEQ ID NO: 4040 - DNA, 425 bp, Homo sapiens
  source 1..425: mol_type = unassigned DNA; mol_type = unassigned DNA
ccagacccacagggcaaaaagtgcgtcgtcgtgtcccaacctcctggtcccagaaacctggccgcatcaagtcagcgcttcccatgctggaagaagcaagcagccccagggtggaatcttaaaaattaatgaagagcatcggcggggtgccattcaggacttacttgcaagcccaggatttacatttggaaagcgagtggtgtttgattcccactgtttaaaaaggcaacacacgttcgctgatggtctacattccagctgcactagcattcccctgagtgaaatatggcatacattaaccagaagagaaaattacatttattaaaataattaaaacagagtcaaaagaagtaaacgttcaaatgagttttgtaagtttgtagcatttcgacttaagaagttattaaagcttaaaactgcactga

SEQ ID NO: 4041 - DNA, 754 bp, Homo sapiens
  source 1..754: mol_type = unassigned DNA; mol_type = unassigned DNA
acagggcaaaaagtgcgtcgtcgtgtcccaacctcctggtcccagaaacctggccgcatcaagtcagcgcttcccatgctggaagaagcaagcagccccagggtggaatcttaaaaattaatgaagagcatcggcggggtgccattcagatgctgaagaataccagcctcctatatggaaatcatacttatatcagttacagcaagaggcacctcgtcccaagagaatcatttgtcctcgggaggtggaaaacagaccaaaatattatggaagagagtttcatgggatcatctctcgggagcaggcggatgagcttcttggaggcgtggagggtgcctacatccttagagaaagccagcggcaaccaggatgctacacgctggctctcaggtttggaaaccagaccttaaactacaggctcttccacgacgggaaacactttgtgggtgagaagaggtttgagtcgattcatgatctggtgacagatggcttgataacactgtacatagaaacaaaagctgccgagtacatttcaaaaatgacaactaaccccatctatgaacacattggatatgccaccctactcagagaaaaagtatccagaaggctgagcaggtctaaaaatgaaccaagaaaaacaaacgtcacacatgaagaacacacagcggtggaaaagatctcctccctggttcgaagggctgccctcacacacaacgacaaccacttcaattatgagaagacacacaactttaag

SEQ ID NO: 4042 - DNA, 570 bp, Homo sapiens
  source 1..570: mol_type = unassigned DNA; mol_type = unassigned DNA
ctggtcccagaaacctggccgcatcaagtcagcgcttcccatgctggaagaagcaagcagccccagggtggaatcttaaaaattaatgaagagcatcggcggggtgccattcaggacttacttgcaagcccaggatttacatttggaaagcgagtggtgtttgattcccactgtttaaaaaggcaacacacgttcgctgatggtctacattccagctgcactagcagtaagctcgcaccaagtgccactgtcctgccaagcactctcctgaatcactgcgctggagtctcagagccacctgatgtgttctgtaccattatacccattttgcaattgggggacacaaactaagtgaggttaagtaacccatccagggtcacattgcttgtaagtgacctgagtgtatattattagccaccaccaggtgctgggcatcgagccagacagtacgggagcaagaactaaaaaaggcaaggaggttgcaatggcaagtagataacacaaaataaaggagggtcatcattatcagcaacagcagcgtcaactgccagacaggtgggagaggccacg

SEQ ID NO: 4043 - DNA, 3530 bp, Homo sapiens
  source 1..3530: mol_type = unassigned DNA; mol_type = unassigned DNA
ttcttcctttgtgtgtgcgcgagcggagttggggcggagggagaagggggaggtcgctctgtctgtccgtctcccgccgcctctgcccggtctactcgaagtgcggcgggagaggcgggagcccaggagagggtgcgggagctggcggggcggctcggagctgccaggacgccctggtcccagccgcgcacaggggagcgtggacggcagaggggctcggcgggagccgagatccgcccgtcccggctgcccctcggcctccctctgctcccacctaccccctgacacccatagaaaagcgtgcaaaggcgcggagcgggacggaaaccacaaataaatagcggcggcggcagcgcgtcatctggtggagcaggaagtgcaggcagagtccggaggctggtgctttctgcgcgtccccaggactttgccatgggctgggggccgcggaggctgcgagcggccgggcgagggcagcggcggcggcgtccgcaccggggctgagcgagcagcgacgcgaggggcgcgcggagatggcagcgtccagcaactccagcctgtccggctcgtcggtgtcctccgatgctgaagaataccagcctcctatatggaaatcatacttatatcagttacagcaagaggcacctcgtcccaagagaatcatttgtcctcgggaggtggaaaacagaccaaaatattatggaagagagtttcatgggatcatctctcgggagcaggcggatgagcttcttggaggcgtggagggtgcctacatccttagagaaagccagcggcaaccaggatgctacacgctggctctcaggtttggaaaccagaccttaaactacaggctcttccacgacgggaaacactttgtgggtgagaagaggtttgagtcgattcatgatctggtgacagatggcttgataacactgtacatagaaacaaaagctgccgagtacatttcaaaaatgacaactaaccccatctatgaacacattggatatgccaccctactcagagaaaaagtatccagaaggctgagcaggtctaaaaatgaaccaagaaaaacaaacgtcacacatgaagaacacacagcggtggaaaagatctcctccctggttcgaagggctgccctcacacacaacgacaaccacttcaattatgagaagacacacaactttaaggtccacacgttccgaggcccacactggtgtgaatattgtgccaatttcatgtgggggctcatcgcccaaggggtccggtgctcagactgtggattgaacgtacacaaacagtgttccaagcacgttcccaatgactgccaacctgatctcaagaggatcaagaaagtgtactgttgtgacctcacaacacttgtgaaggctcacaacactcagagacccatggtggtagacatatgcattcgggaaattgaagcaagaggattaaaatcggaaggcctttacagagtctctgggttcactgaacacattgaagatgtcaaaatggcatttgacagagatggtgaaaaggccgatatatctgccaatgtctatccagacataaacatcatcactggagcccttaaactgtatttcagagacttacccatccctgtcatcacatatgatacctattccaaatttatagatgcagcaaaaatctccaatgcagatgagaggctggaagccgtccatgaagtgctgatgctgctgcctcctgcccactatgaaaccctccggtacctaatgatccacctcaaaaaggttactatgaatgaaaaagacaatttcatgaatgcagaaaatctggggatcgtgtttgggcccactctgatgaggccccctgaggacagcaccctgaccaccctgcatgatatgcggtaccaaaagctgattgtgcagattttaatagaaaacgaagacgttttattctaatccatcagggaaatgagctgaatggccccagcaccatccaagttgacacagctaaaggaataaaaacatttcttaccacttgatttgttttccaagcaagtgctagaatttcctggactgcagaggatcgctgagtggggtactgtgtctcatagacatgcgccacctccacgtgagaacaagggtgaaggtgagggaagcccctcaccttgggtcttttgctgtgcctcctatgtatgtctggtttgctggaagagtgattaatacatctttaatttattaaaaaacaatgtagacctttaaacttcagtcttattggtaataaaagggaacttaattcatacaggtacttgatacagttatacattttccacttacaaaaagaagacaattctgttaaatgaaacgtgtatcgtaaaatgtatttttattttacccacgagaatgttgttatttttagcaaatagaactcaatgcagtgcattggttattaccctgtgtaccttgtccctcattttgctgtgacaccctgaaaaagctgaccacaaatgcagtattatcttgacatacctctgtcctcctcagtgctttttaatgaaatttcacctgccccttgtgttcctgctttggatagtttttgctcttaagcattggcattcttctattgtatggtatgtatttatagcaattgtaggatggtctgaaatgtccacacactttctatgcatacaaattttgtgaattcccaaagtatgctttggaattggtcatagtcttttcgtatcatgagtgtgtatcccagaagatacagaatgcggtcattttacctgaaattatttgagaacactggatgtatctggtctgtgtaaaaagttagcacttaccctcttttcttcctggccaagccctctgaattcatctgttaatatcaaattgtatttttgccacatttctgtattggtgaaaagcgaatctgcagaataactgtcaacgtttttcattcttgttttacaaacctattttttaaagtgagaataaggttggtttttaccaaatatttgttcctccttgacaaaagtagctctgtgtggataatatgattttattactacagttccagtcacttggttatatttatcttagcatgagcctttcacaccaagatttctatattttgtaacataggtgaaatatttaaaacatcaaaaactgtaaatctagatttttaaaaaatccaactgcaatgtcttttcctttgattgagatgatttgtgtaaactcaccagtcttgctttggagtgagcagaagagaatgactattttacgtggagcatcattgtgtgactgttgacctggacagtcccaagggctatgcagatggactccattggcacagggaggtttgacctcttccctgctattatccctcctcccaactgtacagatttgtttgttgtagtttatgtacttcttgatactgtcaaaaaattatctggaaatggttttattttgtgaagtgaacaatactttgtaatttatgatagtgtaaatggaaggcaaagcatcacatgtattaaattcttctgtctatta

SEQ ID NO: 4044 - DNA, 539 bp, Homo sapiens
  source 1..539: mol_type = unassigned DNA; mol_type = unassigned DNA
gcgaggggcgcgcggagatggcagcgtccagcaactccagcctgtccggctcgtcggtgtcctccgtctattctgaacccagaagcccgagagagcttccaaaatatgctgaagaataccagcctcctatatggaaatcatacttatatcagttacagcaagaggcacctcgtcccaagagaatcatttgtcctcgggaggtggaaaacagaccaaaatattatggaagagagtttcatgggatcatctctcgggagcaggcggatgagcttcttggaggcgtggagggtgcctacatccttagagaaagccagcggcaaccaggatgctacacgctggctctcaggtttggaaaccagaccttaaactacaggctcttccacgacgggaaacactttgtgggtgagaagaggtttgagtcgattcatgatctggtgacagatggcttgataacactgtacatagaaacaaaagctgccgagtacatttcaaaaatgacaactaaccccatctatgaacacattggatatgccacccta

SEQ ID NO: 4045 - DNA, 547 bp, Homo sapiens
  source 1..547: mol_type = unassigned DNA; mol_type = unassigned DNA
aaatggagaaaaagacatttcaggaagagagaagagcttaggtaaaggcctggagatggtcttggggaagaaaatatatctgtcacggattacaataacctcttaactggctgtttccactcttgcctctcttcagtctattctgaacccagaagcccgagagagcttccaaaatagacgacggctcgatcttggcttgggatcctgtctaggaagatgtcctctctgcacagggagtcagaaaggagatgctgaagaataccagcctcctatatggaaatcatacttatatcagttacagcaagaggcacctcgtcccaagagaatcatttgtcctcgggaggtggaaaacagaccaaaatattatggaagagagtttcatgggatcatctctcgggagcaggcggatgagcttcttggaggcgtggagggtgcctacatccttagagaaagccagcggcaaccaggatgctacacgctggctctcaggtttggaaaccagaccttaaactacaggctcttccacgacgggaaacactttgtgggt

SEQ ID NO: 4046 - DNA, 740 bp, Homo sapiens
  source 1..740: mol_type = unassigned DNA; mol_type = unassigned DNA
atagatgagattgagcatttggctgtgtgtggacacgcttcatcgtgccaactcaactagccctgggatgccggaggaagaaaatcacaaaaggaaacttaggatgcccaggttccagcacaaaatgcacttcccactgccgaggtgaaactatctgaggcattgaatgaggaacaatacaatttttgagaaagctaaggaggtgcctaccaacccgcaccaacgcatttgtttttgagaaacgtggtgcttatttgcaaatgctgaagaataccagcctcctatatggaaatcatacttatatcagttacagcaagaggcacctcgtcccaagagaatcatttgtcctcgggaggtggaaaacagaccaaaatattatggaagagagtttcatgggatcatctctcgggagcaggcggatgagcttcttggaggcgtggagggtgcctacatccttagagaaagccagcggcaaccaggatgctacacgctggctctcaggtttggaaaccagaccttaaactacaggctcttccacgacgggaaacactttgtgggtgagaagaggtttgagtcgattcatgatctggtgacagatggcttgataacactgtacatagaaacaaaagctgccgagtacatttcaaaaatgacaactaaccccatctatgaacacattggatatgccaccctactcagagaaaaagtatccagaaggctgagcaggtctaaaaatgaac

SEQ ID NO: 4047 - DNA, 575 bp, Homo sapiens
  source 1..575: mol_type = unassigned DNA; mol_type = unassigned DNA
agcaatttggaagcccaaggtgggtggatcgcttgagcccaggagttcaagaccagcctgggcaacatgatgctgaagaataccagcctcctatatggaaatcatacttatatcagttacagcaagaggcacctcgtcccaagagaatcatttgtcctcgggaggtggaaaacagaccaaaatattatggaagagagtttcatgggatcatctctcgggagcaggcggatgagcttcttggaggcgtggagggtgcctacatccttagagaaagccagcggcaaccaggatgctacacgctggctctcaggatcaaacgactccatgtgatgtcctggggttaagccccacctctgcctcgttccagtcatataaactcaagcaggaaccgccatctcttcaagcatcagttacctttgcggtttggaaaccagaccttaaactacaggctcttccacgacgggaaacactttgtgggtgagaagaggtttgagtcgattcatgatctggtgacagatggcttgataacactgtacatagaaacaaaagctgccgagtacatttcaaaaatgaca

SEQ ID NO: 4048 - DNA, 459 bp, Homo sapiens
  source 1..459: mol_type = unassigned DNA; mol_type = unassigned DNA
aatttggaagcccaaggtgggtggatcgcttgagcccaggagttcaagaccagcctgggcaacatgatgctgaagaataccagcctcctatatggaaatcatacttatatcagttacagcaagaggcacctcgtcccaagagaatcatttgtcctcgggagaaatttaacagcagcatgagttttcccttgatttgattcagttctgttgggtacttcaagctctttgggcttaaaaggtggaaaacagaccaaaatattatggaagagagtttcatgggatcatctctcgggagcaggcggatgagcttcttggaggcgtggagggtgcctacatccttagagaaagccagcggcaaccaggatgctacacgctggctctcaggtttggaaaccagaccttaaactacaggctcttccacgacgggaaacactttgtgggtgagaagaggtttgagtc

SEQ ID NO: 4049 - DNA, 498 bp, Homo sapiens
  source 1..498: mol_type = unassigned DNA; mol_type = unassigned DNA
cccaaggtgggtggatcgcttgagcccaggagttcaagaccagcctgggcaacatgatgctgaagaataccagcctcctatatggaaatcatacttatatcagttacagcaagaggcacctcgtcccaagagaatcatttgtcctcgggaggaggaaatgagacaggaagcacaagaggggcaaaggccagattccaacccagatagttcatatcaatggctgggcttctaatccagtgagtcacggagtgtgatcccagcatcagctgggaacagaaatttaacagcagcatgagttttcccttgatttgattcagttctgttgggtacttcaagctctttgggcttaaaaggtggaaaacagaccaaaatattatggaagagagtttcatgggatcatctctcgggagcaggcggatgagcttcttggaggcgtggagggtgcctacatccttagagaaagccagcggcaaccaggatgctacacgctggctctca

SEQ ID NO: 4050 - DNA, 491 bp, Homo sapiens
  source 1..491: mol_type = unassigned DNA; mol_type = unassigned DNA
gatctgccagcttgtgcctgactagtcctgtcaacattgtgaacagtggagatggtttgcctcagttgcactgtgcactgtaaaagcagtaccaatggctgtgcagacattcctaaagagaatcttagttttcttcctccactttaatagtggtcacccagtgggttgagcaaacaaacatttattgagcacctggtgtgtacaagcattcggctctgctttggtgctgaggagagtaaagctgccagggaaaaccgaggggacacacggacagctccagtggggtagctttgcagtgggactcacacctcttcattctaccagaagccagaagatactcactggggacagtcgtgatgggagtttttccatgagcagcaagagctaatgggccgtttgcctacaagagaagatgctgaagaataccagcctcctatatggaaatcatacttatatcagttacagcaagaggcacctcgtcccaagagaat

SEQ ID NO: 4051 - DNA, 2578 bp, Homo sapiens
  source 1..2578: mol_type = unassigned DNA; mol_type = unassigned DNA
tatgtgttggaatattggcaatgctgtctgcccctcccactctcctgctgcatgtccctccccccacacccacccccacactcactgccaacccacccgccaacccatccgcaaggctgcccccagggctctttgcccaggccatctgtcccatcctctccaacctggctcaggctgcacaggaggctcctccgcaaagttcctaggtccagtgacctcactatcaaagctccaacacctctgctccaggccccaataaactggcctcccggttccaatccacacctgctatgcagggccagttagaccccctgagactgggctctgcctcagtccctcccaccagaaccggggattcacagaacattcatcctcactcagaagagcattgctccaagacctccagacatcagctgttgagatttaaaatcaaaatttgggaagccagaaagcctttttcttccaggccatcactgccgtacacctttaagaagcgattttgaaacacaaagccacaggctgcttctgacctcactttccttggacagaagcttcagcttggaaggtctactttttaaggatagagggaattaggaaataaatattgtgataggcacttttaaaaatgttatccttctgcatttgtactctaacttaatctttgcattcctgaggaaaatacaaaacaaaagaaaatttgtctagcttacttccctttcctcctcttcaagaaagtaaaggtgtttttctctgtccagaaaatttattctctgatttattatccaaagttctccaaggttggataatcctagaaaggggtgttactcctttcccagaagcttgaagtcccttgggactgcctcatttccccaacccagcttgccccactttccatgaaatactggttgatcaaatctccagtcctgtgggaggagcagctgtatttacttaaaggcaacagggaacgtgggctggttcctgacccaactcctacctctccctattcctctgtggagtcactgtccactctctgggcctcagacaactgcctccacatcagagtgatcatgggccagcacacaaccctcccggatatgccacattttccacatgcatgtgtatgggttttaaaatggtagagaagataaatttatctttaaaaaagaaaaataggtacattttctaaaatacccataagctattgctctccaagtgtaaataactggaagaatgttgatgatagctacctctttccagaaaatgagcctctaaaattaacaccaccctgcacctgaagcaagcaggttgctaatcaataaatgtccacttgcaattaggataacacatagttctctgagctgagagctaaattggtaattgctcttctgttatttcccatggttaaaaaaaagggggggggggggcggtggttgagtaacctggctttttgtttcaactttcattttcaacttgaaagcaaagacaatagcagaaagccaggtggactgggcatccttccttttgtttgcctgcttgaatacttgtgtttggagcatgtgaggggtggttccaagtcacttaagatgggcagtagtcaccccccttcttcactcagttgtggggctgtcgattctgggtgcccccaccatccttttaaggctagttctttgtggtccttattctgtatgtggtctgttcagagcattgatggtcttgtaccttcaggtttcatgggatcatctctcgggagcaggcggatgagcttcttggaggcgtggagggtgcctacatccttagagaaagccagcggcaaccaggatgctacacgctggctctcaggtttggaaaccagaccttaaactacaggctcttccacgacgggaaacactttgtgggtgagaagaggtttgagtcgattcatgatctggtgacagatggcttgataacactgtacatagaaacaaaagctgccgagtacatttcaaaaatgacaactaaccccatctatgaacacattggatatgccaccctactcagagaaaaagtatccagaaggctgagcaggtctaaaaatgaaccaagaaaaacaaacgtcacacatgaagaacacacagcggtggaaaaggtgagctgtgtgtgatggaagcagcctttcgttttaatccatgccgcatcaacaggcgggttaactataggtgcgatttgctgaaatgttggaggagacccacccccacccgaagaactctagaatgttagggccaaagggaccttagaaatcttctagctcaggccgggcgtggtggctcatgcctgtaatctctttgggaggccgaggcaggtggatcacgaggtcaggagatagagaccatcctggctaacacggtgaaaccccgtctctacaaaaaatacaaaaaatcagccgggtgtggtggtgggcgcctgtagtcccagttacttgggaggctgaggcaggagaatggcatgaacccaggacggggagcttgcagtgagccaagattgtgccactgcactccagtctgggcaacagagcgagactccgtctcaaaaaaaaaaaaaa

SEQ ID NO: 4052 - DNA, 542 bp, Homo sapiens
  source 1..542: mol_type = unassigned DNA; mol_type = unassigned DNA
aaccccatctatgaacacattggatatgccaccctactcagagaaaaagtatccagaaggctgagcaggtctaaaaatgaaccaagaaaaacaaacgtcacacatgaagaacacacagcggtggaaaaggtccacacgttccgaggcccacactggtgtgaatattgtgccaatttcatgtgggggctcatcgcccaaggggtccggtgctcagactgtggattgaacgtacacaaacagtgttccaagcacgttcccaatgactgccaacctgatctcaagaggatcaagaaagtgtactgttgtgacctcacaacacttgtgaaggctcacaacactcagagacccatggtggtagacatatgcattcgggaaattgaagcaagaggattaaaatcggaaggcctttacagagtctctgggttcactgaacacattgaagatgtcaaaatggcatttgacagagatggtgaaaaggccgatatatctgccaatgtctatccagacataaacatcatcactggagcccttaaactgtattt

SEQ ID NO: 4053 - DNA, 2991 bp, Homo sapiens
  source 1..2991: mol_type = unassigned DNA; mol_type = unassigned DNA
gtgtgtttgagtgtgaaatgtgctaataaggaggagagacctctcctttgcaatgtgctgcggcaggagaaagcaggctgccggcccctgcctccctgaatcctcagtggctgactggataccgcttctgggggttgctgtgcacatgaatgtttgctattgttccaggcgcacgtcggccttaagaaatagcacaaaacaggcccatccttattcagaagccgggccccctccatcactcaaactgggcctttcaggtcacatgccggaggctgctgcagacaggacccagctgcctcaaatctgccgcctaacataagctgcggttcgaaaatcctgacagcacagggcttcctgggctctgcagagcaaactggaaagagctgggatccaggcactatgttctctgaagaactgtggctggaaaatgagaaaaagtgtgctgtggttcggaagtctaagcagggcaggaaacgccaagaactgctggccgtagccttcggggtgaaggtgggtgtcaaaggcggctttctttggccccctctcaaactctttgcctgttcacagatctcctccctggttcgaagggctgccctcacacacaacgacaaccacttcaattatgagaagacacacaactttaaggtccacacgttccgaggcccacactggtgtgaatattgtgccaatttcatgtgggggctcatcgcccaaggggtccggtgctcagactgtggattgaacgtacacaaacagtgttccaagcacgttcccaatgactgccaacctgatctcaagaggatcaagaaagtgtactgttgtgacctcacaacacttgtgaaggctcacaacactcagagacccatggtggtagacatatgcattcgggaaattgaagcaagaggattaaaatcggaaggcctttacagagtctctgggttcactgaacacattgaagatgtcaaaatggcatttgacagagatggtgaaaaggccgatatatctgccaatgtctatccagacataaacatcatcactggagcccttaaactgtatttcagagacttacccatccctgtcatcacatatgatacctattccaaatttatagatgcagcaaaaatctccaatgcagatgagaggctggaagccgtccatgaagtgctgatgctgctgcctcctgcccactatgaaaccctccggtacctaatgatccacctcaaaaaggttactatgaatgaaaaagacaatttcatgaatgcagaaaatctggggatcgtgtttgggcccactctgatgaggccccctgaggacagcaccctgaccaccctgcatgatatgcggtaccaaaagctgattgtgcagattttaatagaaaacgaagacgttttattctaatccatcagggaaatgagctgaatggccccagcaccatccaagttgacacagctaaaggaataaaaacatttcttaccacttgatttgttttccaagcaagtgctagaatttcctggactgcagaggatcgctgagtggggtactgtgtctcatagacatgcgccacctccacgtgagaacaagggtgaaggtgagggaagcccctcaccttgggtcttttgctgtgcctcctatgtatgtctggtttgctggaagagtgattaatacatctttaatttattaaaaaacaatgtagacctttaaacttcagtcttattggtaataaaagggaacttaattcatacaggtacttgatacagttatacattttccacttacaaaaagaagacaattctgttaaatgaaacgtgtatcgtaaaatgtatttttattttacccacgagaatgttgttatttttagcaaatagaactcaatgcagtgcattggttattaccctgtgtaccttgtccctcattttgctgtgacaccctgaaaaagctgaccacaaatgcagtattatcttgacatacctctgtcctcctcagtgctttttaatgaaatttcacctgccccttgtgttcctgctttggatagtttttgctcttaagcattggcattcttctattgtatggtatgtatttatagcaattgtaggatggtctgaaatgtccacacactttctatgcatacaaattttgtgaattcccaaagtatgctttggaattggtcatagtcttttcgtatcatgagtgtgtatcccagaagatacagaatgcggtcattttacctgaaattatttgagaacactggatgtatctggtctgtgtaaaaagttagcacttaccctcttttcttcctggccaagccctctgaattcatctgttaatatcaaattgtatttttgccacatttctgtattggtgaaaagcgaatctgcagaataactgtcaacgtttttcattcttgttttacaaacctattttttaaagtgagaataaggttggtttttaccaaatatttgttcctccttgacaaaagtagctctgtgtggataatatgattttattactacagttccagtcacttggttatatttatcttagcatgagcctttcacaccaagatttctatattttgtaacataggtgaaatatttaaaacatcaaaaactgtaaatctagatttttaaaaaatccaactgcaatgtcttttcctttgattgagatgatttgtgtaaactcaccagtcttgctttggagtgagcagaagagaatgactattttacgtggagcatcattgtgtgactgttgacctggacagtcccaagggctatgcagatggactccattggcacagggaggtttgacctcttccctgctattatccctcctcccaactgtacagatttgtttgttgtagtttatgtacttcttgatactgtcaaaaaattatctggaaatggttttattttgtgaagtgaacaatactttgtaatttatgatagtgtaaatggaaggcaaagcatcacatgtattaaattcttctgtctatta

SEQ ID NO: 4054 - DNA, 687 bp, Homo sapiens
  source 1..687: mol_type = unassigned DNA; mol_type = unassigned DNA
atcactcaaactgggcctttcaggtcacatgccggaggctgctgcagacaggacccagctgcctcaaatctgccgcctaacataagctgcggttcgaaaatcctgacagcacagggcttcctgggctctgcagagcaaactggaaagagctgggatccaggcactatgttctctgaagaactgtggctggaaaatgagaaaaagtgtgctgtggttcggaagtctaagcagggcaggaaacgccaagaactgctggccgtagccttcggggtgaaggtccacacgttccgaggcccacactggtgtgaatattgtgccaatttcatgtgggggctcatcgcccaaggggtccggtgctcagactgtggattgaacgtacacaaacagtgttccaagcacgttcccaatgactgccaacctgatctcaagaggatcaagaaagtgtactgttgtgacctcacaacacttgtgaaggctcacaacactcagagacccatggtggtagacatatgcattcgggaaattgaagcaagaggattaaaatcggaaggcctttacagagtctctgggttcactgaacacattgaagatgtcaaaatggcatttgacagagatggtgaaaaggccgatatatctgccaatgtctatccagacataaacatcatcactggagcccttaaactgtat

SEQ ID NO: 4055 - DNA, 552 bp, Homo sapiens
  source 1..552: mol_type = unassigned DNA; mol_type = unassigned DNA
aaatctgccgcctaacataagctgcggttcgaaaatcctgacagcacagggcttcctgggctctgcagagcaaactggaaagagctgggatccaggcactatgttctctgaagaactgtggctggaaaatgagaaaaaatctcctccctggttcgaagggctgccctcacacacaacgacaaccacttcaattatgagaagacacacaactttaaggtccacacgttccgaggcccacactggtgtgaatattgtgccaatttcatgtgggggctcatcgcccaaggggtccggtgctcagactgtggattgaacgtacacaaacagtgttccaagcacgttcccaatgactgccaacctgatctcaagaggatcaagaaagtgtactgttgtgacctcacaacacttgtgaaggctcacaacactcagagacccatggtggtagacatatgcattcgggaaattgaagcaagaggattaaaatcggaaggcctttacagagtctctgggttcactgaacacattgaagatgtcaaaatggcatttgacaga

SEQ ID NO: 4056 - DNA, 918 bp, Homo sapiens
  source 1..918: mol_type = unassigned DNA
acagtgctgaggtagctttagcccgcatagtactcctggccacaccatgttcttccaaagagctcagctctctctgcctcagttccctcatctataaaatgggagtgttgggaggtttaaagaatacatgcgagtcacttatcgtggtctctggcacccagtccacacgttccgaggcccacactggtgtgaatattgtgccaatttcatgtgggggctcatcgcccaaggggtccggtgctcagactgtggattgaacgtacacaaacagtgttccaagcacgttcccaatgactgccaacctgatctcaagaggatcaagaaagtgtactgttgtgacctcacaacacttgtgaaggctcacaacactcagagacccatggtggtagacatatgcattcgggaaattgaagcaagaggattaaaatcggaaggcctttacagagtctctgggttcactgaacacattgaagatgtcaaaatggcatttgacagagatggtgaaaaggccgatatatctgccaatgtctatccagacataaacatcatcactggagcccttaaactgtatttcagagacttacccatccctgtcatcacatatgatacctattccaaatttatagatgcagcaaaaatctccaatgcagatgagaggctggaagccgtccatgaagtgctgatgctgctgcctcctgcccactatgaaaccctccggtacctaatgatccacctcaaaaaggttactatgaatgaaaaagacaatttcatgaatgcagaaaatctggggatcgtgtttgggcccactctgatgaggccccctgaggacagcaccctgaccaccctgcatgatatgcggtaccaaaagctgattgtgcagattttaatagaaaacgaagacgttttattctaatccat

SEQ ID NO: 4057 - DNA, 546 bp, Homo sapiens
  source 1..546: mol_type = unassigned DNA
aagatgtcaaaatggcatttgacagagatggtgaaaaggccgatatatctgccaatgtctatccagacataaacatcatcactggagcccttaaactgtatttcagagacttacccatccctgtcatcacatatgatacctattccaaatttatagatgcagcaaaaatctccaatgcagatgagaggctggaagccgtccatgaagtgctgatgctgctgcctcctgcccactatgaaaccctccggtacctaatgatccacctcaaaaagtaagctcatgtctcgtgcacaaagcctgctctgctcctagagcggttaatgcatgaggaaaagtggacggcattcctccccagccataactgctggagtttcactgtgccaggaaccactccaggcactttcagtgtatcatccctatgaaaggggcgccactgtgatggctcacgcctgtaatcccagcactttgggaggccgaggtgggcggatcatgaggtcaggagattgagaccatcctggctaacacggtgaaaccctgtctctacta

SEQ ID NO: 4058 - DNA, 755 bp, Homo sapiens
  source 1..755: mol_type = unassigned DNA
atgttctctgaagaactgtggctggaaaatgagaaaaagtgtgctgtggttcggaagtctaagcagggcaggaaacgccaagaactgctggccgtagccttcggggtgaaggtgggtgtcaaaggcggctttctttggccccctctcaaactctttgcctgttcacagatctcctccctggttcgaagggctgccctcacacacaacgacaaccacttcaattatgagaagacacacaactttaaggtccacacgttccgaggcccacactggtgtgaatattgtgccaatttcatgtgggggctcatcgcccaaggggtccggtgctcagactgtggattgaacgtacacaaacagtgttccaagcacgttcccaatgactgccaacctgatctcaagaggatcaagaaagtgtactgttgtgacctcacaacacttgtgaaggctcacaacactcagagacccatggtggtagacatatgcattcgggaaattgaagcaagaggattaaaatcggaaggcctttacagagtctctgggttcactgaacacattgaagatgtcaaaatggcatttgacagagggttactatgaatgaaaaagacaatttcatgaatgcagaaaatctggggatcgtgtttgggcccactctgatgaggccccctgaggacagcaccctgaccaccctgcatgatatgcggtaccaaaagctgattgtgcagattttaatagaaaacgaagacgttttattctaa

SEQ ID NO: 4059 - DNA, 825 bp, Homo sapiens
  source 1..825: mol_type = unassigned DNA
atgttctctgaagaactgtggctggaaaatgagaaaaagtgtgctgtggttcggaagtctaagcagggcaggaaacgccaagaactgctggccgtagccttcggggtgaaggtgggtgtcaaaggcggctttctttggccccctctcaaactctttgcctgttcacagatctcctccctggttcgaagggctgccctcacacacaacgacaaccacttcaattatgagaagacacacaactttaaggtccacacgttccgaggcccacactggtgtgaatattgtgccaatttcatgtgggggctcatcgcccaaggggtccggtgctcaggattaaaatcggaaggcctttacagagtctctgggttcactgaacacattgaagatgtcaaaatggcatttgacagagatggtgaaaaggccgatatatctgccaatgtctatccagacataaacatcatcactggagcccttaaactgtatttcagagacttacccatccctgtcatcacatatgatacctattccaaatttatagatgcagcaaaaatctccaatgcagatgagaggctggaagccgtccatgaagtgctgatgctgctgcctcctgcccactatgaaaccctccggtacctaatgatccacctcaaaaaggttactatgaatgaaaaagacaatttcatgaatgcagaaaatctggggatcgtgtttgggcccactctgatgaggccccctgaggacagcaccctgaccaccctgcatgatatgcggtaccaaaagctgattgtgcagattttaatagaaaacgaagacgttttattctaa

SEQ ID NO: 4060 - DNA, 2279 bp, Homo sapiens
  source 1..2279: mol_type = unassigned DNA
atgttctctgaagaactgtggctggaaaatgagaaaaagtgtgctgtggttcggaagtctaagcagggcaggaaacgccaagaactgctggccgtagccttcggggtgaaggtgggtgtcaaaggcggctttctttggccccctctcaaactctttgcctgttcacagatctcctccctggttcgaagggctgccctcacacacaacgacaaccacttcaattatgagaagacacacaactttaaggtccacacgttccgaggcccacactggtgtgaatattgtgccaatttcatgtgggggctcatcgcccaaggggtccggtgctcaggattaaaatcggaaggcctttacagagtctctgggttcactgaacacattgaagatgtcaaaatggcatttgacagagaaatctccaatgcagatgagaggctggaagccgtccatgaagtgctgatgctgctgcctcctgcccactatgaaaccctccggtacctaatgatccacctcaaaaaggttactatgaatgaaaaagacaatttcatgaatgcagaaaatctggggatcgtgtttgggcccactctgatgaggccccctgaggacagcaccctgaccaccctgcatgatatgcggtaccaaaagctgattgtgcagattttaatagaaaacgaagacgttttattctaatccatcagggaaatgagctgaatggccccagcaccatccaagttgacacagctaaaggaataaaaacatttcttaccacttgatttgttttccaagcaagtgctagaatttcctggactgcagaggatcgctgagtggggtactgtgtctcatagacatgcgccacctccacgtgagaacaagggtgaaggtgagggaagcccctcaccttgggtcttttgctgtgcctcctatgtatgtctggtttgctggaagagtgattaatacatctttaatttattaaaaaacaatgtagacctttaaacttcagtcttattggtaataaaagggaacttaattcatacaggtacttgatacagttatacattttccacttacaaaaagaagacaattctgttaaatgaaacgtgtatcgtaaaatgtatttttattttacccacgagaatgttgttatttttagcaaatagaactcaatgcagtgcattggttattaccctgtgtaccttgtccctcattttgctgtgacaccctgaaaaagctgaccacaaatgcagtattatcttgacatacctctgtcctcctcagtgctttttaatgaaatttcacctgccccttgtgttcctgctttggatagtttttgctcttaagcattggcattcttctattgtatggtatgtatttatagcaattgtaggatggtctgaaatgtccacacactttctatgcatacaaattttgtgaattcccaaagtatgctttggaattggtcatagtcttttcgtatcatgagtgtgtatcccagaagatacagaatgcggtcattttacctgaaattatttgagaacactggatgtatctggtctgtgtaaaaagttagcacttaccctcttttcttcctggccaagccctctgaattcatctgttaatatcaaattgtatttttgccacatttctgtattggtgaaaagcgaatctgcagaataactgtcaacgtttttcattcttgttttacaaacctattttttaaagtgagaataaggttggtttttaccaaatatttgttcctccttgacaaaagtagctctgtgtggataatatgattttattactacagttccagtcacttggttatatttatcttagcatgagcctttcacaccaagatttctatattttgtaacataggtgaaatatttaaaacatcaaaaactgtaaatctagatttttaaaaaatccaactgcaatgtcttttcctttgattgagatgatttgtgtaaactcaccagtcttgctttggagtgagcagaagagaatgactattttacgtggagcatcattgtgtgactgttgacctggacagtcccaagggctatgcagatggactccattggcacagggaggtttgacctcttccctgctattatccctcctcccaactgtacagatttgtttgttgtagtttatgtacttcttgatactgtcaaaaaattatctggaaatggttttattttgtgaagtgaacaatactttgtaatttatgatagtgtaaatggaaggcaaagcatcacatgtattaaattcttctgtctatt

SEQ ID NO: 4061 - DNA, 2375 bp, Homo sapiens
  source 1..2375: mol_type = unassigned DNA
atgttctctgaagaactgtggctggaaaatgagaaaaagtgtgctgtggttcggaagtctaagcagggcaggaaacgccaagaactgctggccgtagccttcggggtgaaggtgggtgtcaaaggcggctttctttggccccctctcaaactctttgcctgttcacagatctcctccctggttcgaagggctgccctcacacacaacgacaaccacttcaattatgagaagacacacaactttaaggtccacacgttccgaggcccacactggtgtgaatattgtgccaatttcatgtgggggctcatcgcccaaggggtccggtgctcagactgtggattgaacgtacacaaacagtgttccaagcacgttcccaatgactgccaacctgatctcaagaggatcaagaaagtgtactgttgtgacctcacaacacttgtgaaggctcacaacactcagagacccatggtggtagacatatgcattcgggaaattgaagcaagagaaatctccaatgcagatgagaggctggaagccgtccatgaagtgctgatgctgctgcctcctgcccactatgaaaccctccggtacctaatgatccacctcaaaaaggttactatgaatgaaaaagacaatttcatgaatgcagaaaatctggggatcgtgtttgggcccactctgatgaggccccctgaggacagcaccctgaccaccctgcatgatatgcggtaccaaaagctgattgtgcagattttaatagaaaacgaagacgttttattctaatccatcagggaaatgagctgaatggccccagcaccatccaagttgacacagctaaaggaataaaaacatttcttaccacttgatttgttttccaagcaagtgctagaatttcctggactgcagaggatcgctgagtggggtactgtgtctcatagacatgcgccacctccacgtgagaacaagggtgaaggtgagggaagcccctcaccttgggtcttttgctgtgcctcctatgtatgtctggtttgctggaagagtgattaatacatctttaatttattaaaaaacaatgtagacctttaaacttcagtcttattggtaataaaagggaacttaattcatacaggtacttgatacagttatacattttccacttacaaaaagaagacaattctgttaaatgaaacgtgtatcgtaaaatgtatttttattttacccacgagaatgttgttatttttagcaaatagaactcaatgcagtgcattggttattaccctgtgtaccttgtccctcattttgctgtgacaccctgaaaaagctgaccacaaatgcagtattatcttgacatacctctgtcctcctcagtgctttttaatgaaatttcacctgccccttgtgttcctgctttggatagtttttgctcttaagcattggcattcttctattgtatggtatgtatttatagcaattgtaggatggtctgaaatgtccacacactttctatgcatacaaattttgtgaattcccaaagtatgctttggaattggtcatagtcttttcgtatcatgagtgtgtatcccagaagatacagaatgcggtcattttacctgaaattatttgagaacactggatgtatctggtctgtgtaaaaagttagcacttaccctcttttcttcctggccaagccctctgaattcatctgttaatatcaaattgtatttttgccacatttctgtattggtgaaaagcgaatctgcagaataactgtcaacgtttttcattcttgttttacaaacctattttttaaagtgagaataaggttggtttttaccaaatatttgttcctccttgacaaaagtagctctgtgtggataatatgattttattactacagttccagtcacttggttatatttatcttagcatgagcctttcacaccaagatttctatattttgtaacataggtgaaatatttaaaacatcaaaaactgtaaatctagatttttaaaaaatccaactgcaatgtcttttcctttgattgagatgatttgtgtaaactcaccagtcttgctttggagtgagcagaagagaatgactattttacgtggagcatcattgtgtgactgttgacctggacagtcccaagggctatgcagatggactccattggcacagggaggtttgacctcttccctgctattatccctcctcccaactgtacagatttgtttgttgtagtttatgtacttcttgatactgtcaaaaaattatctggaaatggttttattttgtgaagtgaacaatactttgtaatttatgatagtgtaaatggaaggcaaagcatcacatgtattaaattcttctgtctatt

SEQ ID NO: 4062 - DNA, 725 bp, Homo sapiens
  source 1..725: mol_type = unassigned DNA
atggcagcgtccagcaactccagcctgtccggctcgtcggtgtcctccgatgctgaagaataccagcctcctatatggaaatcatacttatatcagttacagcaagaggcacctcgtcccaagagaatcatttgtcctcgggaggtggaaaacagaccaaaatattatggaagagagtttcatgggatcatctctcgggagcaggcggatgagcttcttggaggcgtggagggtgcctacatccttagagaaagccagcggcaaccaggatgctacacgctggctctcaggtttggaaaccagaccttaaactacaggctcttccacgacgggaaacactttgtgggtgagaagaggtttgagtcgattcatgatctggtgacagatggcttgataacactgtacatagaaacaaaagctgccgagtacatttcaaaaatgacaactaaccccatctatgaacacattggatatgccaccctactcagagaaaaagtatccagaaggctgagcaggtctaaaaatgaaccaagaaaaacaaacgtcacacatgaagaacacacagcggtggaaaagatctcctccctggttcgaagggctgccctcacacacaacgacaaccacttcaattatgagaggacagcaccctgaccaccctgcatgatatgcggtaccaaaagctgattgtgcagattttaatagaaaacgaagacgttttattctaa

SEQ ID NO: 4063 - DNA, 2421 bp, Homo sapiens
  source 1..2421: mol_type = unassigned DNA
ctgtggtgtttttcccccgctcctctggctgccttcctgatggatctctgtggtcccaggcaggaatggcctgcttggggacccagcgagctcccaaggcctttcctgctgcttcctctatccctgtgttttgcttggctctctaaattgactcagctccaggacatcaggaccccaggttctctggtcttgggactctgagacttgcaccaggaatcctgcccaggctctcaggcctttggactcagactgagctacttcactggctttcctggttctccagcttgaagatggcagatcgtgggacttctcagcctccataattgagtgagccaattccctggccaaaaggtgtgttttgctgacttcaagcatccctgctacaaaatggcctacttccatgaactgtccagccgagtgagctttcaggaggcacgcctggcttgtgagagtgagggaggagtcctcctcagccttgagaatgaagcagaacagaagttaatagagagcatgttgcaaaacctgacaaaacccgggacagggatttctgatggtgatttctggatagggctttggaggaatggagatgggcaaacatctggtgcctgcccagatctctaccagtggtctgatggaagcaattcccagtaccgaaactggtacacagatgaaccttcctgcggaagtgaaaagtgtgttgtgatgtatcaccaaccaactgccaatcctggccttgggggtccctacctttaccagtggaatgatgacaggtgtaacatgaagcacaattatatttgcaagtatgaaccagagattaatccaacagcccctgtagaaaagccttatcttacaaatcaaccaggagacacccatcagaatgtggttgttactgaagcaggtataattcccaatctaatttatgttgttataccaacaatacccctgctcttactgatactggttgcttttggaacctgttgtttccagatgctgcataaaagtaaaggaagaacaaaaactagtccaaaccagtctacactgtggatttcaaagagtaccagaaaagaaagtggcatggaagtataataactcattgacttggttccagaattttgtaattctggatctgtataaggaatggcatcagaacaatagcttggaatggcttgaaatcacaaaggatctgcaagatgaactgtaagctcccccttgaggcaaatattaaagtaatttttatatgtctattatttcatttaaagaatatgctgtgctaataatggagtgagacatgcttattttgctaaaggatgcacccaaacttcaaacttcaagcaaatgaaatggacaatgcagataaagttgttatcaacacgtcgggagtatgtgtgttagaagcaattccttttatttctttcacctttcataagttgttatctagtcaatgtaatgtatattgtattgaaatttacagtgtgcaaaagtattttacctttgcataagtgtttgataaaaatgaactgttctaatatttatttttatggcatctcatttttcaatacatgctcttttgattaaagaaacttattactgttgtcaactgaattcacacacacacaaatatagtaccatagaaaaagtttgttttctcgaaataattcatctttcagcttctctgcttttggtcaatgtctaggaaatctcttcagaaataagaagctatttcattaagtgtgatataaacctcctcaaacattttacttagaggcaaggattgtctaatttcaattgtgcaagacatgtgccttataattatttttagcttaaaattaaacagattttgtaataatgtaactttgttaataggtgcataaacactaatgcagtcaatttgaacaaaagaagtgacatacacaatataaatcatatgtcttcacacgttgcctatataatgagaagcagctctctgagggttctgaaatcaatgtggtccctctcttgcccactaaacaaagatggttgttcggggtttgggattgacactggaggcagatagttgcaaagttagtctaaggtttccctagctgtatttagcctctgactatattagtatacaaagaggtcatgtggttgagaccaggtgaatagtcactatcagtgtggagacaagcacagcacacagacattttaggaaggaaaggaactacgaaatcgtgtgaaaatgggttggaacccatcagtgatcgcatattcattgatgagggtttgcttgagatagaaaatggtggctcctttctgtcttatctcctagtttcttcaatgcttacgccttgttcttctcaagagaaagttgtaactctctggtcttcatatgtccctgtgctccttttaaccaaataaagagttcttgtttctgaagaatga

SEQ ID NO: 4064 - DNA, 2036 bp, Homo sapiens
  source 1..2036: mol_type = unassigned DNA
gcttgaagatggcagatcgtgggacttctcagcctccataattgagtgagccaattccctggccaaaaggtgtgttttgctgacttcaagcatccctgctacaaaatggcctacttccatgaactgtccagccgagtgagctttcaggaggcacgcctggcttgtgagagtgagggaggagtcctcctcagccttgagaatgaagcagaacagaagttaatagagagcatgttgcaaaacctgacaaaacccgggacagggatttctgatggtgatttctggatagggctttggaggaatggagatgggcaaacatctggtgcctgcccagatctctaccagtggtctgatggaagcaattcccagtaccgaaactggtacacagatgaaccttcctgcggaagtgaaaagtgtgttgtgatgtatcaccaaccaactgccaatcctggccttgggggtccctacctttaccagtggaatgatgacaggtgtaacatgaagcacaattatatttgcaagtatgaaccagagattaatccaacagcccctgtagaaaagccttatcttacaaatcaaccaggagacacccatcagaatgtggttgttactgaagcagtaaaggaagaacaaaaactagtccaaaccagtctacactgtggatttcaaagagtaccagaaaagaaagtggcatggaagtataataactcattgacttggttccagaattttgtaattctggatctgtataaggaatggcatcagaacaatagcttggaatggcttgaaatcacaaaggatctgcaagatgaactgtaagctcccccttgaggcaaatattaaagtaatttttatatgtctattatttcatttaaagaatatgctgtgctaataatggagtgagacatgcttattttgctaaaggatgcacccaaacttcaaacttcaagcaaatgaaatggacaatgcagataaagttgttatcaacacgtcgggagtatgtgtgttagaagcaattccttttatttctttcacctttcataagttgttatctagtcaatgtaatgtatattgtattgaaatttacagtgtgcaaaagtattttacctttgcataagtgtttgataaaaatgaactgttctaatatttatttttatggcatctcatttttcaatacatgctcttttgattaaagaaacttattactgttgtcaactgaattcacacacacacaaatatagtaccatagaaaaagtttgttttctcgaaataattcatctttcagcttctctgcttttggtcaatgtctaggaaatctcttcagaaataagaagctatttcattaagtgtgatataaacctcctcaaacattttacttagaggcaaggattgtctaatttcaattgtgcaagacatgtgccttataattatttttagcttaaaattaaacagattttgtaataatgtaactttgttaataggtgcataaacactaatgcagtcaatttgaacaaaagaagtgacatacacaatataaatcatatgtcttcacacgttgcctatataatgagaagcagctctctgagggttctgaaatcaatgtggtccctctcttgcccactaaacaaagatggttgttcggggtttgggattgacactggaggcagatagttgcaaagttagtctaaggtttccctagctgtatttagcctctgactatattagtatacaaagaggtcatgtggttgagaccaggtgaatagtcactatcagtgtggagacaagcacagcacacagacattttaggaaggaaaggaactacgaaatcgtgtgaaaatgggttggaacccatcagtgatcgcatattcattgatgagggtttgcttgagatagaaaatggtggctcctttctgtcttatctcctagtttcttcaatgcttacgccttgttcttctcaagagaaagttgtaactctctggtcttcatatgtccctgtgctccttttaaccaaataaagagttcttgtttctgaagaatga

SEQ ID NO: 4065 - DNA, 2136 bp, Homo sapiens
  source 1..2136: mol_type = unassigned DNA
gcttgaagatggcagatcgtgggacttctcagcctccataattgagtgagccaattccctgaatacaacaagaagatgcccatctgtagaccaggaggtggtccctccccagaaactggatgggccagcacgttgattctgaacttctagcctccagaactgccaaaaggtgtgttttgctgacttcaagcatccctgctacaaaatggcctacttccatgaactgtccagccgagtgagctttcaggaggcacgcctggcttgtgagagtgagggaggagtcctcctcagccttgagaatgaagcagaacagaagttaatagagagcatgttgcaaaacctgacaaaacccgggacagggatttctgatggtgatttctggatagggctttggaggaatggagatgggcaaacatctggtgcctgcccagatctctaccagtggtctgatggaagcaattcccagtaccgaaactggtacacagatgaaccttcctgcggaagtgaaaagtgtgttgtgatgtatcaccaaccaactgccaatcctggccttgggggtccctacctttaccagtggaatgatgacaggtgtaacatgaagcacaattatatttgcaagtatgaaccagagattaatccaacagcccctgtagaaaagccttatcttacaaatcaaccaggagacacccatcagaatgtggttgttactgaagcagtaaaggaagaacaaaaactagtccaaaccagtctacactgtggatttcaaagagtaccagaaaagaaagtggcatggaagtataataactcattgacttggttccagaattttgtaattctggatctgtataaggaatggcatcagaacaatagcttggaatggcttgaaatcacaaaggatctgcaagatgaactgtaagctcccccttgaggcaaatattaaagtaatttttatatgtctattatttcatttaaagaatatgctgtgctaataatggagtgagacatgcttattttgctaaaggatgcacccaaacttcaaacttcaagcaaatgaaatggacaatgcagataaagttgttatcaacacgtcgggagtatgtgtgttagaagcaattccttttatttctttcacctttcataagttgttatctagtcaatgtaatgtatattgtattgaaatttacagtgtgcaaaagtattttacctttgcataagtgtttgataaaaatgaactgttctaatatttatttttatggcatctcatttttcaatacatgctcttttgattaaagaaacttattactgttgtcaactgaattcacacacacacaaatatagtaccatagaaaaagtttgttttctcgaaataattcatctttcagcttctctgcttttggtcaatgtctaggaaatctcttcagaaataagaagctatttcattaagtgtgatataaacctcctcaaacattttacttagaggcaaggattgtctaatttcaattgtgcaagacatgtgccttataattatttttagcttaaaattaaacagattttgtaataatgtaactttgttaataggtgcataaacactaatgcagtcaatttgaacaaaagaagtgacatacacaatataaatcatatgtcttcacacgttgcctatataatgagaagcagctctctgagggttctgaaatcaatgtggtccctctcttgcccactaaacaaagatggttgttcggggtttgggattgacactggaggcagatagttgcaaagttagtctaaggtttccctagctgtatttagcctctgactatattagtatacaaagaggtcatgtggttgagaccaggtgaatagtcactatcagtgtggagacaagcacagcacacagacattttaggaaggaaaggaactacgaaatcgtgtgaaaatgggttggaacccatcagtgatcgcatattcattgatgagggtttgcttgagatagaaaatggtggctcctttctgtcttatctcctagtttcttcaatgcttacgccttgttcttctcaagagaaagttgtaactctctggtcttcatatgtccctgtgctccttttaaccaaataaagagttcttgtttctgaagaatga

SEQ ID NO: 4066 - DNA, 2239 bp, Homo sapiens
  source 1..2239: mol_type = unassigned DNA
gcttgaagatggcagatcgtgggacttctcagcctccataattgagtgagccaattccctgaatacaacaagaagatgcccatctgtagaccaggaggtggtccctccccagaaactggatgggccagcacgttgattctgaacttctagcctccagaactgccaaaaggtgtgttttgctgacttcaagcatccctgctacaaaatggcctacttccatgaactgtccagccgagtgagctttcaggaggcacgcctggcttgtgagagtgagggaggagtcctcctcagccttgagaatgaagcagaacagaagttaatagagagcatgttgcaaaacctgacaaaacccgggacagggatttctgatggtgatttctggatagggctttggaggaatggagatgggcaaacatctggtgcctgcccagatctctaccagtggtctgatggaagcaattcccagtaccgaaactggtacacagatgaaccttcctgcggaagtgaaaagtgtgttgtgatgtatcaccaaccaactgccaatcctggccttgggggtccctacctttaccagtggaatgatgacaggtgtaacatgaagcacaattatatttgcaagtatgaaccagagattaatccaacagcccctgtagaaaagccttatcttacaaatcaaccaggagacacccatcagaatgtggttgttactgaagcaggtataattcccaatctaatttatgttgttataccaacaatacccctgctcttactgatactggttgcttttggaacctgttgtttccagatgctgcataaaagtaaaggaagaacaaaaactagtccaaaccagtctacactgtggatttcaaagagtaccagaaaagaaagtggcatggaagtataataactcattgacttggttccagaattttgtaattctggatctgtataaggaatggcatcagaacaatagcttggaatggcttgaaatcacaaaggatctgcaagatgaactgtaagctcccccttgaggcaaatattaaagtaatttttatatgtctattatttcatttaaagaatatgctgtgctaataatggagtgagacatgcttattttgctaaaggatgcacccaaacttcaaacttcaagcaaatgaaatggacaatgcagataaagttgttatcaacacgtcgggagtatgtgtgttagaagcaattccttttatttctttcacctttcataagttgttatctagtcaatgtaatgtatattgtattgaaatttacagtgtgcaaaagtattttacctttgcataagtgtttgataaaaatgaactgttctaatatttatttttatggcatctcatttttcaatacatgctcttttgattaaagaaacttattactgttgtcaactgaattcacacacacacaaatatagtaccatagaaaaagtttgttttctcgaaataattcatctttcagcttctctgcttttggtcaatgtctaggaaatctcttcagaaataagaagctatttcattaagtgtgatataaacctcctcaaacattttacttagaggcaaggattgtctaatttcaattgtgcaagacatgtgccttataattatttttagcttaaaattaaacagattttgtaataatgtaactttgttaataggtgcataaacactaatgcagtcaatttgaacaaaagaagtgacatacacaatataaatcatatgtcttcacacgttgcctatataatgagaagcagctctctgagggttctgaaatcaatgtggtccctctcttgcccactaaacaaagatggttgttcggggtttgggattgacactggaggcagatagttgcaaagttagtctaaggtttccctagctgtatttagcctctgactatattagtatacaaagaggtcatgtggttgagaccaggtgaatagtcactatcagtgtggagacaagcacagcacacagacattttaggaaggaaaggaactacgaaatcgtgtgaaaatgggttggaacccatcagtgatcgcatattcattgatgagggtttgcttgagatagaaaatggtggctcctttctgtcttatctcctagtttcttcaatgcttacgccttgttcttctcaagagaaagttgtaactctctggtcttcatatgtccctgtgctccttttaaccaaataaagagttcttgtttctgaagaatga

SEQ ID NO: 4067 - DNA, 2548 bp, Homo sapiens
  source 1..2548: mol_type = unassigned DNA
gctgctgctgtgatccaggaccagggcgcaccggctcagcctctcacttgtcagaggccggggaagagaagcaaagcgcaacggtgtggtccaagccggggcttctgcttcgcctctaggacatacacgggaccccctaacttcagtcccccaaacgcgcaccctcgaagtcttgaactccagccccgcacatccacgcgcggcacaggcgcggcaggcggcaggtcccggccgaaggcgatgcgcgcagggggtcgggcagctgggctcgggcggcgggagtagggcccggcagggaggcagggaggctgcagagtcagagtcgcgggctgcgccctgggcagaggccgccctcgctccacgcaacacctgctgctgccaccgcgccgcgatgagccgcgtggtctcgctgctgctgggcgccgcgctgctctgcggccacggagccttctgccgccgcgtggtcagcggccaaaaggtgtgttttgctgacttcaagcatccctgctacaaaatggcctacttccatgaactgtccagccgagtgagctttcaggaggcacgcctggcttgtgagagtgagggaggagtcctcctcagccttgagaatgaagcagaacagaagttaatagagagcatgttgcaaaacctgacaaaacccgggacagggatttctgatggtgatttctggatagggctttggaggaatggagatgggcaaacatctggtgcctgcccagatctctaccagtggtctgatggaagcaattcccagtaccgaaactggtacacagatgaaccttcctgcggaagtgaaaagtgtgttgtgatgtatcaccaaccaactgccaatcctggccttgggggtccctacctttaccagtggaatgatgacaggtgtaacatgaagcacaattatatttgcaagtatgaaccagagattaatccaacagcccctgtagaaaagccttatcttacaaatcaaccaggagacacccatcagaatgtggttgttactgaagcaggtataattcccaatctaatttatgttgttataccaacaatacccctgctcttactgatactggttgcttttggaacctgttgtttccagatgctgcataaaagtaaaggaagaacaaaaactagtccaaaccagtctacactgtggatttcaaagagtaccagaaaagaaagtggcatggaagtataataactcattgacttggttccagaattttgtaattctggatctgtataaggaatggcatcagaacaatagcttggaatggcttgaaatcacaaaggatctgcaagatgaactgtaagctcccccttgaggcaaatattaaagtaatttttatatgtctattatttcatttaaagaatatgctgtgctaataatggagtgagacatgcttattttgctaaaggatgcacccaaacttcaaacttcaagcaaatgaaatggacaatgcagataaagttgttatcaacacgtcgggagtatgtgtgttagaagcaattccttttatttctttcacctttcataagttgttatctagtcaatgtaatgtatattgtattgaaatttacagtgtgcaaaagtattttacctttgcataagtgtttgataaaaatgaactgttctaatatttatttttatggcatctcatttttcaatacatgctcttttgattaaagaaacttattactgttgtcaactgaattcacacacacacaaatatagtaccatagaaaaagtttgttttctcgaaataattcatctttcagcttctctgcttttggtcaatgtctaggaaatctcttcagaaataagaagctatttcattaagtgtgatataaacctcctcaaacattttacttagaggcaaggattgtctaatttcaattgtgcaagacatgtgccttataattatttttagcttaaaattaaacagattttgtaataatgtaactttgttaataggtgcataaacactaatgcagtcaatttgaacaaaagaagtgacatacacaatataaatcatatgtcttcacacgttgcctatataatgagaagcagctctctgagggttctgaaatcaatgtggtccctctcttgcccactaaacaaagatggttgttcggggtttgggattgacactggaggcagatagttgcaaagttagtctaaggtttccctagctgtatttagcctctgactatattagtatacaaagaggtcatgtggttgagaccaggtgaatagtcactatcagtgtggagacaagcacagcacacagacattttaggaaggaaaggaactacgaaatcgtgtgaaaatgggttggaacccatcagtgatcgcatattcattgatgagggtttgcttgagatagaaaatggtggctcctttctgtcttatctcctagtttcttcaatgcttacgccttgttcttctcaagagaaagttgtaactctctggtcttcatatgtccctgtgctccttttaaccaaataaagagttcttgtttctgaagaatga

SEQ ID NO: 4068 - DNA, 1637 bp, Homo sapiens
  source 1..1637: mol_type = unassigned DNA
gcacactgcgttccaagttggggacttcccagaaaatgaagtcagctggagttgggccgaggtatacttggtaatgactgcaggttcggcacacagccaaaaggtgtgttttgctgacttcaagcatccctgctacaaaatggcctacttccatgaactgtccagccgagtgagctttcaggaggcacgcctggcttgtgagagtgagggaggagtcctcctcagccttgagaatgaagcagaacagaagttaatagagagcatgttgcaaaacctgacaaaacccgggacagggatttctgatggtgatttctggatagggctttggaggaatggagatgggcaaacatctggtgcctgcccagatctctaccagtggtctgatggaagcaattcccagtaccgaaactggtacacagatgaaccttcctgcggaagtgaaaagtgtgttgtgatgtatcaccaaccaactgccaatcctggccttgggggtccctacctttaccagtggaatgatgacaggtgtaacatgaagcacaattatatttgcaagtatgaaccagagattaatccaacagcccctgtagaaaagccttatcttacaaatcaaccaggagacacccatcagaatgtggttgttactgaagcaggtataattcccaatctaatttatgttgttataccaacaatacccctgctcttactgatactggttgcttttggaacctgttgtttccagatgctgcataaaagtaaaggaagaacaaaaactagtccaaaccagtctacactgtggatttcaaagagtaccagaaaagaaagtggcatggaagtataataactcattgacttggttccagaattttgtaattctggatctgtataaggaatggcatcagaacaatagcttggaatggcttgaaatcacaaaggatctgcaagatgaactgtaagctcccccttgaggcaaatattaaagtaatttttatatgtctattatttcatttaaagaatatgctgtgctaataatggagtgagacatgcttattttgctaaaggatgcacccaaacttcaaacttcaagcaaatgaaatggacaatgcagataaagttgttatcaacacgtcgggagtatgtgtgttagaagcaattccttttatttctttcacctttcataagttgttatctagtcaatgtaatgtatattgtattgaaatttacagtgtgcaaaagtattttacctttgcataagtgtttgataaaaatgaactgttctaatatttatttttatggcatctcatttttcaatacatgctcttttgattaaagaaacttattactgttgtcaactgaattcacacacacacaaatatagtaccatagaaaaagtttgttttctcgaaataattcatctttcagcttctctgcttttggtcaatgtctaggaaatctcttcagaaataagaagctatttcattaagtgtgatataaacctcctcaaacattttacttagaggcaaggattgtctaatttcaattgtgcaagacatgtgccttataattatttttagcttaaaattaaacagattttgtaataatgtaactttgttaataggtgcataaacactaatgcagtc

SEQ ID NO: 4069 - DNA, 1974 bp, Homo sapiens
  source 1..1974: mol_type = unassigned DNA
ttttcaggccaaaaggtgtgttttgctgacttcaagcatccctgctacaaaatggcctacttccatgaactgtccagccgagtgagctttcaggaggcacgcctggcttgtgagagtgagggaggagtcctcctcagccttgagaatgaagcagaacagaagttaatagagagcatgttgcaaaacctgacaaaacccgggacagggatttctgatggtgatttctggatagggctttggaggaatggagatgggcaaacatctggtgcctgcccagatctctaccagtggtctgatggaagcaattcccagtaccgaaactggtacacagatgaaccttcctgcggaagtgaaaagtgtgttgtgatgtatcaccaaccaactgccaatcctggccttgggggtccctacctttaccagtggaatgatgacaggtgtaacatgaagcacaattatatttgcaagtatgaaccagagattaatccaacagcccctgtagaaaagccttatcttacaaatcaaccaggagacacccatcagaatgtggttgttactgaagcagtaaaggaagaacaaaaactagtccaaaccagtctacactgtggatttcaaagagtaccagaaaagaaagtggcatggaagtataataactcattgacttggttccagaattttgtaattctggatctgtataaggaatggcatcagaacaatagcttggaatggcttgaaatcacaaaggatctgcaagatgaactgtaagctcccccttgaggcaaatattaaagtaatttttatatgtctattatttcatttaaagaatatgctgtgctaataatggagtgagacatgcttattttgctaaaggatgcacccaaacttcaaacttcaagcaaatgaaatggacaatgcagataaagttgttatcaacacgtcgggagtatgtgtgttagaagcaattccttttatttctttcacctttcataagttgttatctagtcaatgtaatgtatattgtattgaaatttacagtgtgcaaaagtattttacctttgcataagtgtttgataaaaatgaactgttctaatatttatttttatggcatctcatttttcaatacatgctcttttgattaaagaaacttattactgttgtcaactgaattcacacacacacaaatatagtaccatagaaaaagtttgttttctcgaaataattcatctttcagcttctctgcttttggtcaatgtctaggaaatctcttcagaaataagaagctatttcattaagtgtgatataaacctcctcaaacattttacttagaggcaaggattgtctaatttcaattgtgcaagacatgtgccttataattatttttagcttaaaattaaacagattttgtaataatgtaactttgttaataggtgcataaacactaatgcagtcaatttgaacaaaagaagtgacatacacaatataaatcatatgtcttcacacgttgcctatataatgagaagcagctctctgagggttctgaaatcaatgtggtccctctcttgcccactaaacaaagatggttgttcggggtttgggattgacactggaggcagatagttgcaaagttagtctaaggtttccctagctgtatttagcctctgactatattagtatacaaagaggtcatgtggttgagaccaggtgaatagtcactatcagtgtggagacaagcacagcacacagacattttaggaaggaaaggaactacgaaatcgtgtgaaaatgggttggaacccatcagtgatcgcatattcattgatgagggtttgcttgagatagaaaatggtggctcctttctgtcttatctcctagtttcttcaatgcttacgccttgttcttctcaagagaaagttgtaactctctggtcttcatatgtccctgtgctccttttaaccaaataaagagttcttgtttctg

SEQ ID NO: 4070 - DNA, 2654 bp, Homo sapiens
  source 1..2654: mol_type = unassigned DNA
atgagagggcggggcggccactttgctgcaggagatacccaaagccagttagcactgaggaagtcagaagagaattgtcagtctctcggacaccttcattttctgccccggaaatttctcctccgctgttgtctgggctccacttccgacccccagttgctaccagctgtagtccgacctatcgtggcccgggctagtgccagcctcccgccgctacctccgcctcgtcccttctcctctgcgcctgcgcgaccggaaaattcgcgaaggttcctgaaacgcaacggatcgtttccggaagccggtagccgcctcagtcgtcagaccggtgctagcgacacgggagtggcaaacgcatcctcttgccgttcccggtgtttgggccttgcctgtgacggtgggaaaagaaaatggccttgctgtgctacaaccggggctgcggtcagcgcttcgatcctgagaccaattccgacgatgcttgcacataccacccaggtgttccggtctttcacgatgcattaaagggttggtcttgctgtaagagaagaacaactgatttttctgatttcttaagcattgtaggctgtacaaaaggtagacataatagtgagaagccacctgagccagtcaaacctgaagtcaagactactgagaagaaggagctatgtgaattaaaacccaaatttcaggaacacatcattcaagcccctaagccagtagaagcaataaaaagaccaagcccagatgaaccaatgacaaatttggaattaaaaatatctgcctccctaaaacaagcacttgataaacttaaactgtcatcagggaatgaagaaaataagaaagaagaagacaatgatgaaattaagattgggacctcatgtaagaatggagggtgttcaaagacataccagggtctagagagtctagaagaagtctgtgtatatcattctggagtacctattttccatgaggggatgaaatactggagctgttgtagaagaaaaacttctgattttaatacattcttagcccaagagggctgtacaaaagggaaacacatgtggactaaaaaagatgctgggaaaaaagttgttccatgtagacatgactggcatcagactggaggtgaagttaccatttcagtatatgctaaaaactcacttccagaacttagccgagtagaagcaaatagcacattgttaaatgtgcatattgtatttgaaggagagaaggaatttgatcaaaatgtgaaattatggggtgtgattgatgtaaagcgaagttatgtaactatgactgcaacaaagattgaaatcactatgagaaaagctgaaccgatgcagtgggcaagccttgaactgcctgcagctaaaaagcaggaaaaacaaaaagatgccacaacagattgagtgggagatggaaggaaggctattacattatttccgaatttttaatactgtgtgaagtggtggcttgctgctgtaatcttttgttttgttgttgtgttactgaatgtggcatttcagggttaacattaggttcttaaaagccaaagtcagtttgtctttttgtgcctctcatctttcttttgtgttatgtaagattgattattcatttctccctactggtaggaaccatagttgtgtcctatacttgaagaggctggaaagtagcccataaccataattgcagtatttctttgtatttctctgttaagcaaagaaatattaaggaacattttttttatgtttttgtattattccataattagtaaagcaagatgaaatgtcaaattttaatcagttttttcatggatttgtgttcttacagtacttgaaaatatttaaggaagagatgaagctctgcagttttttctatgtgggatgattacttttttaaggaggattaattctgaggtagtatagtaactaaaggggaatatatgaattgtttaacaaattagaatttgtttacaactacttgaatttttaaattatgtcaaaacttacattacttgccaagcagtatgatgttataggaaacataaataagattacagaggtatcaatttggttaaaattcaccattttataagactaagcaataatcttaacaacctctttcctgaatatttaaatgtgtttgtatggtgttatgactaattgttactgatttagagactaagccctcttaaaacctttagttaaatataaaaagaaattatatatatcttgcctccctgatggaaaactatataaaattgtagacttaaaaggtttgtggaaatacattaggatatcagaaaactaaatatatggagttgctttatgactattacatgttaaataaaaatagcttaattgttttggagtttttttttaaagtcatgaagagcttcacaattctagtgatacaatgttgactatatattgtactttatattaaatataggtaatacagaattagatcgtttggataggttttgagttagtgcagaactcaagaagaaaaattaggaaatattctgaaggccagaactctggaagaacttagaaagtttgggaataaattaaacttatgtagatttaaaattaaaaggggtttatttcccaaaccccttgagtcttttcttttccttggtatttatggaattc

SEQ ID NO: 4071 - DNA, 1698 bp, Homo sapiens
  source 1..1698: mol_type = unassigned DNA
cctcaaaagaagaagaaatgtgtcatatatcaatttggggatataagcaaatcctagtcacagtcgttttctaaaaagtattgttttctggaaaaacctagtttttaagaatgatgccacagcgaagttctattttaactttttaatttgatttttttttctttgttacagaagaagacaatgatgaaattaagattgggacctcatgtaagaatggagggtgttcaaagacataccagggtctagagagtctagaagaagtctgtgtatatcattctggagtacctattttccatgaggggatgaaatactggagctgttgtagaagaaaaacttctgattttaatacattcttagcccaagagggctgtacaaaagggaaacacatgtggactaaaaaagatgctgggaaaaaagttgttccatgtagacatgactggcatcagactggaggtgaagttaccatttcagtatatgctaaaaactcacttccagaacttagccgagtagaagcaaatagcacattgttaaatgtgcatattgtatttgaaggagagaaggaatttgatcaaaatgtgaaattatggggtgtgattgatgtaaagcgaagttatgtaactatgactgcaacaaagattgaaatcactatgagaaaagctgaaccgatgcagtgggcaagccttgaactgcctgcagctaaaaagcaggaaaaacaaaaagatgccacaacagattgagtgggagatggaaggaaggctattacattatttccgaatttttaatactgtgtgaagtggtggcttgctgctgtaatcttttgttttgttgttgtgttactgaatgtggcatttcagggttaacattaggttcttaaaagccaaagtcagtttgtctttttgtgcctctcatctttcttttgtgttatgtaagattgattattcatttctccctactggtaggaaccatagttgtgtcctatacttgaagaggctggaaagtagcccataaccataattgcagtatttctttgtatttctctgttaagcaaagaaatattaaggaacattttttttatgtttttgtattattccataattagtaaagcaagatgaaatgtcaaattttaatcagttttttcatggatttgtgttcttacagtacttgaaaatatttaaggaagagatgaagctctgcagttttttctatgtgggatgattacttttttaaggaggattaattctgaggtagtatagtaactaaaggggaatatatgaattgtttaacaaattagaatttgtttacaactacttgaatttttaaattatgtcaaaacttacattacttgccaagcagtatgatgttataggaaacataaataagattacagaggtatcaatttggttaaaattcaccattttataagactaagcaataatcttaacaacctctttcctgaatatttaaatgtgtttgtatggtgttatgactaattgttactgatttagagactaagccctcttaaaacctttagttaaatataaaaagaaattatatatatcttgcctccctgatggaaaactatataaaattgtagacttaaaaggtttgtggaaatacattaggatatcagaaaactaaatatatggagttgctttatgactattacatgttaaataaaaatagcttaattgttttgga

SEQ ID NO: 4072 - DNA, 5361 bp, Homo sapiens
  source 1..5361: mol_type = unassigned DNA
gaccggtgctagcgacacgggagtggcaaacgcatcctcttgccgttcccggtgtttgggccttgcctgtgacggtgggaaaagaaaatggccttgctgtgctacaaccggggctgcggtcagcgcttcgatcctgagaccaattccgacgatgcttgcacataccacccaggtgttccggtctttcacgatgcattaaagggttggtcttgctgtaagagaagaacaactgatttttctgatttcttaagcattgtaggctgtacaaaaggtagacataatagtgagaagccacctgagccagtcaaacctgaagtcaagactactgagaagaaggagctatgtgaattaaaacccaaatttcaggaacacatcattcaagcccctaagccagtagaagcaataaaaagaccaaggtatactttatacagttacatatttttgtcacacttgaatagtagcacttgtgcatggtactttcctttatgatttagcatgataccatttgtagctactatgtaggccaccaagctttgaaccatttggtttctcccttaaatctgccttaaatttttatttctcttcaacttgagagcatgtacacaatataactacataacagatttgcatattgtactgtcataattacagggacatgtatcatcagggtagggaagtcacatttttcttgtgccttagagtgcatctttttcactgtggcatggtaaaattctttgaagcagttttccttttcatggcatgagtttgaagtagaaaataatgcagaggcctaatcatccatctttactttcagatgcctgaaaactaccgttaatctcattactactggtcaatttttaatgcatttgatttagatgacatatttgtgaaagtagtcttaaaaaagcgtttgctcattgtgcaatagagttgtacagattcttcatacttgccttctgataaccagactctgtattcccacacatgtatattgagtacctttgttgaaccaggtcttcttcgtgctacacttgagtactaaattgttttagaagcaaactacaggacttaaaaaaaggtgatttttttttttttttttggctgcaagtaggcacttattgtaatttttattcatgctatgaactcatgattttccctttattctcctttgatcctacttaaataaatttatagagtattgaataatatagaaccaagataagaaccctaagagactttagatgtttatttgttcattagcactctgagtacagattattgctaaggaaactactcaggatgattttattctctctccatcttcatagttagaggagaccattgaatgctttggccagtttagcagttagaaaaataattgggaaaagacaaaacttcagtcatggctcattcttaatctctttagtaatataatacagtctgtactataatagtatgagttaattttttctttaaatgatgggctgttattttacttaaagggcagtgagaggccaggcactgtggctcaagcccataatccagcactttgagaagcctaggagggaggatcctttgagcctaggagtttgagaaccaatctgaaagagatcctgtctctccaaaaaaaataaattagctgggtttggtggtgtgctcatgtagttgcagctactcaggctgaggcaggaggatcttgagattgactttttgaaaaaaaaggacaaaggcagtgagatgagaaaaactaaatattttatcctaaattcatttggtggtattataacaattatgaggatatcagtttttacatacttttcttttttttaagaagaaaagtccctctcttacccaggctgtaatgcagtggcattatagctcactgcagcctttaactcctgggctcaagccatcctcctccctaaccctccccggaactataggtgtatgctactatgactgtattagtccattttcacagttacgaagaaacacccgagactaagtgatttataaagaaaaagaggtttaatgaactcacagttccatatggctggggaggcctcacaatcatggcagaaggtagagcgagtaataaaggaatgttttacatggtggcaggcaagaaaaaaaccatcagaacttctgagacttattcactatcatgagaacagcatgggaaaaaggcatccccatgatccagttacctcccactaggtctgtcacacaccatgtggagattaggggagctagaattcaagatgagatttggttggtgacacagggaaaccatatcagtgaccgactaatattttttattattttgcggagacagggttccactttgttgcccaggcttcaagcagtcctcttgcctcagcctcccaaagtgttgggattatgggcataagcgaccatgccttgcctatgtacttttaaaatgcctcttttgtcagttttttcatcgaggatatagaatgaatagcctacgatttttatttttattgctgtgtttattaatatgtttaatacttatttattgagtggacttaaattatgtatacaacacttagccattatgaaatgttagaagatgttgttttttaaaccctactgaaattgccttgcaatacgatcgtatctgaatttacagatccatatgccagtgtccacataaattatctccactggtagaagtgagtatggattcacttagaacttacttatatttcatgtttattatgtgctcagcattgagcttgggcatgggatgtaaaagtacattatggtcccttcctcagcattactcatcttgaaaaccttggattcctagtctttattcctttctcgttagtgcaactgattaatacttaaatatgctgacaatagcgtgattatttgagacttactattctaatataaggagcttttctgttaagacagaatgtagatacattgtaacaattatttataaaataccttttaaccttttaatgggaatcatttgatacacaaagcatttggcttctcagaaagcttttaaggttattaatttggagtacaaagaaatattttggtatattaataatggtaataaggtttcaaaattctccagcccagatgaaccaatgacaaatttggaattaaaaatatctgcctccctaaaacaagcacttgataaacttaaactgtcatcagggaatgaagaaaataagaaaggtaagattttattttgttttattgttaattattttctggtacagttaagcagttatccaaaagagagaatagtagtttactgcatataaatagggaaaagtcgcacattgtagttaagaaactttttcttctaaatgtcagatatgataaactacaaatacttcagaacctaataggttaattccatatgtctttattcaaaacgagaacctatattaaattttttttcttttatggttcattatttttttaagaatcagctaaatttctttgatattttaaaatgttttcttgtacattatacaaaatatattcactattctctgactttatacctggtaccatgggaggaaaacaccctttcatgatttattttacaaagttaagatactggatataacattttgttatggaaaaaattgtgtcctgcattgttgaagacaccaggtcctcaaaagaagaagaaatgtgtcatatatcaatttggggatataagcaaatcctagtcacagtcgttttctaaaaagtattgttttctggaaaaacctagtttttaagaatgatgccacagcgaagttctattttaactttttaatttgatttttttttctttgttacagaagaagacaatgatgaaattaagattgggacctcatgtaagaatggagggtgttcaaagacataccagggtctagagagtctagaagaagtctgtgtatatcattctggagtacctattttccatgaggggatgaaatactggagctgttgtagaagaaaaacttctgattttaatacattcttagcccaagagggctgtacaaaagggaaacacatgtggactaaaaaagatgctgggaaaaaagttgttccatgtagacatgactggcatcagactggaggtgaagttaccatttcagtatatgctaaaaactcacttccagaacttagccgagtagaagcaaatagcacattgttaaatgtgcatattgtatttgaaggagagaaggaatttgatcaaaatgtgaaattatggggtgtgattgatgtaaagcgaagttatgtaactatgactgcaacaaagattgaaatcactatgagaaaagctgaaccgatgcagtgggcaagccttgaactgcctgcagctaaaaagcaggaaaaacaaaaagatgccacaacagattgagtgggagatggaaggaaggctattacattatttccgaatttttaatactgtgtgaagtggtggcttgctgctgtaatcttttgttttgttgttgtgttactgaatgtggcatttcagggttaacattaggttcttaaaagccaaagtcagtttgtctttttgtgcctctcatctttcttttgtgttatgtaagattgattattcatttctccctactggtaggaaccatagttgtgtcctatacttgaagaggctggaaagtagcccataaccataattgcagtatttctttgtatttctctgttaagcaaagaaatattaaggaacattttttttatgtttttgtattattccataattagtaaagcaagatgaaatgtcaaattttaatcagttttttcatggatttgtgttcttacagtacttgaaaatatttaaggaagagatgaagctctgcagttttttctatgtgggatgattacttttttaaggaggattaattctgaggtagtatagtaactaaaggggaatatatgaattgtttaacaaattagaatttgtttacaactacttgaatttttaaattatgtcaaaacttacattacttgccaagcagtatgatgttataggaaacataaataagattacagaggtatcaatttggttaaaattcaccattttataagactaagcaataatcttaacaacctctttcctgaatatttaaatgtgtttgtatggtgttatgactaattgttactgatttagagactaagccctcttaaaacctttagttaaatataaaaagaaattatatatatcttgcctccctgatggaaaactatataaaattgtagacttaaaaggtttgtggaaatacattaggatatcagaaaactaaatatatggagttgctttatgactattacatgttaaataaaaatagcttaattgtt

SEQ ID NO: 4073 - DNA, 2003 bp, Homo sapiens
  source 1..2003: mol_type = unassigned DNA
tagccgcctcagtcgtcagaccggtgctagcgacacgggagtggcaaacgcatcctcttgccgttcccggtgtttgggccttgcctgtgacggtgggaaaagaaaatggccttgctgtgctacaaccggggctgcggtcagcgcttcgatcctgagaccaattccgacgatgcttgcacataccacccaggtgttccggtctttcacgatgcattaaagggctgtacaaaaggtagacataatagtgagaagccacctgagccagtcaaacctgaagtcaagactactgagaagaaggagctatgtgaattaaaacccaaatttcaggaacacatcattcaagcccctaagccagtagaagcaataaaaagaccaagcccagatgaaccaatgacaaatttggaattaaaaatatctgcctccctaaaacaagcacttgataaacttaaactgtcatcagggaatgaagaaaataagaaagaagaagacaatgatgaaattaagattgggacctcatgtaagaatggagggtgttcaaagacataccagggtctagagagtctagaagaagtctgtgtatatcattctggagtacctattttccatgaggggatgaaatactggagctgttgtagaagaaaaacttctgattttaatacattcttagcccaagagggctgtacaaaagggaaacacatgtggactaaaaaagatgctgggaaaaaagttgttccatgtagacatgactggcatcagactggaggtgaagttaccatttcagtatatgctaaaaactcacttccagaacttagccgagtagaagcaaatagcacattgttaaatgtgcatattgtatttgaaggagagaaggaatttgatcaaaatgtgaaattatggggtgtgattgatgtaaagcgaagttatgtaactatgactgcaacaaagattgaaatcactatgagaaaagctgaaccgatgcagtgggcaagccttgaactgcctgcagctaaaaagcaggaaaaacaaaaagatgccacaacagattgagtgggagatggaaggaaggctattacattatttccgaatttttaatactgtgtgaagtggtggcttgctgctgtaatcttttgttttgttgttgtgttactgaatgtggcatttcagggttaacattaggttcttaaaagccaaagtcagtttgtctttttgtgcctctcatctttcttttgtgttatgtaagattgattattcatttctccctactggtaggaaccatagttgtgtcctatacttgaagaggctggaaagtagcccataaccataattgcagtatttctttgtatttctctgttaagcaaagaaatattaaggaacattttttttatgtttttgtattattccataattagtaaagcaagatgaaatgtcaaattttaatcagttttttcatggatttgtgttcttacagtacttgaaaatatttaaggaagagatgaagctctgcagttttttctatgtgggatgattacttttttaaggaggattaattctgaggtagtatagtaactaaaggggaatatatgaattgtttaacaaattagaatttgtttacaactacttgaatttttaaattatgtcaaaacttacattacttgccaagcagtatgatgttataggaaacataaataagattacagaggtatcaatttggttaaaattcaccattttataagactaagcaataatcttaacaacctctttcctgaatatttaaatgtgtttgtatggtgttatgactaattgttactgatttagagactaagccctcttaaaacctttagttaaatataaaaagaaattatatatatcttgcctccctgatggaaaactatataaaattgtagacttaaaaggtttgtggaaatacattaggatatcagaaaactaaatatatggagttgctttatgactattacatgttaaataaaaatagcttaattgtt

SEQ ID NO: 4074 - DNA, 4805 bp, Homo sapiens
  source 1..4805: mol_type = unassigned DNA
agtgcgtgtagaatgaatgatagaatttgaaagtacagaaagtacagatggttccgaacttaccatggtgtaacttaagatttttttgacttaacaatggtattatcaggctataaccacattgtaagcaaaggagcatctgcctgtattagcaggatttgctaatggattcgatgtgaagggaattcaagcatctgggtgattggtgacaccattaaccaacaaggtgaaaatggggtgggggcaggtttatactttttcctcatgttaaattttagatcacttaaggaatggagatacaattgtatttacatgtatatgaggtagaagtagtagataaaagggaattagtaattactggattggggaaggcagtgcaaatggtagggtaatagaggaagatcaaggagaaggtatcagatgtgttttgaaaagtgaatgacagggaaaacagagaaagggtatttcaagcgtaagtaatagcacaagtatagagaaaattatgtaatggtacaaatttgctgctgtggaattgagattaatagagataagtagacctggccagatcctaaaagggtttagtgatgcagggaagttagattgtacgttagagtgtggaggccattgaaattgaagaattttttagtctttttcattgaaatataacattgaagtttgttaaaggatatacaaatataaatttgtagctcaagggattttcacaaaattaaacacaccagcaatgcagagcactccttatgtgttttctcattcattatcttcctcaaatgtttttctgtcagtcaacatatgttttttctgtttctgagtttaatgtaaaaataaccatagaatatgtacttgtttttgtcgtcttctgcataataatgcttgttttatttatctttgttgcatgtagctttagttttgtttttttatttctttaaggtatgtcattatttgaatgtgccacaactaatttctactttatattgtcctttaattttaaaaaattgtttttaataatgctattatgaacattctttttgagatggagtttcactcttgtaacccaccctggagtacaatggtaggctctcggctcactacaacctccgcctcccgggttcaagcgattcttctgtttcagcctcctgagtagctgggtttacaggtgcccaccacgcctgactaatttttgtatttttactagagacaaggtttcaccatgttggccaggctggtctcaaactcctgaacctcaggtgatccacccgcctcggcctcccaaagtgctggaattacaggcgtgaagccaccgcagccggcctattatgaacattcttgtgcatgacttttgtgacacatatacacatttccatttctagtattttggatttttttttttaaattttggcatatgtgcattatacttatcagttagttcagcatccctaatctgaaatgctccaatgagcattttctttaactgtcatgttggctctcaaaaagttaacagatttttggagcatttgagattttggattaggtatgcccacctgtatatctttagcattaacagatacttccacatagttttccaaggtggttgtatttgtttacgtttctaccagcagtatgtgaggctagttcaacttgtcctatggtttcttaacattttgttatacgagttttttttgtttttttttttttttttgtattttaaccattctagtgtgtgtatagtgttttgtcatggttttgatttgtacttccctaatgatgactgcttttttgtatgtttattagccatttgtatatcctcttgtgaagtgtgcagaatcttttacctatctctaatgtctcttgcttaccagtttgtaagaattctttatatattttagctgtgactcttatcagaaattctatgctttttcactgtcttaatgacgactttgataaactttttatcaaattgctttttaacaaaatccaatttgtccatcattttgtttatgactagtgctttccatgttctatttaagaaatcgttgcttacttcagggctgtgagtgttttctcatatggaggcacatttaaatatgtaaatgacctggaactgattattgtataaggtgtgacatggatgtaattaaagaactttaaacaaaagggtgatagtaatttgataattagtagaaaatagaagtcgaaggctgagaaatagtagaaacctgttagtatagtctgattgcttaaaatctgctagcttatgaggaagattaacaaattaatatattcaagtcaaattgatgagatttcattatagactgcctatgggtggagggagaggagatgctgaagaggaacgaatggattttgctttgagaaactgagtctgtacggtgccatcaaataatatggggaaaagaatggactgtgggggcaatagcattaagtttagtagatgctaacatactgagttttatgttcttgtgaaatatcttaaggagaaatacacatctaatactgtactttggatttataaaagataaacacagaattttattttctgtttgtaggtagtgctataaatacaaaaatagaaaatatactactggctacatccatgttttattaacataattttttgtgaattcatctgtagagcctccatctacagcagcaatggggcccggatcttccagacaaaccctggatatatatataggtctgcagctcattttaccctttatagggataagaaatcaccatcactctagaacttccagaattgcttattagatttctcatattatttgacaatacttacatggagtttactgtacacataagtcatgcagtaactgtatttttattgagagtattaatcccttggtttcaacattgtttttgaaattagtaactaagtaagtacttgaatatgattggatgggatctcatactcaaaaggctgaaagcatcttaatatgactttctcaaaggaacctaaaacttaaccaagtccaaaagggaatcatttttcattttttaacagaatggcgtgggatggatttatgaattttctaggtaattgtcatttaagtattttgcaaagttcgtagaggtcaccaatactgcaaatatgtatgagatgtaactgtaagatacgcagctaattttttttctctttgtttcctttttagacataccagggtctagagagtctagaagaagtctgtgtatatcattctggagtacctattttccatgaggggtaacttatgcatgacttattaaaatagtttatggtagaatttagaaagttaaacctttctgtctttaaacattgtttgccatgcagtgttattaggcattttacttacattgccattaacatcttcacaatagcctacacaaacacaggggtttgtatgttgtgtgtttatacatgagaaaacagaaacaaggttacagttcttaagtggtcattgtgatataaactgcctgtttttcttcatattctgtatttaaaagtgatgctatttgggctaaatgttttgtttgaaggactgtcctacacattgcagggcatttagaattttgggccctggggcactaagacaacattatcccaagacgacccatacttttccgcatcctgcagttgagagcctctcttctgtattatgctctagtttatagaaatgcagcactgtgtaaaaatcttccactctgtttccacattcttcctgatatactgtacattcatttttagtaacttagacacttgtaaaatgctagagtttgtacacttactggcttattaaaaatcagatttatccctaaaatacttgtggatttaattggttgtgagattttatttctgaagtttttctgtgataatttaaaggatgaaatactggagctgttgtagaagaaaaacttctgattttaatacattcttagcccaagagggctgtacaaaagggaaacacatgtggactaaaaaagatgctgggaaaaaagttgttccatgtagacatgactggcatcagactggaggtgaagttaccatttcagtatatgctaaaaactcacttccagaacttagccgagtagaagcaaatagcacattgttaaatgtgcatattgtatttgaaggagagaaggaatttgatcaaaatgtgaaattatggggtgtgattgatgtaaagcgaagttatgtaactatgactgcaacaaagattgaaatcactatgagaaaagctgaaccgatgcagtgggcaagccttgaactgcctgcagctaaaaagcaggaaaaacaaaaagatgccacaacagattgagtgggagatggaaggaaggctattacattatttccgaatttttaatactgtgtgaagtggtggcttgctgctgtaatcttttgttttgttgttgtgttactgaatgtggcatttcagggttaacattaggttcttaaaagccaaagtcagtttgtctttttgtgcctctcatctttcttttgtgttatgtaagattgattattcatttctccctactggtaggaaccatagttgtgtcctatacttgaagaggctggaaagtagcccataaccataattgcagtatttctttgtatttctctgttaagcaaagaaatattaaggaacattttttttatgtttttgtattattccataattagtaaagcaagatgaaatgtcaaattttaatcagttttttcatggatttgtgttcttacagtacttgaaaatatttaaggaagagatgaagctctg

SEQ ID NO: 4075 - DNA, 1136 bp, Homo sapiens
  source 1..1136: mol_type = unassigned DNA
gcgacacgggagtggcaaacgcatcctcttgccgttcccggtgtttgggccttgcctgtgacggtgggaaaagaaaatggccttgctgtgctacaaccggggctgcggtcagcgcttcgatcctgagaccaattccgacgatgcttgcacataccacccaggtgttccggtctttcacgatgcattaaagggttggtcttgctgtaagagaagaacaactgatttttctgatttcttaagcattgtaggctgtacaaaaggtagacataatagtgagaagccacctgagccagtcaaacctgaagtcaagactactgagaagaaggagctatgtgaattaaaacccaaatttcaggaacacatcattcaagcccctaagccagtagaagcaataaaaagaccaagcccagatgaaccaatgacaaatttggaattaaaaatatctgcctccctaaaacaagcacttgataaacttaaactgtcatcagggaatgaagaaaataagaaagaagaagacaatgatgaaattaagattgggacctcatgtaagaatggagggtgttcaaagagcctccatctacagcagcaatggggcccggatcttccagacaaaccctggatatatatatagacataccagggtctagagagtctagaagaagtctgtgtatatcattctggagtacctattttccatgaggggatgaaatactggagctgttgtagaagaaaaacttctgattttaatacattcttagcccaagagggctgtacaaaagggaaacacatgtggactaaaaaagatgctgggaaaaaagttgttccatgtagacatgactggcatcagactggaggtgaagttaccatttcagtatatgctaaaaactcacttccagaacttagccgagtagaagcaaatagcacattgttaaatgtgcatattgtatttgaaggagagaaggaatttgatcaaaatgtgaaattatggggtgtgattgatgtaaagcgaagttatgtaactatgactgcaacaaagattgaaatcactatgagaaaagctgaaccgatgcagtgggcaagccttgaactgcctgcagctaaaaagcaggaaaaacaaaaagatgccacaacagatt

SEQ ID NO: 4076 - DNA, 566 bp, Homo sapiens
  source 1..566: mol_type = unassigned DNA
agtcgtcagaccggtgctagcgacacgggagtggcaaacgcatcctcttgccgttcccggtgtttgggccttgcctgtgacggtgggaaaagaaaatggccttgctgtgctacaaccggggctgcggtcagcgcttcgatcctgagaccaattccgacgatgcttgcacataccacccaggtgttccggtctttcacgatgcattaaagggttggtcttgctgtaagagaagaacaactgatttttctgatttcttaagcattgtaggctgtacaaaaggtagacataatagtgagaagccacctgagccagtcaaacctgaagtcaagactactgagaagaaggagctatgtgaattaaaacccaaatttcaggaacacatcattcaagcccctaagccagtagaagcaataaaaagaccaaggtttcaaaattctccagcccagatgaaccaatgacaaatttggaattaaaaatatctgcctccctaaaacaagcacttgataaacttaaactgtcatcagggaatgaagaaaataagaaagaagacaatgatgaaattaaga

SEQ ID NO: 4077 - DNA, 564 bp, Homo sapiens
  source 1..564: mol_type = unassigned DNA
atcgtttccggaagccggtagccgcctcagtcgtcagaccggtgctagcgacacgggagtggcaaacgcatcctcttgccgttcccggtgtttgggccttgcctgtgacggtgggaaaagaaaatggccttgctgtgctacaaccggggctgcggtcagcgcttcgatcctgagaccaattccgacgatgcttgcacataccacccaggtgttccggtctttcacgatgcattaaagggttggtcttgctgtaagagaagaacaactgatttttctgatttcttaagcattgtaggctgtacaaaaggtagacataatagtgagaagccacctgagccagtcaaacctgaagtcaagactactgagaagaaggagctatgtgaattaaaacccaaatttcaggaacacatcattcaagcccctaagccagtagaagcaataaaaagaccaaggtcttcttcgtgctacacttgagtactaaattgttttagaagcaaactacaggacttaaaaaaaggtgatttttttttttttttttggctgcaagtaggcacttattgtaat

SEQ ID NO: 4078 - DNA, 575 bp, Homo sapiens
  source 1..575: mol_type = unassigned DNA
tccggaagccggtagccgcctcagtcgtcagaccggtgctagcgacacgggagtggcaaacgcatcctcttgccgttcccggtgtttgggccttgcctgtgacggtgggaaaagaaaatggccttgctgtgctacaaccggggctgcggtcagcgcttcgatcctgagaccaattccgacgatgcttgcacataccacccaggtgttccggtctttcacgatgcattaaagtcctagactttccaagattattggatttcacagtccagaagatttcagacaaaatgcgtatacatcaatacagggatactagttgaccaaggttggtcttgctgtaagagaagaacaactgatttttctgatttcttaagcattgtaggctgtacaaaaggtagacataatagtgagaagccacctgagccagtcaaacctgaagtcaagactactgagaagaaggagctatgtgaattaaaacccaaatttcaggaacacatcattcaagcccctaagccagtagaagcaataaaaagaccaaggtatactttatacagttacatatttttgtcacacttgaa

SEQ ID NO: 4079 - DNA, 809 bp, Homo sapiens
  source 1..809: mol_type = unassigned DNA
ttccggaagccggtagccgcctcagtcgtcagaccggtgctagcgacacgggagtggcaaacgcatcctcttgccgttcccggtgtttgggccttgcctgtgacggtgggaaaagaaaatggccttgctgtgctacaaccggggctgcggtcagcgcttcgatcctgagaccaattccgacggtaagaggaacgcgccgccagccctccctcccctccacctcatcagcaggggaggccctttgggccggagggtgtccgcggatctcctgcagccgtcctcgcgcggccccaggtccatgcccctcctgggcctcccttggctgcccgcgcagcccgccggccgcccctctgttgcgccgcgttcccttggcgagcgcccggccccggcgcctgactgtcctctgccactgcggagagagacgctcccatggatccacgtgtttcccccgtcgtccccgcactccttttaagtcgcctggaatttagaacgaacacgtttctcctctggccctccagtctctggggaagcaaaaattaacgagatgcttgcacataccacccaggtgttccggtctttcacgatgcattaaagggttggtcttgctgtaagagaagaacaactgatttttctgatttcttaagcattgtaggctgtacaaaaggtagacataatagtgagaagccacctgagccagtcaaacctgaagtcaagactactgagaagaaggagctatgtgaattaaaacccaaatttcaggaacacatcattcaagcccctaagccagtagaagcaataaaaagaccaag

SEQ ID NO: 4080 - DNA, 582 bp, Homo sapiens
  source 1..582: mol_type = unassigned DNA
gctagcgacacgggagtggcaaacgcatcctcttgccgttcccggtgtttgggccttgcctgtgacggtgggaaaagaaaatggccttgctgtgctacaaccggggctgcggtcagcgcttcgatcctgagaccaattccgacgatgcttgcacataccacccaggtgttccggtctttcacgatgcattaaaggtaggaactatattttcatttttttcatatctgtgtagtaaattgagagatgtaatactaaatctttattttctcatctttttttctcagctagtgactttcttcttaatgacctttgcgggggaggtgctttaagcgtatactccactaaagacaaagaaaagacagtagatgatgatcttaaggtcttttccagttataaaattgtattttaattctgggtttttttttttttttttgagatggagtttcactgtgttgcccaggtggagtgcagtggtgcgatctcagctcactgcaacgtccgcctcctgggttcaagcgattctgcctcagcctcctgaggagccgggattacaggcacctgccaccatgcccagctaatttt

SEQ ID NO: 4081 - DNA, 1252 bp, Homo sapiens
  source 1..1252: mol_type = unassigned DNA
cccgggtcagcgcccgcccgcccgcgctcctcccggccgctcctcccgccccgcccggcccggcgccgactctgcggccgcccgacgagcccctcgcggcactgccccggccccggccccggccccggccccctcccgccgcaccgcccccggcccggccctccgccctccgcactcccgcctccctccctccgcccgctcccgcgccctcctccctccctcctccccagctgtcccgttcgcgtcatgccgagcctcccggccccgccggccccgctgctgctcctcgggctgctgctgctcggctcccggccggcccgcggcgccggcccagagccccccgtgctgcccatccgttctgagaaggagccgctgcccgttcggggagcggcaggctgcaccttcggcgggaaggtctatgccttggacgagacgtggcacccggacctaggggagccattcggggtgatgcgctgcgtgctgtgcgcctgcgaggcgggaccttgaggcccagagagatgaagtagcttgtctagggtcacgcagcttcctcagtggggtcgccgtaccaggggccctggcagggtcagctgcaagaacatcaaaccagagtgcccaaccccggcctgtgggcagccgcgccagctgccgggacactgctgccagacctgcccccaggagcgcagcagttcggagcggcagccgagcggcctgtccttcgagtatccgcgggacccggagcatcgcagttatagcgaccgcggggagccaggcgctgaggagcgggcccgtggtgacggccacacggacttcgtggcgctgctgacagggccgaggtcgcaggcggtggcacgagcccgagtctcgctgctgcgctctagcctccgcttctctatctcctacaggcggctggaccgccctaccaggatccgcttctcagactccaatggcagtgtcctgtttgagcaccctgcagcccccacccaagatggcctggtctgtggggtgtggcgggcagtgcctcggttgtctctgcggctccttagggcagaacagctgcatgtggcacttgtgacactcactcacccttcaggggaggtctgggggcctctcatccggcaccgggccctggctgcagagaccttcagtgccatcctgactctagaaggccccccacagcagggcgtagggggcatcaccctgctcactctcagtgacacagaggactccttgcattttttgctgctcttcc

SEQ ID NO: 4082 - DNA, 3521 bp, Homo sapiens
  source 1..3521: mol_type = unassigned DNA
cccgggtcagcgcccgcccgcccgcgctcctcccggccgctcctcccgccccgcccggcccggcgccgactctgcggccgcccgacgagcccctcgcggcactgccccggccccggccccggccccggccccctcccgccgcaccgcccccggcccggccctccgccctccgcactcccgcctccctccctccgcccgctcccgcgccctcctccctccctcctccccagctgtcccgttcgcgtcatgccgagcctcccggccccgccggccccgctgctgctcctcgggctgctgctgctcggctcccggccggcccgcggcgccggcccagagccccccgtgctgcccatccgttctgagaaggagccgctgcccgttcggggagcggcaggctgcaccttcggcgggaaggtctatgccttggacgagacgtggcacccggacctaggggagccattcggggtgatgcgctgcgtgctgtgcgcctgcgaggcgcctcagtggggtcgccgtaccaggggccctggcagggtcagctgcaagaacatcaaaccagagtgcccaaccccggcctgtgggcagccgcgccagctgccgggacactgctgccagacctgcccccaggagcgcagcagttcggagcggcagccgagcggcctgtccttcgagtatccgcgggacccggagcatcgcagttatagcgaccgcggggagccaggcgctgaggagcgggcccgtggtgacggccacacggacttcgtggcgctgctgacagggccgaggtcgcaggcggtggcacgagcccgagtctcgctgctgcgctctagcctccgcttctctatctcctacaggcggctggaccgccctaccaggatccgcttctcagactccaatggcagtgtcctgtttgagcaccctgcagcccccacccaagatggcctggtctgtggggtgtggcgggcagtgcctcggttgtctctgcggctccttagggcagaacagctgcatgtggcacttgtgacactcactcacccttcaggggaggtctgggggcctctcatccggcaccgggccctggctgcagagaccttcagtgccatcctgactctagaaggccccccacagcagggcgtagggggcatcaccctgctcactctcagtgacacagaggactccttgcattttttgctgctcttccgagggctgctggaacccaggagtgggggactaacccaggttcccttgaggctccagattctacaccaggggcagctactgcgagaacttcaggccaatgtctcagcccaggaaccaggctttgctgaggtgctgcccaacctgacagtccaggagatggactggctggtgctgggggagctgcagatggccctggagtgggcaggcaggccagggctgcgcatcagtggacacattgctgccaggaagagctgcgacgtcctgcaaagtgtcctttgtggggctgatgccctgatcccagtccagacgggtgctgccggctcagccagcctcacgctgctaggaaatggctccctgatctatcaggtgcaagtggtagggacaagcagtgaggtggtggccatgacactggagaccaagcctcagcggagggatcagcgcactgtcctgtgccacatggctggactccagccaggaggacacacggccgtgggtatctgccctgggctgggtgcccgaggggctcatatgctgctgcagaatgagctcttcctgaacgtgggcaccaaggacttcccagacggagagcttcgggggcacgtggctgccctgccctactgtgggcatagcgcccgccatgacacgctgcccgtgcccctagcaggagccctggtgctaccccctgtgaagagccaagcagcagggcacgcctggctttccttggatacccactgtcacctgcactatgaagtgctgctggctgggcttggtggctcagaacaaggcactgtcactgcccacctccttgggcctcctggaacgccagggcctcggcggctgctgaagggattctatggctcagaggcccagggtgtggtgaaggacctggagccggaactgctgcggcacctggcaaaaggcatggcctccctgatgatcaccaccaagggtagccccagaggggagctccgagggcaggtgcacatagccaaccaatgtgaggttggcggactgcgcctggaggcggccggggccgagggggtgcgggcgctgggggctccggatacagcctctgctgcgccgcctgtggtgcctggtctcccggccctagcgcccgccaaacctggtggtcctgggcggccccgagaccccaacacatgcttcttcgaggggcagcagcgcccccacggggctcgctgggcgcccaactacgacccgctctgctcactctgcacctgccagagacgaacggtgatctgtgacccggtggtgtgcccaccgcccagctgcccacacccggtgcaggctcccgaccagtgctgccctgtttgccctgagaaacaagatgtcagagacttgccagggctgccaaggagccgggacccaggagagggctgctattttgatggtgaccggagctggcgggcagcgggtacgcggtggcaccccgttgtgcccccctttggcttaattaagtgtgctgtctgcacctgcaaggggggcactggagaggtgcactgtgagaaggtgcagtgtccccggctggcctgtgcccagcctgtgcgtgtcaaccccaccgactgctgcaaacagtgtccagtggggtcgggggcccacccccagctgggggaccccatgcaggctgatgggccccggggctgccgttttgctgggcagtggttcccagagagtcagagctggcacccctcagtgcccccttttggagagatgagctgtatcacctgcagatgtggggcaggggtgcctcactgtgagcgggatgactgttcactgccactgtcctgtggctcggggaaggagagtcgatgctgttcccgctgcacggcccaccggcggccagccccagagaccagaactgatccagagctggagaaagaagccgaaggctcttagggagcagccagagggccaagtgaccaagaggatggggcctgagctggggaaggggtggcatcgaggaccttcttgcattctcctgtgggaagcccagtgcctttgctcctctgtcctgcctctactcccacccccactacctctgggaaccacagctccacaagggggagaggcagctgggccagaccgaggtcacagccactccaagtcctgccctgccaccctcggcctctgtcctggaagccccacccctttcctcctgtacataatgtcactggcttgttgggatttttaatttatcttcactcagcaccaagggcccccgacactccactcctgctgcccctgagctgagcagagtcattattggagagttttgtatttattaaaacatttctttttcagtc

SEQ ID NO: 4083 - DNA, 3547 bp, Homo sapiens
  source 1..3547: mol_type = unassigned DNA
cccgggtcagcgcccgcccgcccgcgctcctcccggccgctcctcccgccccgcccggcccggcgccgactctgcggccgcccgacgagcccctcgcggcactgccccggccccggccccggccccggccccctcccgccgcaccgcccccggcccggccctccgccctccgcactcccgcctccctccctccgcccgctcccgcgccctcctccctccctcctccccagctgtcccgttcgcgtcatgccgagcctcccggccccgccggccccgctgctgctcctcgggctgctgctgctcggctcccggccggcccgcggcgccggcccagagccccccgtgctgcccatccgttctgagaaggagccgctgcccgttcggggagcggcaggctgcaccttcggcgggaaggtctatgccttggacgagacgtggcacccggacctaggggagccattcggggtgatgcgctgcgtgctgtgcgcctgcgaggcgacagggaccttgaggcccagagagatgaagtagcttgtctagggtcacgcagcttcctcagtggggtcgccgtaccaggggccctggcagggtcagctgcaagaacatcaaaccagagtgcccaaccccggcctgtgggcagccgcgccagctgccgggacactgctgccagacctgcccccaggagcgcagcagttcggagcggcagccgagcggcctgtccttcgagtatccgcgggacccggagcatcgcagttatagcgaccgcggggagccaggcgctgaggagcgggcccgtggtgacggccacacggacttcgtggcgctgctgacagggccgaggtcgcaggcggtggcacgagcccgagtctcgctgctgcgctctagcctccgcttctctatctcctacaggcggctggaccgccctaccaggatccgcttctcagactccaatggcagtgtcctgtttgagcaccctgcagcccccacccaagatggcctggtctgtggggtgtggcgggcagtgcctcggttgtctctgcggctccttagggcagaacagctgcatgtggcacttgtgacactcactcacccttcaggggaggtctgggggcctctcatccggcaccgggccctggctgcagagaccttcagtgccatcctgactctagaaggccccccacagcagggcgtagggggcatcaccctgctcactctcagtgacacagaggactccttgcattttttgctgctcttccgagggctgctggaacccaggagtggggattctacaccaggggcagctactgcgagaacttcaggccaatgtctcagcccaggaaccaggctttgctgaggtgctgcccaacctgacagtccaggagatggactggctggtgctgggggagctgcagatggccctggagtgggcaggcaggccagggctgcgcatcagtggacacattgctgccaggaagagctgcgacgtcctgcaaagtgtcctttgtggggctgatgccctgatcccagtccagacgggtgctgccggctcagccagcctcacgctgctaggaaatggctccctgatctatcaggtgcaagtggtagggacaagcagtgaggtggtggccatgacactggagaccaagcctcagcggagggatcagcgcactgtcctgtgccacatggctggactccagccaggaggacacacggccgtgggtatctgccctgggctgggtgcccgaggggctcatatgctgctgcagaatgagctcttcctgaacgtgggcaccaaggacttcccagacggagagcttcgggggcacgtggctgccctgccctactgtgggcatagcgcccgccatgacacgctgcccgtgcccctagcaggagccctggtgctaccccctgtgaagagccaagcagcagggcacgcctggctttccttggatacccactgtcacctgcactatgaagtgctgctggctgggcttggtggctcagaacaaggcactgtcactgcccacctccttgggcctcctggaacgccagggcctcggcggctgctgaagggattctatggctcagaggcccagggtgtggtgaaggacctggagccggaactgctgcggcacctggcaaaaggcatggcctccctgatgatcaccaccaagggtagccccagaggggagctccgagggcaggtgcacatagccaaccaatgtgaggttggcggactgcgcctggaggcggccggggccgagggggtgcgggcgctgggggctccggatacagcctctgctgcgccgcctgtggtgcctggtctcccggccctagcgcccgccaaacctggtggtcctgggcggccccgagaccccaacacatgcttcttcgaggggcagcagcgcccccacggggctcgctgggcgcccaactacgacccgctctgctcactctgcacctgccagagacgaacggtgatctgtgacccggtggtgtgcccaccgcccagctgcccacacccggtgcaggctcccgaccagtgctgccctgtttgccctgagaaacaagatgtcagagacttgccagggctgccaaggagccgggacccaggagagggctgctattttgatggtgaccggagctggcgggcagcgggtacgcggtggcaccccgttgtgcccccctttggcttaattaagtgtgctgtctgcacctgcaaggggggcactggagaggtgcactgtgagaaggtgcagtgtccccggctggcctgtgcccagcctgtgcgtgtcaaccccaccgactgctgcaaacagtgtccagtggggtcgggggcccacccccagctgggggaccccatgcaggctgatgggccccggggctgccgttttgctgggcagtggttcccagagagtcagagctggcacccctcagtgcccccttttggagagatgagctgtatcacctgcagatgtggggcaggggtgcctcactgtgagcgggatgactgttcactgccactgtcctgtggctcggggaaggagagtcgatgctgttcccgctgcacggcccaccggcggccagccccagagaccagaactgatccagagctggagaaagaagccgaaggctcttagggagcagccagagggccaagtgaccaagaggatggggcctgagctggggaaggggtggcatcgaggaccttcttgcattctcctgtgggaagcccagtgcctttgctcctctgtcctgcctctactcccacccccactacctctgggaaccacagctccacaagggggagaggcagctgggccagaccgaggtcacagccactccaagtcctgccctgccaccctcggcctctgtcctggaagccccacccctttcctcctgtacataatgtcactggcttgttgggatttttaatttatcttcactcagcaccaagggcccccgacactccactcctgctgcccctgagctgagcagagtcattattggagagttttgtatttattaaaacatttctttttcagtc

SEQ ID NO: 4084 - DNA, 3492 bp, Homo sapiens
  source 1..3492: mol_type = unassigned DNA
cccgggtcagcgcccgcccgcccgcgctcctcccggccgctcctcccgccccgcccggcccggcgccgactctgcggccgcccgacgagcccctcgcggcactgccccggccccggccccggccccggccccctcccgccgcaccgcccccggcccggccctccgccctccgcactcccgcctccctccctccgcccgctcccgcgccctcctccctccctcctccccagctgtcccgttcgcgtcatgccgagcctcccggccccgccggccccgctgctgctcctcgggctgctgctgctcggctcccggccggcccgcggcgccggcccagagccccccgtgctgcccatccgttctgagaaggagccgctgcccgttcggggagcggcaggctgcaccttcggcgggaaggtctatgccttggacgagacgtggcacccggacctaggggagccattcggggtgatgcgctgcgtgctgtgcgcctgcgaggcgcctcagtggggtcgccgtaccaggggccctggcagggtcagctgcaagaacatcaaaccagagtgcccaaccccggcctgtgggcagccgcgccagctgccgggacactgctgccagacctgcccccaggagcgcagcagttcggagcggcagccgagcggcctgtccttcgagtatccgcgggacccggagcatcgcagttatagcgaccgcggggagccaggcgctgaggagcgggcccgtggtgacggccacacggacttcgtggcgctgctgacagggccgaggtcgcaggcggtggcacgagcccgagtctcgctgctgcgctctagcctccgcttctctatctcctacaggcggctggaccgccctaccaggatccgcttctcagactccaatggcagtgtcctgtttgagcaccctgcagcccccacccaagatggcctggtctgtggggtgtggcgggcagtgcctcggttgtctctgcggctccttagggcagaacagctgcatgtggcacttgtgacactcactcacccttcaggggaggtctgggggcctctcatccggcaccgggccctggctgcagagaccttcagtgccatcctgactctagaaggccccccacagcagggcgtagggggcatcaccctgctcactctcagtgacacagaggactccttgcattttttgctgctcttccgagggctgctggaacccaggagtggggattctacaccaggggcagctactgcgagaacttcaggccaatgtctcagcccaggaaccaggctttgctgaggtgctgcccaacctgacagtccaggagatggactggctggtgctgggggagctgcagatggccctggagtgggcaggcaggccagggctgcgcatcagtggacacattgctgccaggaagagctgcgacgtcctgcaaagtgtcctttgtggggctgatgccctgatcccagtccagacgggtgctgccggctcagccagcctcacgctgctaggaaatggctccctgatctatcaggtgcaagtggtagggacaagcagtgaggtggtggccatgacactggagaccaagcctcagcggagggatcagcgcactgtcctgtgccacatggctggactccagccaggaggacacacggccgtgggtatctgccctgggctgggtgcccgaggggctcatatgctgctgcagaatgagctcttcctgaacgtgggcaccaaggacttcccagacggagagcttcgggggcacgtggctgccctgccctactgtgggcatagcgcccgccatgacacgctgcccgtgcccctagcaggagccctggtgctaccccctgtgaagagccaagcagcagggcacgcctggctttccttggatacccactgtcacctgcactatgaagtgctgctggctgggcttggtggctcagaacaaggcactgtcactgcccacctccttgggcctcctggaacgccagggcctcggcggctgctgaagggattctatggctcagaggcccagggtgtggtgaaggacctggagccggaactgctgcggcacctggcaaaaggcatggcctccctgatgatcaccaccaagggtagccccagaggggagctccgagggcaggtgcacatagccaaccaatgtgaggttggcggactgcgcctggaggcggccggggccgagggggtgcgggcgctgggggctccggatacagcctctgctgcgccgcctgtggtgcctggtctcccggccctagcgcccgccaaacctggtggtcctgggcggccccgagaccccaacacatgcttcttcgaggggcagcagcgcccccacggggctcgctgggcgcccaactacgacccgctctgctcactctgcacctgccagagacgaacggtgatctgtgacccggtggtgtgcccaccgcccagctgcccacacccggtgcaggctcccgaccagtgctgccctgtttgccctgagaaacaagatgtcagagacttgccagggctgccaaggagccgggacccaggagagggctgctattttgatggtgaccggagctggcgggcagcgggtacgcggtggcaccccgttgtgcccccctttggcttaattaagtgtgctgtctgcacctgcaaggggggcactggagaggtgcactgtgagaaggtgcagtgtccccggctggcctgtgcccagcctgtgcgtgtcaaccccaccgactgctgcaaacagtgtccagtggggtcgggggcccacccccagctgggggaccccatgcaggctgatgggccccggggctgccgttttgctgggcagtggttcccagagagtcagagctggcacccctcagtgcccccttttggagagatgagctgtatcacctgcagatgtggggcaggggtgcctcactgtgagcgggatgactgttcactgccactgtcctgtggctcggggaaggagagtcgatgctgttcccgctgcacggcccaccggcggccagccccagagaccagaactgatccagagctggagaaagaagccgaaggctcttagggagcagccagagggccaagtgaccaagaggatggggcctgagctggggaaggggtggcatcgaggaccttcttgcattctcctgtgggaagcccagtgcctttgctcctctgtcctgcctctactcccacccccactacctctgggaaccacagctccacaagggggagaggcagctgggccagaccgaggtcacagccactccaagtcctgccctgccaccctcggcctctgtcctggaagccccacccctttcctcctgtacataatgtcactggcttgttgggatttttaatttatcttcactcagcaccaagggcccccgacactccactcctgctgcccctgagctgagcagagtcattattggagagttttgtatttattaaaacatttctttttcagtc

SEQ ID NO: 4085 - DNA, 4719 bp, Homo sapiens
  source 1..4719: mol_type = unassigned DNA
cccgggtcagcgcccgcccgcccgcgctcctcccggccgctcctcccgccccgcccggcccggcgccgactctgcggccgcccgacgagcccctcgcggcactgccccggccccggccccggccccggccccctcccgccgcaccgcccccggcccggccctccgccctccgcactcccgcctccctccctccgcccgctcccgcgccctcctccctccctcctccccagctgtcccgttcgcgtcatgccgagcctcccggccccgccggccccgctgctgctcctcgggctgctgctgctcggctcccggccggcccgcggcgccggcccagagccccccgtgctgcccatccgttctgagaaggagccgctgcccgttcggggagcggcaggctgcaccttcggcgggaaggtctatgccttggacgagacgtggcacccggacctaggggagccattcggggtgatgcgctgcgtgctgtgcgcctgcgaggcgcctcagtggggtcgccgtaccaggggccctggcagggtcagctgcaagaacatcaaaccagagtgcccaaccccggcctgtgggcagccgcgccagctgccgggacactgctgccagacctgcccccaggagcgcagcagttcggagcggcagccgagcggcctgtccttcgagtatccgcgggacccggagcatcgcagttatagcgaccgcggggagccaggcgctgaggagcgggcccgtggtgacggccacacggacttcgtggcgctgctgacagggccgaggtcgcaggcggtggcacgagcccgagtctcgctgctgcgctctagcctccgcttctctatctcctacaggcggctggaccgccctaccaggatccgcttctcagactccaatggcagtgtcctgtttgagcaccctgcagcccccacccaagatggcctggtgagatgatgccatttatgagcacttgcccagtctgggcactgtgccgagagcatgctctgcattgcctcccgtggtcctcaccacagcccagtgggaggaaggcactgacattatgatgcccattttacagaagggggaactgaggctcagtaggataatgtgatttgttcaaggtcacacagctagtaagtggtgcagccaggattggaacccaagcatctggctccagcgttctttcttaagcttcctagggcaccctggaggttcctttccatgttcctttttcataagccctgcctgggcatcctaattggcctagcctgcacagtgtctgagcgtagggccttcttgtctctctgctccaggtctgtggggtgtggcgggcagtgcctcggttgtctctgcggctccttagggcagaacagctgcatgtggcacttgtgacactcactcacccttcaggggaggtctgggggcctctcatccggcaccgggccctggctgcaggtagggagcaaagagccccgggcgtgaagttctgagtcttctctatcacccaggaaagggggggagggtttctgacgggctctcatcatcgtcccttccccagagaccttcagtgccatcctgactctagaaggccccccacagcagggcgtagggggcatcaccctgctcactctcagtgacacagaggactccttgcattttttgctgctcttccgagggctgctggaacccaggagtgggggtaagtgggatgggggcaaaacacgtgagaaggttagggagagcacctgtctcagaaaggcccacatgtgcggccttgcaggactaacccaggttcccttgaggctccagattctacaccaggggcagctactgcgagaacttcaggccaatgtctcagcccaggtgagtggggatctggctctcgctgccacctgtcttggcctcttgctattgcccatcacaccctgctctgtccccaggaaccaggctttgctgaggtgctgcccaacctgacagtccaggagatggactggctggtgctgggggagctgcagatggccctggagtgggcaggcaggccagggctgcgcatcagtggacacattgctgccaggaagagctgcgacggtgaggcggggggggggcctggtgcgccgggcatgcacaactgagagacacagacaagtgccagggtgggtgtgggagagatcctgtggactgggggtgtaagcggccatggggtaaacctagcctcacctgtcttgcccctccgtagtcctgcaaagtgtcctttgtggggctgatgccctgatcccagtccagacgggtgctgccggctcagccagcctcacgctgctaggaaatggctccctgatctatcaggtgcaagtggtagggacaagcagtgaggtggtggccatgacactggagaccaagcctcagcggagggatcagcgcactgtcctgtgccacatggctggactccagccaggaggacacacggccgtgggtatctgccctgggctgggtgcccgaggggctcatatgctgctgcagaatgagctcttcctgaacgtgggcaccaaggacttcccagacggagagcttcgggggcacgtggctgccctgccctactgtgggcatagcgcccgccatgacacgctgcccgtgcccctagcaggagccctggtgctaccccctgtgaagagccaagcagcagggcacgcctggctttccttggatacccactgtcacctgcactatgaagtgctgctggctgggcttggtggctcagaacaaggcactgtcactgcccacctccttgggcctcctggaacgccagggcctcggcggctgctgaagggattctatggctcagaggcccagggtgtggtgaaggacctggagccggaactgctgcggcacctggcaaaaggcatggcctccctgatgatcaccaccaagggtagccccagaggggagctccgagggcaggtaggtggcgagtgtgggcagtgggggcagtggggagggtgcagagttggaggggcactgtgtgccattgcactagtcacttgctgtctctgagtcctgggggtggtcgtatcacagcgcccccccggctggtggggaggatgagctacatgaggaggctggcagcccggcaccctatccctggcagctgagatgattgtggagcgaatggcatcctcctgggccactgcagcgctcagggggccgaggtgtctcctgctggctggccagctgccgctggtaaagacgcgagggggagccccagcgctgcctcagttggcctctcctcccaggtgcacatagccaaccaatgtgaggttggcggactgcgcctggaggcggccggggccgagggggtgcgggcgctgggggctccggatacagcctctgctgcgccgcctgtggtgcctggtctcccggccctagcgcccgccaaacctggtggtcctgggcggccccgagaccccaacacatgcttcttcgaggggcagcagcgcccccacggggctcgctgggcgcccaactacgacccgctctgctcactctgcacctgccaggtaggaggtcctggaagggcacactgggtcctgggatctggagcaaggggcctggacactcccgtcaatgcctctgctcctctctgcagagacgaacggtgatctgtgacccggtggtgtgcccaccgcccagctgcccacacccggtgcaggctcccgaccagtgctgccctgtttgccctgagaaacaagatgtcagagacttgccagggctgccaaggagccgggacccaggagagggctgctattttgatggtgaccggagctggcgggcagcgggtacgcggtggcaccccgttgtgcccccctttggcttaattaagtgtgctgtctgcacctgcaaggggggcactggagaggtgcactgtgagaaggtgcagtgtccccggctggcctgtgcccagcctgtgcgtgtcaaccccaccgactgctgcaaacagtgtccagtggggtcgggggcccacccccagctgggggaccccatgcaggctgatgggccccggggctgccgttttgctgggcagtggttcccagagagtcagagctggcacccctcagtgcccccttttggagagatgagctgtatcacctgcagatgtggggcaggggtgcctcactgtgagcgggatgactgttcactgccactgtcctgtggctcggggaaggagagtcgatgctgttcccgctgcacggcccaccggcggccagccccagagaccagaactgatccagagctggagaaagaagccgaaggctcttagggagcagccagagggccaagtgaccaagaggatggggcctgagctggggaaggggtggcatcgaggaccttcttgcattctcctgtgggaagcccagtgcctttgctcctctgtcctgcctctactcccacccccactacctctgggaaccacagctccacaagggggagaggcagctgggccagaccgaggtcacagccactccaagtcctgccctgccaccctcggcctctgtcctggaagccccacccctttcctcctgtacataatgtcactggcttgttgggatttttaatttatcttcactcagcaccaagggcccccgacactccactcctgctgcccctgagctgagcagagtcattattggagagttttgtatttattaaaacatttctttttcagtc

SEQ ID NO: 4086 - DNA, 3384 bp, Homo sapiens
  source 1..3384: mol_type = unassigned DNA
cccgccgcaccgcccccggcccggccctccgccctccgcactcccgcctccctccctccgcccgctcccgcgccctcctccctccctcctccccagctgtcccgttcgcgtcatgccgagcctcccggccccgccggccccgctgctgctcctcgggctgctgctgctcggctcccggccggcccgcggcgccggcccagagccccccgtgctgcccatccgttctgagaaggagccgctgcccgttcggggagcggcaggctgcaccttcggcgggaaggtctatgccttggacgagacgtggcacccggacctaggggagccattcggggtgatgcgctgcgtgctgtgcgcctgcgaggcgcctcagtggggtcgccgtaccaggggccctggcagggtcagctgcaagaacatcaaaccagagtgcccaaccccggcctgtgggcagccgcgccagctgccgggacactgctgccagacctgcccccaggagcgcagcagttcggagcggcagccgagcggcctgtccttcgagtatccgcgggacccggagcatcgcagttatagcgaccgcggggagccaggcgctgaggagcgggcccgtggtgacggccacacggacttcgtggcgctgctgacagggccgaggtcgcaggcggtggcacgagcccgagtctcgctgctgcgctctagcctccgcttctctatctcctacaggcggctggaccgccctaccaggatccgcttctcagactccaatggcagtgtcctgtttgagcaccctgcagcccccacccaagatggcctggtctgtggggtgtggcgggcagtgcctcggttgtctctgcggctccttagggcagaacagctgcatgtggcacttgtgacactcactcacccttcaggggaggtctgggggcctctcatccggcaccgggccctggctgcagagaccttcagtgccatcctgactctagaaggccccccacagcagggcgtagggggcatcaccctgctcactctcagtgacacagaggactccttgcattttttgctgctcttccgagggctgctggaacccaggagtgggggactaacccaggttcccttgaggctccagattctacaccaggggcagctactgcgagaacttcaggccaatgtctcagcccaggaaccaggctttgctgaggtgctgcccaacctgacagtccaggagatggactggctggtgctgggggagctgcagatggccctggagtgggcaggcaggccagggctgcgcatcagtggacacattgctgccaggaagagctgcgacgtcctgcaaagtgtcctttgtggggctgatgccctgatcccagtccagacgggtgctgccggctcagccagcctcacgctgctaggaaatggctccctgatctatcaggtgcaagtggtagggacaagcagtgaggtggtggccatgacactggagaccaagcctcagcggagggatcagcgcactgtcctgtgccacatggctggactccagccaggaggacacacggccgtgggtatctgccctgggctgggtgcccgaggggctcatatgctgctgcagaatgagctcttcctgaacgtgggcaccaaggacttcccagacggagagcttcgggggcacgtggctgccctgccctactgtgggcatagcgcccgccatgacacgctgcccgtgcccctagcaggagccctggtgctaccccctgtgaagagccaagcagcagggcacgcctggctttccttggatacccactgtcacctgcactatgaagtgctgctggctgggcttggtggctcagaacaaggcactgtcactgcccacctccttgggcctcctggaacgccagggcctcggcggctgctgaagggattctatggctcagaggcccagggtgtggtgaaggacctggagccggaactgctgcggcacctggcaaaaggcatggcctccctgatgatcaccaccaagggtagccccagaggggagctccgagggcaggtgcacatagccaaccaatgtgaggttggcggactgcgcctggaggcggccggggccgagggggtgcgggcgctgggggctccggatacagcctctgctgcgccgcctgtggtgcctggtctcccggccctagcgcccgccaaacctggtggtcctgggcggccccgagaccccaacacatgcttcttcgaggggcagcagcgcccccacggggctcgctgggcgcccaactacgacccgctctgctcactctgcacctgccagagacgaacggtgatctgtgacccggtggtgtgcccaccgcccagctgcccacacccggtgcaggctcccgaccagtgctgccctgtttgccctgagaaacaagatgtcagagacttgccagggctgccaaggagccgggacccaggagagggctgctattttgatggtgaccggagctggcgggcagcgggtacgcggtggcaccccgttgtgcccccctttggcttaattaagtgtgctgtctgcacctgcaaggggggcactggagaggtgcactgtgagaaggtgcagtgtccccggctggcctgtgcccagcctgtgcgtgtcaaccccaccgactgctgcaaacagtgtccagtggggtcgggggcccacccccagctgggggaccccatgcaggctgatgggccccggggctgccgttttgctgggcagtggttcccagagagtcagagctggcacccctcagtgcccccttttggagagatgagctgtatcacctgcagatgtggggcaggggtgcctcactgtgagcgggatgactgttcactgccactgtcctgtggctcggggaaggagagtcgatgctgttcccgctgcacggcccaccggcggcccccagagaccagaactgatccagagctggagaaagaagccgaaggctcttagggagcagccagagggccaagtgaccaagaggatggggcctgagctggggaaggggtggcatcgaggaccttcttgcattctcctgtgggaagcccagtgcctttgctcctctgtcctgcctctactcccacccccactacctctgggaaccacagctccacaagggggagaggcagctgggccagaccgaggtcacagccactccaagtcctgccctgccaccctcggcctctgtcctggaagccccacccctttcctcctgtacataatgtcactggcttgttgggatttttaatttatcttcactcagcaccaagggcccccgacactccactcctgctgcccctgagctgagcagagtcattattggagagttttgtatttattaaaacatttctttttcagtc

SEQ ID NO: 4087 - DNA, 3155 bp, Homo sapiens
  source 1..3155: mol_type = unassigned DNA
atgccgagcctcccggccccgccggccccgctgctgctcctcgggctgctgctgctcggctcccggccggcccgcggcgccggcccagagccccccgtgctgcccatccgttctgagaaggagccgctgcccgttcggggagcggcaggctgcaccttcggcgggaaggtctatgccttggacgagacgtggcacccggacctaggggagccattcggggtgatgcgctgcgtgctgtgcgcctgcgaggcgcctcagtggggtcgccgtaccaggggccctggcagggtcagctgcaagaacatcaaaccagagtgcccaaccccggcctgtgggcagccgcgccagctgccgggacactgctgccagacctgcccccaggagcgcagcagttcggagcggcagccgagcggcctgtccttcgagtatccgcgggacccggagcatcgcagttatagcgaccgcggggagccaggcgctgaggagcgggcccgtggtgacggccacacggacttcgtggcgctgctgacagggccgaggtcgcaggcggtggcacgagcccgagtctcgctgctgcgctctagcctccgcttctctatctcctacaggcggctggaccgccctaccaggatccgcttctcagactccaatggcagtgtcctgtttgagcaccctgcagcccccacccaagatggcctggtctgtggggtgtggcgggcagtgcctcggttgtctctgcggctccttagggcagaacagctgcatgtggcacttgtgacactcactcacccttcaggggaggtctgggggcctctcatccggcaccgggccctggctgcagagaccttcagtgccatcctgactctagaaggccccccacagcagggcgtagggggcatcaccctgctcactctcagtgacacagaggactccttgcattttttgctgctcttccgagggctgctggaacccaggagtgggggactaacccaggttcccttgaggctccagattctacaccaggggcagctactgcgagaacttcaggccaatgtctcagcccaggaaccaggctttgctgaggtgctgcccaacctgacagtccaggagatggactggctggtgctgggggagctgcagatggccctggagtgggcaggcaggccagggctgcgcatcagtggacacattgctgccaggaagagctgcgacgtcctgcaaagtgtcctttgtggggctgatgccctgatcccagtccagacgggtgctgccggctcagccagcctcacgctgctaggaaatggctccctgatctatcaggccgtgggtatctgccctgggctgggtgcccgaggggctcatatgctgctgcagaatgagctcttcctgaacgtgggcaccaaggacttcccagacggagagcttcgggggcacgtggctgccctgccctactgtgggcatagcgcccgccatgacacgctgcccgtgcccctagcaggagccctggtgctaccccctgtgaagagccaagcagcagggcacgcctggctttccttggatacccactgtcacctgcactatgaagtgctgctggctgggcttggtggctcagaacaaggcactgtcactgcccacctccttgggcctcctggaacgccagggcctcggcggctgctgaagggattctatggctcagaggcccagggtgtggtgaaggacctggagccggaactgctgcggcacctggcaaaaggcatggcctccctgatgatcaccaccaagggtagccccagaggggagctccgagggcaggtgcacatagccaaccaatgtgaggttggcggactgcgcctggaggcggccggggccgagggggtgcgggcgctgggggctccggatacagcctctgctgcgccgcctgtggtgcctggtctcccggccctagcgcccgccaaacctggtggtcctgggcggccccgagaccccaacacatgcttcttcgaggggcagcagcgcccccacggggctcgctgggcgcccaactacgacccgctctgctcactctgcacctgccagagacgaacggtgatctgtgacccggtggtgtgcccaccgcccagctgcccacacccggtgcaggctcccgaccagtgctgccctgtttgccctgagaaacaagatgtcagagacttgccagggctgccaaggagccgggacccaggagagggctgctattttgatggtgaccggagctggcgggcagcgggtacgcggtggcaccccgttgtgcccccctttggcttaattaagtgtgctgtctgcacctgcaaggggggcactggagaggtgcactgtgagaaggtgcagtgtccccggctggcctgtgcccagcctgtgcgtgtcaaccccaccgactgctgcaaacagtgtccagtggggtcgggggcccacccccagctgggggaccccatgcaggctgatgggccccggggctgccgttttgctgggcagtggttcccagagagtcagagctggcacccctcagtgcccccttttggagagatgagctgtatcacctgcagatgtggggcaggggtgcctcactgtgagcgggatgactgttcactgccactgtcctgtggctcggggaaggagagtcgatgctgttcccgctgcacggcccaccggcggccagccccagagaccagaactgatccagagctggagaaagaagccgaaggctcttagggagcagccagagggccaagtgaccaagaggatggggcctgagctggggaaggggtggcatcgaggaccttcttgcattctcctgtgggaagcccagtgcctttgctcctctgtcctgcctctactcccacccccactacctctgggaaccacagctccacaagggggagaggcagctgggccagaccgaggtcacagccactccaagtcctgccctgccaccctcggcctctgtcctggaagccccacccctttcctcctgtacataatgtcactggcttgttgggatttttaatttatcttcactcagcaccaagggcccccgacactccactcctgctgcccctgagctgagcagagtcattattggagagttttgtatttattaaaacatttctttttcagtc

SEQ ID NO: 4088 - DNA, 4234 bp, Homo sapiens
  source 1..4234: mol_type = unassigned DNA
gccgagcctcccggccccgccggccccgctgctgctcctcgggctgctgctgctcggctcccggccggcccgcggcgccggcccagagccccccgtgctgcccatccgttctgagaaggagccgctgcccgttcggggagcggcaggctgcaccttcggcgggaaggtctatgccttggacgagacgtggcacccggacctaggggagccattcggggtgatgcgctgcgtgctgtgcgcctgcgaggcgcctcagtggggtcgccgtaccaggggccctggcagggtcagctgcaagaacatcaaaccagagtgcccaaccccggcctgtgggcagccgcgccagctgccgggacactgctgccagacctgcccccaggagcgcagcagttcggagcggcagccgagcggcctgtccttcgagtatccgcgggacccggagcatcgcagttatagcgaccgcggggagccaggcgctgaggagcgggcccgtggtgacggccacacggacttcgtggcgctgctgacagggccgaggtcgcaggcggtggcacgagcccgagtctcgctgctgcgctctagcctccgcttctctatctcctacaggcggctggaccgccctaccaggatccgcttctcagactccaatggcagtgtcctgtttgagcaccctgcagcccccacccaagatggcctggtctgtggggtgtggcgggcagtgcctcggttgtctctgcggctccttagggcagaacagctgcatgtggcacttgtgacactcactcacccttcaggggaggtctgggggcctctcatccggcaccgggccctggctgcagagaccttcagtgccatcctgactctagaaggccccccacagcagggcgtagggggcatcaccctgctcactctcagtgacacagaggactccttgcattttttgctgctcttccgagggctgctggaacccaggagtgggggtaagtgggatgggggcaaaacacgtgagaaggttagggagagcacctgtctcagaaaggcccacatgtgcggccttgcaggactaacccaggttcccttgaggctccagattctacaccaggggcagctactgcgagaacttcaggccaatgtctcagcccaggtgagtggggatctggctctcgctgccacctgtcttggcctcttgctattgcccatcacaccctgctctgtccccaggaaccaggctttgctgaggtgctgcccaacctgacagtccaggagatggactggctggtgctgggggagctgcagatggccctggagtgggcaggcaggccagggctgcgcatcagtggacacattgctgccaggaagagctgcgacgtcctgcaaagtgtcctttgtggggctgatgccctgatcccagtccagacgggtgctgccggctcagccagcctcacgctgctaggaaatggctccctgatctatcaggtgcaagtggtagggacaagcagtgaggtggtggccatgacactggagaccaagcctcagcggagggatcagcgcactgtcctgtgccacatggctggactccagccaggaggacacacggccgtgggtatctgccctgggctgggtgcccgaggggctcatatgctgctgcagaatgagctcttcctgaacgtgggcaccaaggacttcccagacggagagcttcgggggcacgtggctgccctgccctactgtgggcatagcgcccgccatgacacgctgcccgtgcccctagcaggagccctggtgctaccccctgtgaagagccaagcagcagggcacgcctggctttccttggatacccactgtcacctgcactatgaagtgctgctggctgggcttggtggctcagaacaaggcactgtcactgcccacctccttgggcctcctggaacgccagggcctcggcggctgctgaagggattctatggctcagaggcccagggtgtggtgaaggacctggagccggaactgctgcggcacctggcaaaaggcatggcctccctgatgatcaccaccaagggtagccccagaggggagctccgagggcaggtgcacatagccaaccaatgtgaggttggcggactgcgcctggaggcggccggggccgagggggtgcgggcgctgggggctccggatacagcctctgctgcgccgcctgtggtgcctggtctcccggccctagcgcccgccaaacctggtggtcctgggcggccccgagaccccaacacatgcttcttcgaggggcagcagcgcccccacggggctcgctgggcgcccaactacgacccgctctgctcactctgcacctgccagagacgaacggtgatctgtgacccggtggtgtgcccaccgcccagctgcccacacccggtgcaggctcccgaccagtgctgccctgtttgccctgagaaacaagatgtcagagacttgccagggctgccaaggagccgggacccaggagagggggggcactggagaggtgcactgtgagaaggtgcagtgtccccggctggcctgtgcccagcctgtgcgtgtcaaccccaccgactgctgcaaacagtgtccagtggggtcgggggcccacccccagctgggggaccccatgcaggctgatgggccccggggctgccgttttgctgggcagtggttcccagagagtcagagctggcacccctcagtgcccccttttggagagatgagctgtatcacctgcagatgtggggcaggggtgcctcactgtgagcgggatgactgttcactgccactgtcctgtggctcggggaaggagagtcgatgctgttcccgctgcacggcccaccggcggccagccccagagaccagaactgatccagagctggagaaagaagccgaaggctcttagggagcagccagagggccaagtgaccaagaggatggggcctgagctggggaaggggtggcatcgaggaccttcttgcattctcctgtgggaagcccagtgcctttgctcctctgtcctgcctctactcccacccccactacctctgggaaccacagctccacaagggggagaggcagctgggccagaccgaggtcacagccactccaagtcctgccctgccaccctcggcctctgtcctggaagccccacccctttcctcctgtacataatgtcactggcttgttgggatttttaatttatcttcactcagcaccaagggcccccgacactccactcctgctgcccctgagctgagcagagtcattattggagagttttgtatttattaaaacatttctttttcagtctttgggcatgaggttggctctttgtggccaggaacctgagtggggcctggtggagaaggggcagagagtaggaggtgagagagaggagctctgacacttggggagctgaaagagacctggagaggcagaggatagcgtggcagttggctggcatgcctgggttccgcagaggggctggggatggttcttgagatggtctagagactcaagaatttagggaagtagaagcaggattttgactcaagtttagtttcccacatcgctggcctgtttgctgacttcatgtttgaagttgctccagagagagaatcaaaggtgtcaccagcccctctctccctccttcccttcccttccctttctttccctcccctcccctcccctcccctcccctcccctcccctccccttcccttcactctcccttccctctcccttcccttcccttctccttcgttcacagcaatggggtcttgctatgttgcccaggctggtcttgaactcctggcctcaagtgatcctcctgccttggccttccaaagtgttgggattacaggcatgagccaccacacccagcccagcctctaccttctttgtctaaagtgaggcaaacacttttctgtttttttcctggaaactcgtgttctggaccagttctggggcaaactggggtcagagtggattggaatcagctctgatccagcttttggctgtgcttaccttgagaccaaatcatgtagagaataagacaagaccctcctgccctgttaccctcttctctctcccctccctcattcctaccatcaagacccaggcattttgacaagctctaggaaatgagggtatcagaacagaaatctaacaaatgtatgtagctgcagatccatctttcatataaacaatgtggagtc

SEQ ID NO: 4089 - DNA, 588 bp, Homo sapiens
  source 1..588: mol_type = unassigned DNA
gctgctgctcctcgggctgctgctgctcggctcccggccggcccgcggcgccggcccagagccccccgtgctgcccatccgttctgagaaggagccgctgcccgttcggggagcggcaggctgcaccttcggcgggaaggtctatgccttggacgagacgtggcacccggacctaggggagccattcggggtgatgcgctgcgtgctgtgcgcctgcgaggcggtgagtgcaccccgcggccggcccgggccctggcgggtggggagcgccgggtcgcgcgggcgtcggagtggactcggagctgctgagaaggagcccagtcggcagatgttggggatatttttctggtggaggaaggggaatcagcccctccaattcttaggtgctgttactgatcgcccactctgtgtgaggctctgtgccaactccgtttcgttccctgctcatctaactctcatggcagccttgctagatagagagtattattatccccattttccagacagggaccttgaggcccagagagatgaagtagcttgtctagggtcacgcagcttgtaagtggcagagctggctgactctgcggg

SEQ ID NO: 4090 - DNA, 503 bp, Homo sapiens
  source 1..503: mol_type = unassigned DNA
ttcggggagcggcaggctgcaccttcggcgggaaggtctatgccttggacgagacgtggcacccggacctaggggagccattcggggtgatgcgctgcgtgctgtgcgcctgcgaggcgcctcagtggggtcgccgtaccaggggccctggcagggtcagctgcaagaacatcaaaccagagtgcccaaccccggcctgtgggcagccgcgccagctgccgggacactgctgccagacctgcccccaggagcgcagcagttcggagcggcagccgagcggcctgtccttcgagtatccgcgggacccggagcatcgcagttatagcgaccgcggggagccaggcgctgaggagcgggcccgtggtgacggccacacgggtagggggctggcgaacagcggggttgtggttgaggctgggccaccaaagcggcgtttgacagtgctcaggccatcttcctcccgtcccagacttcgtggcgctgctgacagggccgaggtcgca

SEQ ID NO: 4091 - DNA, 568 bp, Homo sapiens
  source 1..568: mol_type = unassigned DNA
gcgggcagcccccggggcggcacacggcgcgagctgggcagcggcctccagccaagcccgtccccgcaggctgcaccttcggcgggaaggtctatgccttggacgagacgtggcacccggacctaggggagccattcggggtgatgcgctgcgtgctgtgcgcctgcgaggcgcctcagtggggtcgccgtaccaggggccctggcagggtcagctgcaagaacatcaaaccagagtgcccaaccccggcctgtgggcagccgcgccagctgccgggacactgctgccagacctgcccccaggagcgcagcagttcggagcggcagccgagcggcctgtccttcgagtatccgcgggacccggagcatcgcagttatagcgaccgcggggagccaggcgctgaggagcgggcccgtggtgacggccacacggacttcgtggcgctgctgacagggccgaggtcgcaggcggtggcacgagcccgagtctcgctgctgcgctctagcctccgcttctctatctcctacaggcggctggaccgccctaccaggatccgcttctcagactc

SEQ ID NO: 4092 - DNA, 608 bp, Homo sapiens
  source 1..608: mol_type = unassigned DNA
gtgccaactccgtttcgttccctgctcatctaactctcatggcagccttgctagatagagagtattattatccccattttccagacagggaccttgaggcccagagagatgaagtagcttgtctagggtcacgcagcttcctcagtggggtcgccgtaccaggggccctggcagggtcagctgcaagaacatcaaaccagagtgcccaaccccggcctgtgggcagccgcgccagctgccgggacactgctgccagacctgcccccaggagcgcagcagttcggagcggcagccgagcggcctgtccttcgagtatccgcgggacccggagcatcgcagttatagcgaccgcggggagccaggcgctgaggagcgggcccgtggtgacggccacacggacttcgtggcgctgctgacagggccgaggtcgcaggcggtggcacgagcccgagtctcgctgctgcgctctagcctccgcttctctatctcctacaggcggctggaccgccctaccaggatccgcttctcagactccaatggcagtgtcctgtttgagcaccctgcagcccccacccaagatggcctggtgagatgatgccatttatgag

SEQ ID NO: 4093 - DNA, 546 bp, Homo sapiens
  source 1..546: mol_type = unassigned DNA
atctaactctcatggcagccttgctagatagagagtattattatccccattttccagacagggaccttgaggcccagagagatgaagtagcttgtctagggtcacgcagcttcctcagtggggtcgccgtaccaggggccctggcagggtcagctgcaagaacatcaaaccagagtgcccaaccccggcctgtgggcagccgcgccagctgccgggacactgctgccagacctgcccccaggagcgcagcagttcggagcggcagccgagcggcctgtccttcgagtatccgcgggacccggagcatcgcagttatagcgaccgcggggagccaggcgctgaggagcgggcccgtggtgacggccacacggacttcgtggcgctgctgacagggccgaggtcgcaggcggtggcacgagcccgagtctcgctgctgcgctctagcctccgcttctctatctcctacaggcggtgagaaaggggaaggagcaaggaggggtcagctgccggggcccgggagggaaactgggagagctgggaggggct

SEQ ID NO: 4094 - DNA, 677 bp, Homo sapiens
  source 1..677: mol_type = unassigned DNA
atctaactctcatggcagccttgctagatagagagtattattatccccattttccagacagggaccttgaggcccagagagatgaagtagcttgtctagggtcacgcagcttgtaagtggcagagctggctgactctgcgggacatccttgcctgggggggtctcatcagttggcatcttgcactcacttgggtttcccgccttttccgggagcagcctcagtggggtcgccgtaccaggggccctggcagggtcagctgcaagaacatcaaaccagagtgcccaaccccggcctgtgggcagccgcgccagctgccgggacactgctgccagacctgcccccaggagcgcagcagttcggagcggcagccgagcggcctgtccttcgagtatccgcgggacccggagcatcgcagttatagcgaccgcggggagccaggcgctgaggagcgggcccgtggtgacggccacacggacttcgtggcgctgctgacagggccgaggtcgcaggcggtggcacgagcccgagtctcgctgctgcgctctagcctccgcttctctatctcctacaggcggctggaccgccctaccaggatccgcttctcagactccaatggcagtgtcctgtttgagcaccctgcagcccccacccaagatggcctggtgagatgatgcca

SEQ ID NO: 4095 - DNA, 560 bp, Homo sapiens
  source 1..560: mol_type = unassigned DNA
gatactaggtcccgggccacttggatggggcgtcggactggcctttcccatggccagctgaagcccgtgttcttacccccccgcccgcagagcgcagcagttcggagcggcagccgagcggcctgtccttcgagtatccgcgggacccggagcatcgcagttatagcgaccgcggggagccaggcgctgaggagcgggcccgtggtgacggccacacggacttcgtggcgctgctgacagggccgaggtcgcaggcggtggcacgagcccgagtctcgctgctgcgctctagcctccgcttctctatctcctacaggcggctggaccgccctaccaggatccgcttctcagactccaatggcagtgtcctgtttgagcaccctgcagcccccacccaagatggcctggtgagatgatgccatttatgagcacttgcccagtctgggcactgtgccgagagcatgctctgcattgcctcccgtggtcctcaccacagcccagtgggaggaaggcactgacattatgatgcccattttacagaagggggaactgaggctcag

SEQ ID NO: 4096 - DNA, 683 bp, Homo sapiens
  source 1..683: mol_type = unassigned DNA
attttacagaagggggaactgaggctcagtaggataatgtgatttgttcaaggtcacacagctagtaagtggtgcagccaggattggaacccaagcatctggctccagcgttctttcttaagcttcctagggcaccctggaggttcctttccatgttcctttttcataagccctgcctgggcatcctaattggcctagcctgcacagtgtctgagcgtagggccttcttgtctctctgctccaggtctgtggggtgtggcgggcagtgcctcggttgtctctgcggctccttagggcagaacagctgcatgtggcacttgtgacactcactcacccttcaggggaggtctgggggcctctcatccggcaccgggccctggctgcagagaccttcagtgccatcctgactctagaaggccccccacagcagggcgtagggggcatcaccctgctcactctcagtgacacagaggactccttgcattttttgctgctcttccgagggctgctggaacccaggagtgggggtaagtgggatgggggcaaaacacgtgagaaggttagggagagcacctgtctcagaaaggcccacatgtgcggccttgcaggactaacccaggttcccttgaggctccagattctacaccaggggcagctactgcgagaacttcaggccaatgtct

SEQ ID NO: 4097 - DNA, 1340 bp, Homo sapiens
  source 1..1340: mol_type = unassigned DNA
cctaagctccggttgccatctgaaggtggggacatatagggtggccctgctggcggactcttcctgttgctgaggttcaagggtctaaaacttgctgctctccaggccctggacctatggacagtgtcttccagctcgtggaatgtgtgctggggagctgggaatgctgggtttgagggcttgccctaggccaccttctcacctgtcatctctcctctgtctggacccagcgctgcccgtgcccctagcaggagccctggtgctaccccctgtgaagagccaagcagcagggcacgcctggctttccttggatacccactgtcacctgcactatgaagtgctgctggctgggcttggtggctcagaacaaggcactgtcactgcccacctccttgggcctcctggaacgccagggcctcggcggctgctgaagggattctatggctcagaggcccagggtgtggtgaaggacctggagccggaactgctgcggcacctggcaaaaggcatggcctccctgatgatcaccaccaagggtagccccagaggggagctccgagggcaggtaggtggcgagtgtgggcagtgggggcagtggggagggtgcagagttggaggggcactgtgtgccattgcactagtcacttgctgtctctgagtcctgggggtggtcgtatcacagcgcccccccggctggtggggaggatgagctacatgaggaggctggcagcccggcaccctatccctggcagctgagatgattgtggagcgaatggcatcctcctgggccactgcagcgctcagggggccgaggtgtctcctgctggctggccagctgccgctggtaaagacgcgagggggagccccagcgctgcctcagttggcctctcctcccaggtgcacatagccaaccaatgtgaggttggcggactgcgcctggaggcggccggggccgagggggtgcgggcgctgggggctccggatacagcctctgctgcgccgcctgtggtgcctggtctcccggccctagcgcccgccaaacctggtggtcctgggcggccccgagaccccaacacatgcttcttcgaggggcagcagcgcccccacggggctcgctgggcgcccaactacgacccgctctgctcactctgcacctgccagagacgaacggtgatctgtgacccggtggtgtgcccaccgcccagctgcccacacccggtgcaggctcccgaccagtgctgccctgtttgccctgagaaacaagatgtcagagacttgccagggctgccaaggagccgggacccaggagagggctgctattttgatggtgaccggagctg

SEQ ID NO: 4098 - DNA, 2964 bp, Homo sapiens
  source 1..2964: mol_type = unassigned DNA
agtgtgcctttgtgagggtgtgtgtgccgccgggtctgtgcagtgggtgtgggtgtttgtctccctgtatccgccttctctcccgtccgggacttttagccttcctgggctcgccttcctcatgtcctttctcctccctcttggggctcaaattgggtgccctggtgaaggaggggggcacactccagaacctagtccaaccccagacgctgcctgaggcttccctccagctcccctcccttccttttctccctttcctccctccctctctttccctttctccctccccgctaaggctggcgtgccagggggtgggacatgccaatcactggctgtgcctctcccgctgccagcacagggcgcagctccccctgggagccaggtgtttgggtccctggagacgccgcaggcccccagggaggcagtggggctgaggaccctacagacccctcttcagccccgtggtgatgactttcccctgaggaagccctgtagcgtgcctggaggaaggggctctccaaccccagccccacctagccaccatgaacacttcagccccacctgctgtcagccccaacatcaccgtcctggcaccaggaaagggtccctggcaagtggccttcattgggatcaccacgggcctcctgtcgctagccacagtgacaggcaacctgctggtactcatctctttcaaggtcaacacggagctcaagacagtcaataactacttcctgctgagcctggcctgtgctgacctcatcatcggtaccttctccatgaacctctataccacgtacctgctcatgggccactgggctctgggcacgctggcttgtgacctctggctggccctggactatgtggccagcaatgcctccgtcatgaatctgctgctcatcagctttgaccgctacttctccgtgactcggcccctgagctaccgtgccaagcgcacaccccgccgggcagctctgatgatcggcctggcctggctggtttcctttgtgctctgggccccagccatcctcttctggcagtacctggtaggggagcggacagtgctagctgggcagtgctacatccagttcctctcccagcccatcatcacctttggcacagccatggctgccttctacctccctgtcacagtcatgtgcacgctctactggcgcatctaccgggagacagagaaccgagcacgggagctggcagcccttcagggctccgagacgccaggcaaagggggtggcagcagcagcagctcagagaggtctcagccaggggctgagggctcaccagagactcctccaggccgctgctgtcgctgctgccgggcccccaggctgctgcaggcctacagctggaaggaagaagaggaagaggacgaaggctccatggagtccctcacatcctcagagggagaggagcctggctccgaagtggtgatcaagatgccaatggtggaccccgaggcacaggcccccaccaagcagcccccacggagctccccaaatacagtcaagaggccgactaagaaagggcgtgatcgagctggcaagggccagaagccccgtggaaaggagcagctggccaagcggaagaccttctcgctggtcaaggagaagaaggcggctcggaccctgagtgccatcctcctggccttcatcctcacctggacaccgtacaacatcatggtgctggtgtccaccttctgcaaggactgtgttcccgagaccctgtgggagctgggctactggctgtgctacgtcaacagcaccatcaaccccatgtgctacgcactctgcaacaaagccttccgggacacctttcgcctgctgctgctttgccgctgggacaagagacgctggcgcaagatccccaagcgccctggctccgtgcaccgcactccctcccgccaatgctgatagtcccctctcctgcatccctccaccccagtccccgggaaaggccggtgggaagagggcaggggctgcatcctcagccccagggccctgctcaggcctcacctggcttcccaggaccctgggtcaccttcctgggcagcccagagagaccctgccaactttccagacttcgctattcccaggcagggagggaaacccggggaactggtttttctgttccctgctgggtgggaatgcgctcttcaccaggaagaaggcccgggaggaggatccgggctttggactccttgtttgcctttaggcaggaagtcaggagccagcagggcgggccaggagaaagaaggcttaacattaagtattccttggcccagcagcggcccagattgcggtgtgagatggtgccccctggggggcacagccagaaactgaactggccgctgggagaaaagccagatgacagggagctggggaatcccctcgcttcataggcagagcccgcccacctgggccctaggcatactctccaggattgtccacaaatgtcctcagagggtccctaggtgggtcaactccaaggcaaatgtccaagcatcagcaagacaatgacactggaagggtccggcttggctagtcacatatcaagtcccgaggcagcaacaggaccaggagccaggtgtcctgactgtcctacaatatcattttcctgggagtgggagtcaagtgtgcctgctatccagccgcaaatccataccccctgccccagagaagcctcagtccctccctcctggctcacagccaccacctggatggatctgctccatgcagatctagccaggcctcccgcatgctgcctgcctccggccctgccccacacaggcctggcccagccagcaggttctctcctgtgagctccccaatccaacccatgcatggcctcccagccacccggatctccaggcccagcctggccccaaatgttctttcctttcatcctcagcaagtgctgagtctgtgaataaagccacataaccagcgggca

SEQ ID NO: 4099 - DNA, 2123 bp, Homo sapiens
  source 1..2123: mol_type = unassigned DNA
atgtgcaggggggagggcgtgtgtgcgagggaagcaggcatgtgaataccagggcatgtgtgttggggcatggtgcacaggggctgggggctctaaggttgggtggggggaggagcccaaggaaacagtgtgcctttgtgagggtgtgtgtgccgccgggtctgtgcagtgggtgtgggtgtttgtctccctgtatccgccttctctcccgtccgggacttttagccttcctgggctcgccttcctcatgtcctttctcctccctcttggggctcaaattgggtgccctggtgaaggaggggggcacactccagaacctagtccaaccccagacgctgcctgaggcttccctccagctcccctcccttccttttctccctttcctccctccctctctttccctttctccctccccgctaaggctggcgtgccagggggtgggacatgccaatcactggctgtgcctctcccgctgccagcacagggcgcagctccccctgggagccaggtgtttgggtccctggagacgccgcaggcccccagggaggcagtggggctgaggaccctacagacccctcttcagccccgtgggcaccctgaaacccaccacccccgtccacctcagctcccccaagatggactgaatcaggctgctggccagatagagaagctagaagccaaggtgatgactttcccctgaggaagccctgtagcgtgcctggaggaaggggctctccaaccccagccccacctagccaccatgaacacttcagccccacctgctgtcagccccaacatcaccgtcctggcaccaggaaagggtccctggcaagtggccttcattgggatcaccacgggcctcctgtcgctagccacagtgacaggcaacctgctggtactcatctctttcaaggtcaacacggagctcaagacagtcaataactacttcctgctgagcctggcctgtgctgacctcatcatcggtaccttctccatgaacctctataccacgtacctgctcatgggccactgggctctgggcacgctggcttgtgacctctggctggccctggactatgtggccagcaatgcctccgtcatgaatctgctgctcatcagctttgaccgctacttctccgtgactcggcccctgagctaccgtgccaagcgcacaccccgccgggcagctctgatgatcggcctggcctggctggtttcctttgtgctctgggccccagccatcctcttctggcagtacctggtaggggagcggacagtgctagctgggcagtgctacatccagttcctctcccagcccatcatcacctttggcacagccatggctgccttctacctccctgtcacagtcatgtgcacgctctactggcgcatctaccgggagacagagaaccgagcacgggagctggcagcccttcagggctccgagacgccaggcaaagggggtggcagcagcagcagctcagagaggtctcagccaggggctgagggctcaccagagactcctccaggccgctgctgtcgctgctgccgggcccccaggctgctgcaggcctacagctggaaggaagaagaggaagaggacgaaggctccatggagtccctcacatcctcagagggagaggagcctggctccgaagtggtgatcaagatgccaatggtggaccccgaggcacaggcccccaccaagcagcccccacggagctccccaaatacagtcaagaggccgactaagaaagggcgtgatcgagctggcaagggccagaagccccgtggaaaggagcagctggccaagcggaagaccttctcgctggtcaaggagaagaaggcggctcggaccctgagtgccatcctcctggccttcatcctcacctggacaccgtacaacatcatggtgctggtgtccaccttctgcaaggactgtgttcccgagaccctgtgggagctgggctactggctgtgctacgtcaacagcaccatcaaccccatgtgctacgcactctgcaacaaagccttccgggacacctttcgcctgctgctgctttgccgctgggacaagagacgctggcgcaagatccccaagcgccctggctccgtgcaccgca

SEQ ID NO: 4100 - DNA, 549 bp, Homo sapiens
  source 1..549: mol_type = unassigned DNA
cggtggcaagaatcaggttccaattctctggaacctctggtgacttctctacctgccacctgccccaggtgatgactttcccctgaggaagccctgtagcgtgcctggaggaaggggctctccaaccccagccccacctagccaccatgaacacttcagccccacctgctgtcagccccaacatcaccgtcctggcaccaggaaagggtccctggcaagtggccttcattgggatcaccacgggcctcctgtcgctagccacagtgacaggcaacctgctggtactcatctctttcaaggtcaacacggagctcaagacagtcaataactacttcctgctgagcctggcctgtgctgacctcatcatcggtaccttctccatgaacctctataccacgtacctgctcatgggccactgggctctgggcacgctggcttgtgacctctggctggccctggactatgtggccagcaatgcctccgtcatgaatctgctgctcatcagctttgaccgctacttctccgtgactcggcccctgagctaccgtg

SEQ ID NO: 4101 - DNA, 2005 bp, Homo sapiens
  source 1..2005: mol_type = unassigned DNA
attacaccagctctctcagtccggggaggaggaggagcaggaggaacgcgaggaggaaggagaggaggagcggccagcagtagccacgaccgccaccaccaggcagaggaagagttcgtggggaggaaaagacctctcctcccccttggagcgccttctctctgcttttggagaaagggaatacacgataaagaaggagacggaaagaagagaaaaagtgaggcgggagacagagggaaaagggcgtgaacagaaagggccggagcgtgcaggggagcacagggcgcgggggcggcactgccgagccgggagcgctgccgcttgggcaggtgccgcggccgctgcccggaggcggcatgtgacgcgcggccgcagctgcccgcgggcggagcgctctcagaccccggagcgcacaccgcggggccatcggtgccatcgcggatctccaggctcctcatcagtccgccggggccgcagcagcgcttctgggaagacgggcgatgaactgaagggcggctccgggcaggggggcacgatcttaaggacagtcgctccctgaacgcggagccggaggagacgaagggaaggtggagcggacgccacccgcgcaccgggcaggcgcggagaccggcgtgggacagccacctggagcgcagctgccagaaagaaggactttgctgctttgggccaggatctgaacttaggtgtaaaccattgccctggcagagggaacctacccagtccattgctgcctgctacaagatatgaacagtaatggcacatattttggttatgagtcactcagaggactgtggattgaatgaactgtatccatccccatcatgatgtacagaaccaagtctcttcactacacttgtgttctgattagtggccaaataaatgacagtcagaacttcagctaaggtacaataaggttttgctgtggcgtggcacctggtctctttctagaaggaaagttcaacatacagcacaattctggacacattgtattggtttgatgctcctacctggaacagatcctcatgagctagtaagtttgaaggggagtcataaagaggaacaggcattatacgcaaggctgaagaagcagttggtaactaacagtacatctttttctaaggccaacactaaacataagttgcagagctggcctgtggtggaactcacaagtcttattggcaatatatgtgaggagacaaaaagcaacatatggagaaatacaaaaatatactccctagagatactgcctcttcagatgtcaagaaaaacctggatgaaatgaagcaagagtggcacgctgcaaagttacaaattcaaggccacccacagaaccaaacattaacacttaggtggagctggtctcttgggcagcctgacatctggtccactcctctgtcctatgccgggatcatcatgaccgtagagattatgtcactgttttgcatccttgttacataactcagttcctggtagattccagtgaaaggcacatggtggtgatatttttgagaaagtagagaagaaaagaatgaatccggatggttgttgagacagaaactgagcgtcgaacctcattttctctcgtacccaaaccttgatgaaacaacagaggaaagtattgggctgcaattgtaggcgcacaaaagcaaaccttgagtcatggatgaccgaccaaggaagagtccccttgggaggaggaggtgccaaagaccagtgatactgctttgggttatgtgcactgagggtttccaaccctgacggatatggattctaatttaaaatatcacagggaagaaaaaaatagacgttcccatggcaacattttctcagggccagctcttctgtcttattatcatatcttatttaaatatttcctggaatcagtttaaacttaatccctctgtgtgtcttctattttcagtggccatggagagcgtaacatctggtcagaggttttccttaaataaatcatataattgtaggc

SEQ ID NO: 4102 - DNA, 719 bp, Homo sapiens
  source 1..719: mol_type = unassigned DNA
catgtgacgcgcggccgcagctgcccgcgggcggagcgctctcagaccccggagcgcacaccgcggggccatcggtgccatcgcggatctccaggctcctcatcagtccgccggggccgcagcagcgcttctgggaagacgggcgatgaactgaagggcggctccgggcaggggggcacgatcttaaggacagtcgctccctgaacgcggagccggaggagacgaagggaaggtggagcggacgccacccgcgcaccgggcaggcgcggagaccggcgtgggacagccacctggagcgcagctgccagaaagaaggactttgctgctttgggccaggatctgaacttaggtgtaaaccattgccctggcagagggaacctacccagtccattgctgcctgctacaagatatgaacagtaatggcacatattttggttatgagtcactcagaggactgtggattgaatgaactgtatccatccccatcatgatgtacagaaccaagtctcttcactatgtacagtgtacttgaccagaggattcatgaggggcagtattgtagtacgcagagtgcggaagcagagaagagagtccagctgtttgttcgttaagccagatatggaagagatttgcaaaaaatgtaaatcatgtcacattttactaattttgtcttagaatatgtgttattttcattaaaagatactgtttaattatgctaa

SEQ ID NO: 4103 - DNA, 1101 bp, Homo sapiens
  source 1..1101: mol_type = unassigned DNA
acgtatttgcaatccccttatgccataattaaagaaggactttgctgctttgggccaggatctgaacttaggtgtaaaccattgccctggcagagggaacctacccagtccattgctgcctgctacaagatatgaacagtaatggcacatattttggttatgagtcactcagaggactgtggattgaatgaactgtatccatccccatcatgatgtacagaaccaagtctcttcactagtaggtatttttttaattaatatcatgtacacagttatatgttgagattttcaccagagtacctacttttataatgaaaaatgtgtaaaacacatgtattagtgtcgccggtatgaaatatggctagatctagtctatttctgtatcaaccaattgtaaaatgaagaggcatgctgagctgtatctattaggtataagtatataaatgtggtaattatgtatacctatataggcagaatttagaagtatagcatcttccctcttttttaactgaattaagaaacgtcactggacagtttcgatgtcttctggtcaatatcatatagatctggtgccaatgtaagcttaaactttttaccgagtttatgctttgcaacagtttaattttattatacagggtatttgatgtgcttccactcacagatgcaccatattaacagttggtgtatgatatttacggtgttgtggaaagaaaattaaactcagtcagaagatgttaatttcatttcagctccagcatttatcctcatactagtcccctaatctctaggcctcagtttcttcatttgaaaagtgaaaggaatcgtttctgctttacctagttcataagatttcctttgaaggtcaacagaggtaacggatgtgaaattattagctaactctcaaactctgtaaaaataaatggtgttgtctgtggtcaactaacagcacaagtagagagctggaaaaagttgtgaccataattgtctcttccaattaattaatgcagtctactattttatatgctacttgcctaagagataaatgataaaatcctcattaattttaatttatgacccaaattaatttttggtatatttgag

SEQ ID NO: 4104 - DNA, 8780 bp, Homo sapiens
  source 1..8780: mol_type = unassigned DNA
gggcaatggcgggcgcccctcccccagcctcgttgccgccttgcagtttgatctcagactgctgtgctagcaatcagcgagactccgtgggcgtaggaccctccgagccaggtgtgggatatagtctcgtggtgcgccgtttcttaagctggtctgaaaagcgcaatattcgggtgggagtgacccgattttccaggtgcttccgtcacccctttctttgactcggaaagggaactccctgaccccttgcgcttcccaggtgaggcaatgcctcgccctgcttcggctcgcgcacggtgcgcgcacacactggcctgcgcccactgtctagcactccctagtgagatgaacccggtacctcagatggaaatgcagaaatcacccgtcttctgcgtcgctcacgctgggagctgtagaccggagctgttcctattcggccatcttggctcctagtatttttaattaagcacttgtgttctgattagtggccaaataaatgacagtcagaacttcagctaaggtacaataaggttttgctgtggcgtggcacctggtctctttctagaaggaaagttcaacatacagcacaattctggacacattgtattggtttgatgctcctacctggaacaggtggagctggtctcttgggcagcctgacatctggtccactcctctgtcctatgccgggatcatcatgaccgtagagattatgtcactgttttgcatccttgttacataactcagttcctggtagattactatgtcagagagtcacaatgaccttgcacaataacagtacaacctcgcctttgtttccaaacatcagctcctcctggatacacagcccctccgatgcagggctgcccccgggaaccgtcactcatttcggcagctacaatgtttctcgagcagctggcaatttctcctctccagacggtaccaccgatgaccctctgggaggtcataccgtctggcaagtggtcttcatcgctttcttaacgggcatcctggccttggtgaccatcatcggcaacatcctggtaattgtgtcatttaaggtcaacaagcagctgaagacggtcaacaactacttcctcttaagcctggcctgtgccgatctgattatcggggtcatttcaatgaatctgtttacgacctacatcatcatgaatcgatgggccttagggaacttggcctgtgacctctggcttgccattgactacgtagccagcaatgcctctgttatgaatcttctggtcatcagctttgacagatacttttccatcacgaggccgctcacgtaccgagccaaacgaacaacaaagagagccggtgtgatgatcggtctggcttgggtcatctcctttgtcctttgggctcctgccatcttgttctggcaatactttgttggaaagagaactgtgcctccgggagagtgcttcattcagttcctcagtgagcccaccattacttttggcacagccatcgctgctttttatatgcctgtcaccattatgactattttatactggaggatctataaggaaactgaaaagcgtaccaaagagcttgctggcctgcaagcctctgggacagaggcagagacagaaaactttgtccaccccacgggcagttctcgaagctgcagcagttacgaacttcaacagcaaagcatgaaacgctccaacaggaggaagtatggccgctgccacttctggttcacaaccaagagctggaaacccagctccgagcagatggaccaagaccacagcagcagtgacagttggaacaacaatgatgctgctgcctccctggagaactccgcctcctccgacgaggaggacattggctccgagacgagagccatctactccatcgtgctcaagcttccgggtcacagcaccatcctcaactccaccaagttaccctcatcggacaacctgcaggtgcctgaggaggagctggggatggtggacttggagaggaaagccgacaagctgcaggcccagaagagcgtggacgatggaggcagttttccaaaaagcttctccaagcttcccatccagctagagtcagccgtggacacagctaagacttctgacgtcaactcctcagtgggtaagagcacggccactctacctctgtccttcaaggaagccactctggccaagaggtttgctctgaagaccagaagtcagatcactaagcggaaaaggatgtccctggtcaaggagaagaaagcggcccagaccctcagtgcgatcttgcttgccttcatcatcacttggaccccatacaacatcatggttctggtgaacaccttttgtgacagctgcatacccaaaaccttttggaatctgggctactggctgtgctacatcaacagcaccgtgaaccccgtgtgctatgctctgtgcaacaaaacattcagaaccactttcaagatgctgctgctgtgccagtgtgacaaaaaaaagaggcgcaagcagcagtaccagcagagacagtcggtcatttttcacaagcgcgcacccgagcaggccttgtagaatgaggttgtatcaatagcagtgacaaaacgcacacatcaacccacagaccttaggaggaggaaggcgagggcggggtgacttctggtgatgataaaaatggttttatcacccagatgtgaaagaagctgcctgtttactgatccattgaataaacccattttaatagaaaaagtcaataccaattcagcaaaaagaaaaaaaaaacatactactgaatataaagaaatttattctgaaatagactttacgtgtttttttcttaaagaggagaaaaatattgcttgacggcaattatatacccaaagtgatttgcctgggtcctttaattcccattagctttggaatctcagatgagcatagctgacccagttcccacattcttcccaaggatcccaaaagtgggaatccagaccccaagtggaacactgcaggcttacgaatctgtggttccaaaattatttcatacgttgcaaagctgaatcttcttgtcccaatagagcttcctgtcttttctttggtgtgttgttaaactctatttgtggacttgattcttgattcttgcaaagtactgttttgtgcagttcaagtttcgtacaaataaaaatacttaagtatatatatatgtgtgagttctgcacgcacacacatagtgtatataatatcatgggaaacactgaactggcaaattattcctgcaacatacgctttcagtactttggtaactgaagttctctaggatcctaatgcaacattaacgtgaaataagcccagtgtaatgtttttgaaaccagggctgttttccacagagagcagccaggccttcccagcaggtctgtgcagagcggacaggctcgtgagtcagctgagcgccgtggcttcgccagacttggtgttaagcaacctcctttgttgatgtctcaacagagctaaatcggggcccctctgagctcaaagaatgaaccacatccacacgtttgaatttaatcatctaaatctgaatgtttcagaacaaaatttctgctatctaaactgcttgaaactcaataatagtgtcacgtttgaatgtcatacacagcaatatatatatatgtgtatatatatatatatggcaaagcaaaaaaaaaaacatggtaagagagaatgaaggagaacattgtgtttgattcttgctgaatggcaccttctcaaagaaaatagggcttgcacctttgttaatcagctgtggccagtgctttctggtgttcattgtgtaaccttcacccaggaataggtgaggttttaggaagttacatgtcctctgaagaaagaattacactctgaaaagtaatgcttcaaattgatttccttaccttttgggaaaaaaaaaaaattgtttttttgcattctcccttgaattgaccaaaatgttaactgtttcatttggggaggggatggggtgctgccatcattgtcgttgttgttgctgctgtagctgttggggtttcttttcctgttgccggggctgtttggggagagggaggggagggaggtgggagggccgcggagatatcttccctttgtacagggcattcgtgttgtgaacccagagctgggtagaagctgcttttgtattcagtgtgaggtggtgtttacagacgactttgacaacagtagaagtgtactcagtggtgtctgtgtatctgaactatttaatttcgtgttatgtttatatgcagaaatatttatggatactacaccaagtgtttatttaatgttgataaatatgactcttcagtcgtcagccatggtgtcctttcaaagtgattctttaaggtccacttgagcaatgaatagagtatattggagctttcctgtggctaagaagaagaaacatgtcatcctgttggcatcaccaagcacctaactctttctaggtaataaaaagtcaacggtcacttcaacgtaaatgtttaaaaccactctttagttaaatctgatgggaactgaacaaagctccaccattgtgtctgaaatcattttacacagggaaaaaaaaaaacaatcagcataattgtaagaatgatttttttgggcccacattcaaccaaagaacaagaaagaaacagacgattttctaatatgtacacagcaaactacagaatgtcatattatccacctgtgaaacatctagtaagcaattgcatctatattttatttctcaagttggcctggcactaataaatatgtgaaagcttattcaagtgtcccagtacttcagcacttcccatccttttggaaactcctatcttgcctccctcccaaaagggctgtttcttttattaaaaaaaaaaaagaaatagaattaaatttgagaaaaggagaaaccctgaaatttaacagaactttgagagtcacttccaatctccttaaacatgattatctccttatccttgtccttttgtgatgctaataatagcagaaaaggaacaaatccaagactctaggtctcccttttttgttttactggttttattatagaattgtttttaagcctcttatggatgaaagctgcatttaaatactatctactgattttatagaaaggtatgtccatttcttgggtcactttcagagaaagaaaacaagcaaaataggttcttttgaatatgaataatttaaaagcataattgaagatgtagtgagtatttataattggaccttagttacacgtgcatttctcaaagggcttgtcattacaggagatattcagcacttacctaagatcaaaatgtcttcatcccaaattgggaatcgaattatttcatgccatatgcatgaggtttgcagacatttcaagattagccactttgcttgaaagaagaaaatgatcaaacctaaaataaactacacatggagaatctctctctctctctctgcctctctctctctctttctccctcttcttccttctctctctctcacaagcacacacacacacactcaatctccattctccaggcattgccagatggttaggagaagtgagctctctctggtcccctagatccctcggctctgctctcctttgcccatcagctccctgtggcctctatgctagtcctccctattctcctagtcaccctttgcctcttaagcccagccttgactctctacatatttttcatttctctttaccctttagtgtacaatagttgtagactctgacggaatgaaaacaaacaagaagcctaagcgttagaccctgctgtggctaaagatctagaaggcatatcagttttctctgtcaggcttcctacgttgccctcgtgcagggctcattgctctgcagagcgctggaagccccttcatgtatcgagagagaagctggagcacagagctctgatgcacagttggctgtttcagctctgactcagggaggaaagaaggatgccaaggctctgtcacagcggagaagtctaataccagagtggcacagagaaggattccagggatcagtcagggtgtcctgtacctatctgagtagagatgattcaaggatggggacatattccaggaaattgcacaatcttcccctggcagcttcagaggacgagtgaaaatagtgcagtatagtcaaagaagcaatgaatttaggatgaggaacctgaagtttctggaccagtttggtcactgcttagttacatgtccttaggaatgcttgtcacttaacctaaactttctgggttttatcctcattgctcaaactaagcaacaacaccgaagcttctctaatttgccttctgatgccaaatcggtcaaaactgaggtcagcagctaccatgacgaaagtaaaatggtatattgggtgaatgtttgaaaatttcagattttatattctgtaaagttatttacttactctatttcaacaccacaaaatcttgaaatttggaaggtaaccaaggaagctttgaaatttgttggcaaacccggagtagtatggtttcaaataccactccaacccagcacctgaggtcgggcaaactcacaaaatagagtttctaggtagcaggtgtttgctttggttttgcaatagcatttctcataacagaactgaaactgtatagattacaacactccaaagttatttttttttaacctaaagaaccctacttctagcacctcctctgaaagaatattttgctccaataccacgtgcaacaaacttatttagacagtatcaactctagcccttaataggttcaaggacaagtttactgcttcctttctacacgcttaagttacactctcttctcctgttctgatgactctaaatcttcagcctctcccagcattaatgtgtgagtcaacattgcagacctgagaaaggtttctagaatggtaacccaatgttctttagaactggagaattccattttccttttctggctttagtgttaatgtctgggaagggaggctcatgataagaaaataaaaatgagaaaagaagatctagttcataaaatgactataccccacgtaagtttgtaactgcacagtgttttgttgtacggctcagaaatgagcaagtgttagtattattaggcacacatcacgttcacagcttcgcgcagagacggatagtgtatttggatatatggaagtcatccaaatgcgttgctagaatatcaggcctatgtttgttctggtagaaccacagagactcacacaaagttctgaccctaccactctggtctgggctgagaccaccccaaaaaatcatctagagaatcaaaggggctcacatctcagttgcattctatttaaaagataaaggggccatactctccactgcaaagaagcattagtaaaacttcccgcacccaaattataatccggcaaccctagcttcagctaaaaagattatccccagaatctaaaagcttactattgttctttcttggagtccaaaatgcttagcagttctgcagttcacatacaaaactcaaaactctttttatcctgtattctgtgagttccttgatgatagtaattgggtcttattcatcactctgtatcctgtggctcacacagaatctggcaaattgcatatattcaataaatgttgaatatctaataacctccttattaatataacaaatattatcaacattctgtgcacatcaatgtcccatgctgctactgtagtcaggagttatttggctgggaagtggaaagtgttcacaaacatgatgcttatctaataaaatatcactgagcaataaggagaaatattttaaatagatttgaagttgtgaacaaataatttagagtccaaagaggaaaaagaaaattaactctgttttttatccctagaactcagaaactttactggattggtcaacaaagacaaactttttattgtataaaacagtagaattcatggaagggataattcttttggaacaggcttctcggttacttgccttagtaaaagaagtatctggagggcctggagagttcataaacatagttttctgtgcaagtgaagatctgtagtttggcttaaaaatccttgcatgtagttttgcttggcgtggaaagttattaggagacaatcctttatcctgttctgcaagcaatcaaacacatgatctcccttctagccattcctcatccagtacatgggcatttccagcctcctacatgtaacacttcaaacttcctctgggcgtctgcttagagctatgtgatggccacagtttgggcaaagcccttctttcttttaaatataggaactgttaccaagtttggtgcaggcttgaggaataattacataaaaatgggcttccacgatggtgaatcagcatgctgatttctcttggcaggaagctctcagggaaatgtctgtgaatcatttaaagatgctctctggtggatagagaaaccgcagtccaaaaacagatgggtgtatatttgctttgtaagcaaagggcatgtatcatactcgcatctaaaacagtgtccacatctttgccaaaggcactgaattttacctttttttattacctcgtggccagcacttcctcagtaggcatttcaggtgtgtcacaaaccatgttcatttttaatcttgaaaaagtcaatcgtctgtagtctgtactataaaatgatgcctgcaactttgtggtgaatattatccccaagttaacagtgaaataagtaaataaaactattattgaacaaaga

SEQ ID NO: 4105 - DNA, 581 bp, Homo sapiens
  source 1..581: mol_type = unassigned DNA
aaatgacagtcagaacttcagctaaggttttgctgtggcgtggcacctggtctctttctagaaggaaagttcaacatacagcacaattctggacacattgtattggtttgatgctcctacctggaacaggtaacagaggaagttcctaagttgtctggagattgcatgtcctcacacactaaaatcctctgagctgaatgattcagctttcactattgctgtgtctgtggacaaaaaagcaaaatgtgagtcaattccaggttccgtcacatttgggagttgccaagtaaaggaaaacataaaagattaatgttattattctgattttattttgttttgaggagaagcgtgggaaatgactaccatacaaatcaagaaattcatgaaggcaaacagttgatgactgtcacctagcaatctgttattttcttttatcctttccccaagacatatgccctctgacataagcattaaaatcaaattatacaattgtcagaaaacctgttctcaaagctttagggtaaaaattgtttaatcaaattgtaacacaaattgagaaatatcattaaagtgataatgcc

SEQ ID NO: 4106 - DNA, 587 bp, Homo sapiens
  source 1..587: mol_type = unassigned DNA
ttttagtacggtattgttgcagctgacctgtatacgtaaggaattactgggtcatcagctctggggaatgtcttttgattatgaacacattttcagcatgtgtccactgaaggtggagctggtctcttgggcagcctgacatctggtccactcctctgtcctatgccgggatcatcatgaccgtagagattatgtcactgttttgcatccttgttacataactcagttcctggtagattactatgtcagagagtcacaatgaccttgcacaataacagtacaacctcgcctttgtttccaaacatcagctcctcctggatacacagcccctccgatgcagggctgcccccgggaaccgtcactcatttcggcagctacaatgtttctcgagcagctggcaatttctcctctccagacggtaccaccgatgaccctctgggaggtcataccgtctggcaagtggtcttcatcgctttcttaacgggcatcctggccttggtgaccatcatcggcaacatcctggtaattgtgtcatttaaggtcaacaagcagctgaagacggtcaacaactacttcctcttaagcct

SEQ ID NO: 4107 - DNA, 2294 bp, Homo sapiens
  source 1..2294: mol_type = unassigned DNA
ttgtttgttcttttctagcacttgtgttctgattagtggccaaataaatgacagtcagaacttcagctaaggtacaataaggttttgctgtggcgtggcacctggtctctttctagaaggaaagttcaacatacagcacaattctggacacattgtattggtttgatgctcctacctggaacaggtggagctggtctcttgggcagcctgacatctggtccactcctctgtcctatgccgggatcatcatgaccgtagagattatgtcactgttttgcatccttgttacataactcagttcctggtagattactatgtcagagagtcacaatgaccttgcacaataacagtacaacctcgcctttgtttccaaacatcagctcctcctggatacacagcccctccgatgcagggctgcccccgggaaccgtcactcatttcggcagctacaatgtttctcgagcagctggcaatttctcctctccagacggtaccaccgatgaccctctgggaggtcataccgtctggcaagtggtcttcatcgctttcttaacgggcatcctggccttggtgaccatcatcggcaacatcctggtaattgtgtcatttaaggtcaacaagcagctgaagacggtcaacaactacttcctcttaagcctggcctgtgccgatctgattatcggggtcatttcaatgaatctgtttacgacctacatcatcatgaatcgatgggccttagggaacttggcctgtgacctctggcttgccattgactacgtagccagcaatgcctctgttatgaatcttctggtcatcagctttgacagatacttttccatcacgaggccgctcacgtaccgagccaaacgaacaacaaagagagccggtgtgatgatcggtctggcttgggtcatctcctttgtcctttgggctcctgccatcttgttctggcaatactttgttggaaagagaactgtgcctccgggagagtgcttcattcagttcctcagtgagcccaccattacttttggcacagccatcgctgctttttatatgcctgtcaccattatgactattttatactggaggatctataaggaaactgaaaagcgtaccaaagagcttgctggcctgcaagcctctgggacagaggcagagacagaaaactttgtccaccccacgggcagttctcgaagctgcagcagttacgaacttcaacagcaaagcatgaaacgctccaacaggaggaagtatggccgctgccacttctggttcacaaccaagagctggaaacccagctccgagcagatggaccaagaccacagcagcagtgacagttggaacaacaatgatgctgctgcctccctggagaactccgcctcctccgacgaggaggacattggctccgagacgagagccatctactccatcgtgctcaagcttccgggtcacagcaccatcctcaactccaccaagttaccctcatcggacaacctgcaggtgcctgaggaggagctggggatggtggacttggagaggaaagccgacaagctgcaggcccagaagagcgtggacgatggaggcagttttccaaaaagcttctccaagcttcccatccagctagagtcagccgtggacacagctaagacttctgacgtcaactcctcagtgggtaagagcacggccactctacctctgtccttcaaggaagccactctggccaagaggtttgctctgaagaccagaagtcagatcactaagcggaaaaggatgtccctggtcaaggagaagaaagcggcccagaccctcagtgcgatcttgcttgccttcatcatcacttggaccccatacaacatcatggttctggtgaacaccttttgtgacagctgcatacccaaaaccttttggaatctgggctactggctgtgctacatcaacagcaccgtgaaccccgtgtgctatgctctgtgcaacaaaacattcagaaccactttcaagatgctgctgctgtgccagtgtgacaaaaaaaagaggcgcaagcagcagtaccagcagagacagtcggtcatttttcacaagcgcgcacccgagcaggccttgtagaatgaggttgtatcaatagcagtgacaaaacgcacacatcaacccacagaccttaggaggaggaaggcgagggcggggtgacttctggtgatgataaaaatggttttatcacccagatgtgaaagaagctgcctgtttactgatccattgaataaacccattttaatagaaaaagtcaataccaattcagc

SEQ ID NO: 4108 - DNA, 333 bp, Homo sapiens
  source 1..333: mol_type = unassigned DNA
attcaagatgattggaagtatgttgccatggtgattgatcgtatttttctgtgggttttcaccctggtgtgcattctagggacagcaggattgtttctgcaacccctgatggccagggaagatgcataagcactaagctgtgtgcctgcctgggagacttccttgtgtcagggcaggaggaggctgcttcctagaacaaaaagcccaagagatccaacaattgaaacgaaaagaaaagtccacagaaacatccgatcaagaacctgggctatgaatttccaatcttcaacaacctgttaggaaaaaaataaaaatgcattaaataattgtaaa

SEQ ID NO: 4109 - DNA, 1889 bp, Homo sapiens
  source 1..1889: mol_type = unassigned DNA
gaggccgtctctgcgaccgccgcgcccgctcccgaccgtccgggtccgcggccagcccggccaccagccatgggctctggcccgctctcgctgcccctggcgctgtcgccgccgcggctgctgctgctgctgctgctgtctctgctgccagtggccagggcctcagaggctgagcaccgtctatttgagcggctgtttgaagattacaatgagatcatccggcctgtagccaacgtgtctgacccagtcatcatccatttcgaggtgtccatgtctcagctggtgaaggtggatgaagtaaaccagatcatggagaccaacctgtggctcaagcaaatctggaatgactacaagctgaaatggaacccctctgactatggtggggcagagttcatgcgtgtccctgcacagaagatctggaagccagacattgtgctgtataacaatgctgttggggatttccaggtggacgacaagaccaaagccttactcaagtacactggggaggtgacttggatacctccggccatctttaagagctcctgtaaaatcgacgtgacctacttcccgtttgattaccaaaactgtaccatgaagttcggttcctggtcctacgataaggcgaaaatcgatctggtcctgatcggctcttccatgaacctcaaggactattgggagagcggcgagtgggccatcatcaaagccccaggctacaaacacgacatcaagtacaactgctgcgaggagatctaccccgacatcacatactcgctgtacatccggcgcctgcccttgttctacaccatcaacctcatcatcccctgcctgctcatctccttcctcactgtgctcgtcttctacctgccctccgactgcggtgagaaggtgaccctgtgcatttctgtcctcctctccctgacggtgtttctcctggtgatcactgagaccatcccttccacctcgctggtcatccccctgattggagagtacctcctgttcaccatgatttttgtaaccttgtccatcgtcatcaccgtcttcgtgctcaacgtgcactacagaaccccgacgacacacacaatgccctcatgggtgaagactgtattcttgaacctgctccccagggtcatgttcatgaccaggccaacaagcaacgagggcaacgctcagaagccgaggcccctctacggtgccgagctctcaaatctgaattgcttcagccgcgcagagtccaaaggctgcaaggagggctacccctgccaggacgggatgtgtggttactgccaccaccgcaggataaaaatctccaatttcagtgctaacctcacgagaagctctagttctgaatctgttgatgctgtgctgtccctctctgctttgtcaccagaaatcaaagaagccatccaaagtgtcaagtatattgctgaaaatatgaaagcacaaaatgaagccaaagagattcaagatgattggaagtatgttgccatggtgattgatcgtatttttctgtgggttttcaccctggtgtgcattctagggacagcaggattgtttctgcaacccctgatggccagggaagatgcataagcactaagctgtgtgcctgcctgggagacttccttgtgtcagggcaggaggaggctgcttcctagctggagtgcaatggcgtgatctcagctcaccgcaacctccgccacctgggttcaagcgattctcctgccgcagcctcccaggtagctgggattacaggaacaaaaagcccaagagatccaacaattgaaacgaaaagaaaagtccacagaaacatccgatcaagaacctgggctatgaatttccaatcttcaacaacctgttaggaaaaaaataaaaatgcattaaataattgtaaa

SEQ ID NO: 4110 - DNA, 2030 bp, Homo sapiens
  source 1..2030: mol_type = unassigned DNA
gtccttcccagggtgtgttagcgtctctcctacggcgcccgcctagcccggtggtcccaaccccctgcgggagctgcacacgccccggaaacctgggacagaaactgagtccctctccttcctggtggtggtgacagcacctgctcagatctggtcggacgccgccggccggagcacccagcccggcggagaaggagctcgcccggcgctggggactgggacctggagccccttcccctaccgcacgtacgccccgccccgcgcacgcccgcccgcccgcccgcgcctggcgcagcttcactccggatggttcctgtcctcccgcgggtccgagggcgctggaaacccagcggcggcgaagcggagaggagccccgcgcgtctccgcccgcacggctccaggtctggggtctgcgctggagccgcgcggggagaggccgtctctgcgaccgccgcgcccgctcccgaccgtccgggtccgcggccagcccggccaccagccatgggctctggcccgctctcgctgcccctggcgctgtcgccgccgcggctgctgctgctgctgctgctgtctctgctgccagtggccagggcctcagaggctgagcaccgtctatttgagcggctgtttgaagattacaatgagatcatccggcctgtagccaacgtgtctgacccagtcatcatccatttcgaggtgtccatgtctcagctggtgaaggtggatgaagtaaaccagatcatggagaccaacctgtggctcaagcaaatctggaatgactacaagctgaaatggaacccctctgactatggtggggcagagttcatgcgtgtccctgcacagaagatctggaagccagacattgtgctgtataacaatgctgttggggatttccaggtggacgacaagaccaaagccttactcaagtacactggggaggtgacttggatacctccggccatctttaagagctcctgtaaaatcgacgtgacctacttcccgtttgattaccaaaactgtaccatgaagttcggttcctggtcctacgataaggcgaaaatcgatctggtcctgatcggctcttccatgaacctcaaggactattgggagagcggcgagtgggccatcatcaaagccccaggctacaaacacgacatcaagtacaactgctgcgaggagatctaccccgacatcacatactcgctgtacatccggcgcctgcccttgttctacaccatcaacctcatcatcccctgcctgctcatctccttcctcactgtgctcgtcttctacctgccctccgactgcggtgagaaggtgaccctgtgcatttctgtcctcctctccctgacggtgtttctcctggtgatcactgagaccatcccttccacctcgctggtcatccccctgattggagagtacctcctgttcaccatgatttttgtaaccttgtccatcgtcatcaccgtcttcgtgctcaacgtgcactacagaaccccgacgacacacacaatgccctcatgggtgaagactgtattcttgaacctgctccccagggtcatgttcatgaccaggccaacaagcaacgagggcaacgctcagaagccgaggcccctctacggtgccgagctctcaaatctgaattgcttcagccgcgcagagtccaaaggctgcaaggagggctacccctgccaggacgggatgtgtggttactgccaccaccgcaggataaaaatctccaatttcagtgctaacctcacgagaagctctagttctgaatctgttgatgctgtgctgtccctctctgctttgtcaccagaaatcaaagaagccatccaaagtgtcaagtatattgctgaaaatatgaaagcacaaaatgaagccaaagaggaacaaaaagcccaagagatccaacaattgaaacgaaaagaaaagtccacagaaacatccgatcaagaacctgggctatgaatttccaatcttcaacaacctgttaggaaaaaaataaaaatgcattaaataattgtaaa

SEQ ID NO: 4111 - DNA, 3202 bp, Homo sapiens
  source 1..3202: mol_type = unassigned DNA
ccttcctggtggtggtgacagcacctgctcagatctggtcggacgccgccggccggagcacccagcccggcggagaaggagctcgcccggcgctggggactgggacctggagccccttcccctaccgcacgtacgccccgccccgcgcacgcccgcccgcccgcccgcgcctggcgcagcttcactccggatggttcctgtcctcccgcgggtccgagggcgctggaaacccagcggcggcgaagcggagaggagccccgcgcgtctccgcccgcacggctccaggtctggggtctgcgctggagccgcgcggggagaggccgtctctgcgaccgccgcgcccgctcccgaccgtccgggtccgcggccagcccggccaccagccatgggctctggcccgctctcgctgcccctggcgctgtcgccgccgcggctgctgctgctgctgctgctgtctctgctgccagtggccagggcctcagaggctgagcaccgtctatttgagcggctgtttgaagattacaatgagatcatccggcctgtagccaacgtgtctgacccagtcatcatccatttcgaggtgtccatgtctcagctggtgaaggtggatgaagtaaaccagatcatggagaccaacctgtggctcaagcaaatctggaatgactacaagctgaaatggaacccctctgactatggtggggcagagttcatgcgtgtccctgcacagaagatctggaagccagacattgtgctgtataacaatgctgttggggatttccaggtggacgacaagaccaaagccttactcaagtacactggggaggtgacttggatacctccggccatctttaagagctcctgtaaaatcgacgtgacctacttcccgtttgattaccaaaactgtaccatgaagttcggttcctggtcctacgataaggcgaaaatcgatctggtcctgatcggctcttccatgaacctcaaggactattgggagagcggcgagtgggccatcatcaaagccccaggctacaaacacgacatcaagtacaactgctgcgaggagatctaccccgacatcacatactcgctgtacatccggcgcctgcccttgttctacaccatcaacctcatcatcccctgcctgctcatctccttcctcactgtgctcgtcttctacctgccctccgactgcggtgagaaggtgaccctgtgcatttctgtcctcctctccctgacggtgtttctcctggtgatcactgagaccatcccttccacctcgctggtcatccccctgattggagagtacctcctgttcaccatgatttttgtaaccttgtccatcgtcatcaccgtcttcgtgctcaacgtgcactacagaaccccgacgacacacacaatgccctcatgggtgaagactgtattcttgaacctgctccccagggtcatgttcatgaccaggccaacaagcaacgagggcaacgctcagaagccgaggcccctctacggtgccgagctctcaaatctgaattgcttcagccgcgcagagtccaaaggctgcaaggagggctacccctgccaggacgggatgtgtggttactgccaccaccgcaggataaaaatctccaatttcagtgctaacctcacgagaagctctagttctgaatctgttgatgctgtgctgtccctctctgctttgtcaccagaaatcaaagaagccatccaaagtgtcaagtatattgctgaaaatatgaaagcacaaaatgaagccaaagagattcaagatgattggaagtatgttgccatggtgattgatcgtatttttctgtgggttttcaccctggtgtgcattctagggacagcaggattgtttctgcaacccctgatggccagggaagatgcataagcactaagctgtgtgcctgcctgggagacttccttgtgtcagggcaggaggaggctgcttcctagtaagaacgtactttctgttatcaagctaccagctttgtttttggcatttcgaggtttacttattttccacttatcttggaatcatgcaaaaaaaaaaatgtcaagagtatttattaccgataaatgaacatttaactagcctttttggtatggtaaagagatgtcaaaatgtgattctatgtgattagtatgctatgctatggaatatacatgtaaaaatgtttccttttagttgttgaaacaaaactggatagaaaaatgctgttcagaaatatgaaaagtcattcagttatcactacagatctcccagtaatttttcttatttagcccataatctctttgaaggtttatactaattcagcaatcccccatcgttacccatttcttaccatgcatttctcgttctttactgggtctaaagggctatgcctccatttcagagagcttcaactacttctcttgcatacttctaaattataccatgagaaatcatgcctagttattcattgttaatataactgtcttagtacaccataaactgggtggattataaacaacagaaacttctcagttttggaggttgggaggtccaaggtcaaggcaccagcaaatttggtgtctggtgagggtcctcttcctcaaagggtgccttctagctgtgtcctcacatgactgaagggactagctatctctgtggggtctattttataagggcactaaccccattcatgagagcagagcccccatggcctaatcacctttccaaggccccaccttctatctaagacaatcacgctgggaataggtttcaacatatgaattgggggaggacacatttggaccacagcatgaacctttagaacagggtttctcagccttagcactatggacattttgggctggataaatatgtgttggtacagaatgggggtatcctgtgcattgtaggatctttagcagtaccctagcctcaactcactagatgccaatgacataccttgcttcttcaccagttatgataaccaagaatgtctccattgttaaatgttcccttaggagcaaaattgcccctggttgagaaacattgctttagacaaattgttaagagtatcatgtactacacttctgaaacttaacgtgatcatcaccactgacagatgattcacagagactgtttgaatcttgtctcactagtttttcctgtgcaaaaataaaatggacagaattgcagccc

SEQ ID NO: 4112 - DNA, 573 bp, Homo sapiens
  source 1..573: mol_type = unassigned DNA
aatctcctgacttagccaggatggtctcaatctcctgactttgtgatccaccctcctcggcctcccaaagtgctgggattacagtgctgttggggatttccaggtggacgacaagaccaaagccttactcaagtacactggggaggtgacttggatacctccggccatctttaagagctcctgtaaaatcgacgtgacctacttcccgtttgattaccaaaactgtaccatgaagttcggttcctggtcctacgataaggcgaaaatcgatctggtcctgatcggctcttccatgaacctcaaggactattgggagagcggcgagtgggccatcatcaaagccccaggctacaaacacgacatcaagtacaactgctgcgaggagatctaccccgacatcacatactcgctgtacatccggcgcctgcccttgttctacaccatcaacctcatcatcccctgcctgctcatctccttcctcactgtgctcgtcttctacctgccctccgactgcggtgagaaggtgaccctgtgcatttctgtcctcctctccctgacggtgtttctcctggt

SEQ ID NO: 4113 - DNA, 499 bp, Homo sapiens
  source 1..499: mol_type = unassigned DNA
ctctggcccgctctcgctgcccctggcgctgtcgccgccgcggctgctgctgctgctgctgctgtctctgctgccagtggccagggcctcagaggctgagcaccgtctatttgagcggctgtttgaagattacaatgagatcatccggcctgtagccaacgtgtctgacccagtcatcatccatttcgaggtgtccatgtctcagctggtgaaggtggatgaagtaaaccagatcatggagaccaacctgtggctcaagcaagtaagtgaccagaccctaggcactgctgccccctggtggtgactgttttatttgctttaggtgaaccaagaaaggcctaaagaccaggcttcatttacttctgtggaacccagattggggtccactgactggcagatatatctcttctaaggcttgaggtcacatgcactgccctacagtccccctggaaggactgtagggcccaacccctcaagtcccagatggacaggttgcagc

SEQ ID NO: 4114 - DNA, 535 bp, Homo sapiens
  source 1..535: mol_type = unassigned DNA
gtttataatccttattttgactggtaaagacacaggttcagagaggttaagccacttgcctaagctcacacagcttacaagtgatttgtcaggatttgcaccagatctgtccaactccagagcccaggcttgcaaccactgtgcttctcactgaatgcgtgtggccaggtagaatcctgcccctcttgggcctcagtttcccattttgtaacccactgggttagactggcctgaaagtctagggttccacagaatccccccacaggtggaggggatgctgtagatgggtgatgtttctgctgggctgggtgggggaggttaagtaacgatttccccagggactgacagggctgcttcccacagtggccagggcctcagaggctgagcaccgtctatttgagcggctgtttgaagattacaatgagatcatccggcctgtagccaacgtgtctgacccagtcatcatccatttcgaggtgtccatgtctcagctggtgaaggtggatgaagtaaaccagatcatggagaccaacct

SEQ ID NO: 4115 - DNA, 592 bp, Homo sapiens
  source 1..592: mol_type = unassigned DNA
aagaggggagtcgcttcgggactggggctggagctggagcgccagcctctcctccggttgtagcctcctagcgctcctggctgcgtcgctgagggaccctccaccgggagagcgcctcctgtcttcctcccgctctccagaggagcctgctgggggaagccggccctggcccgccgctgggaggctcttgggtgcctgggagggctggtgggtagcgagagtcggggaccgggcaaggctgcagggaattcctggagggcccaggccggcggtctgtcgtgcggctgtgagctcagagcgctttccgccctcggtgccgaggcctgcactactcagaacgccatacgctctcaaccgacctcctgcctgggacccttctttcatcctggggaaggagagtggggagcaggaaaaatcctatttcaagacctgaggaagttggattcaacttcctagaggattctcctcccgcttccccaagctgcccccagatctgtacgtgggaatcagaagacagctgacccgtggccagggcctcagaggctgagcaccgtctatttgagcggctgtttgaagattacaatgagatcat

SEQ ID NO: 4116 - DNA, 2718 bp, Homo sapiens
  source 1..2718: mol_type = unassigned DNA
gctcggagctgtagccgccgctgccgccgctgctcttggctcggggacgcgggcgggcgctccgagaggctctggtgcctgcggctgctgctctcctccggcgcccggggctgcggcgctccgggtcccggcccctgtcccggcatctctcgggtccctgagccccggccccgggtcccgcgtccggccggagagaacgcactcagctgctcgagccgccccgggctcgcgcccccgggccatgaagaggggcccgtgaggcgcgcgcggagtcggaggaagaggagggaggagggaggccgaggaggagggcgcgggaggcggaggatgccgccgcggctgctgccgccgccgccacccgcgggtccccggcgaccctgactccagacccgaggatggagccggcgctgggcgctgcagctgctcccggcgcgtccccgaccaggtagctggtgtcacttcggtgtggttggaagaagactttctccccagctgcattcccggaggcgccctttcgacctggaggccgggtctgctggccacagggctgccgcactggctgggactgccagctgggcctggagacgctggtggctgtggactccccagcttggagcagtccctctttgacctcaccccttggagaagcagccccatgaaggtgcccagccatgcaatgttcctggaaggccgtcctcctccttgccctggcctccattgccatccagtacacggccatccgcaccttcaccgccaagtcctttcacacctgccccgggctggcagaggccgggctggccgagcgactgtgcgaggagagccccaccttcgcctacaacctctcccgcaagacccacatcctcatcctggccaccacgcgcagtggctcctccttcgtgggccagctcttcaaccagcacctggacgtcttctacctgtttgagcccctctaccacgtccagaacacgctcatcccccgcttcacccagggcaagagcccggccgaccggcgggtcatgctaggcgccagccgcgacctcctgcggagcctctacgactgcgacctctacttcctggagaactacatcaagccgccgccggtcaaccacaccaccgacaggatcttccgccgcggggccagccgggtcctctgctcccggcctgtgtgcgaccctccggggccagccgacctggtcctggaggagggggactgtgtgcgcaagtgcgggctactcaacctgaccgtggcggccgaggcgtgccgcgagcgcagccacgtggccatcaagacggtgcgcgtgcccgaggtgaacgacctgcgcgccctggtggaagacccgcgattaaacctcaaggtcatccagctggtccgagacccccgcggcattctggcttcgcgcagcgagaccttccgcgacacgtaccggctctggcggctctggtacggcaccgggaggaaaccctacaacctggacgtgacgcagctgaccacggtgtgcgaggacttctccaactccgtgtccaccggcctcatgcggcccccgtggctcaagggcaagtacatgttggtgcgctacgaggacctggctcggaaccctatgaagaagaccgaggagatctacgggttcctgggcatcccgctggacagccacgtggcccgctggatccagaacaacacgcggggcgaccccaccctgggcaagcacaaatacggcaccgtgcgaaactcggcggccacggccgagaagtggcgcttccgcctctcctacgacatcgtggcctttgcccagaacgcctgccagcaggtgctggcccagctgggctacaagatcgccgcctcggaggaggagctgaagaacccctcggtcagcctggtggaggagcgggacttccgccccttctcgtgacccgggcggtgcgggtgggggcgggaggcgcaaggtgtcggttttgataaaatggaccgtttttaactgttgccttattaacccctccctctcccacctcatcttcgtgtccttcctgcccccagctcaccccactcccttctgccccttttttgtctctgaaatttgcactacgtcttggacgggaatcactggggcagagggcgcctgaagtagggtcccgccccccccccccccattcagacacatggatgttgggtctctgtgcggacggtgacaatgtttacaagcaccacatttacacatccacacacgcacacgggcactcgcgaggcgacttctcaagcttttgaatgggtgagtggtcgggtatctagtttttgcactgtcttactattcaaggtaagaggatacaaacaagaggaccacttgtctctaatttatgaatggtgtccatcctttccccatccctgcctcctgcccctgacgcccatttccccccttagagcagcgaaactgccccctcctgcccgcccttgcctgtcggtgaggcaggtttttactgtgaggtgaacgtggacctgtttctgtttccagtctgtggtgatgctgtctgtctgtctgagtctcgtggccgcccctggaccagtgatgactgatgaatcttatgagcttctgattgatctcggggtccatctgtgatatttctttgtgccaaaaagaaaaaaaaagagtggatcagtttgctaaatgaacattgaaattgaaatgctttatctgtgttttctgtaaataaaagagtgcaataatc

SEQ ID NO: 4117 - DNA, 516 bp, Homo sapiens
  source 1..516: mol_type = unassigned DNA
ggaccgtttttaactgttgccttattaacccctccctctcccacctcatcttcgtgtccttcctgcccccagctcaccccactcccttctgccccttttttgtctctgaaatttgcactacgtcttggacgggaatcactggggcagagggcgcctgaagtagggtcccgccccccccccccccattcagacacatggatgttgggtctctgtgcggacggtgacaatgtttacaagcaccacatttacacatccacacacgcacacgggcactcgcgaggcgacttctcaagcttttgaatggtctgtggtgatgctgtctgtctgtctgagtctcgtggccgcccctggaccagtgatgactgatgaatcttatgagcttctgattgatctcggggtccatctgtgatatttctttgtgccaaaaagaaaaaaaaagagtggatcagtttgctaaatgaacattgaaattgaaatgctttatctgtgttttctgtaaataaaagagtgcaataa

SEQ ID NO: 4118 - DNA, 1361 bp, Homo sapiens
  source 1..1361: mol_type = unassigned DNA
gctgctcttggctcggggacgcgggcgggcgctccgagaggctctggtgcctgcggctgctgctctcctccggcgcccggggctgcggcgctccgggtcccggcccctgtcccggcatctctcgggtccctgagccccggccccgggtcccgcgtccggccggagagaacgcactcagctgctcgagccgccccgggctcgcgcccccgggccatgaagaggggcccgtgaggcgcgcgcggagtcggaggaagaggagggaggagggaggccgaggaggagggcgcgggaggcggaggatgccgccgcggctgctgccgccgccgccacccgcgggtccccggcgaccctgactccagacccgaggatggagccggcgctgggcgctgcagctgctcccggcgcgtccccgaccaggtagctggtgtcacttcggtgtggttggaagaagactttctccccagctgcattcccggaggcgccctttcgacctggaggccgggtctgctggccacagggctgccgcactggctgggactgccagctgggcctggagacgctggtggctgtggactccccagcttggagcagtccctctttggtaagtggttgaaccctcctgtgttctccccaggagcagccccagcccccactcaggtctggtagctgagccagcctccagagagggtgcctacaggatgctcaggtgggctcctggccccggactctcagcggccccattcgctctttctgcttctccatggtccctccccagtcccccttctgtgggcagaggggacacaggaggtaagaggggaggcccctgactccctaagatcttctttgcaggccagttcactctgtgtcagtggggattatgtcacctccatggcctggacccttgtccctagagaccaggaacagaccctgggtgctgggaagggttgcctctcagcagaccctggacatctgtctctgctccagagactcttagagactccacaagccccagaagtctacatctggagtaagtggtcacctgcatccatgagttggaaggggcttgacacagttgtccaccttgcctggccgtgctggcagctcaccgaccatggtctgcaggggtccttcatgctcaggggattggggtcagatggaggcatctgatagggactcttctttcccctagggatgggcagaggacagaggaaagaggaccacctggagaactgggcgccagctcgtgggggtgggagacgctggcagtgaggaggggcagtgtttgaggcaggccctcgtcatttcctcagtgtgggagtagggggagtcaggctcttgccccgtgaggcccctctaaggaa

SEQ ID NO: 4119 - DNA, 2842 bp, Homo sapiens
  source 1..2842: mol_type = unassigned DNA
cggccggataggcgcgagggggccgcgtgaggcggtgccggcgttctggcccccaaagccggtctagcgcgccgggcgtcttccttacttccgctgccgccgccgccacatcccgggacccgacgggccgcggcgcggaggcctcggggcaaggtggggcgggcctcccgagctcccaggaccccgcgcgcttcgcccacaggcccggcgaagcccgacccgcgcggcgcccccagggccaggggaggagcctaaggacccggacgagcgccgctccagtaggtgacaagaggaaccaagaacctcagttcaggggaaacacagcaaggaaatgtgagccccaggctgcagaaggaagagtcagtgaatggctgcggtgtgacaacatgcaccaccagtggcttctgctggccgcatgcttttgggtgattttcatgttcatggtggctagcaagttcatcacgttgacctttaaagacccagatgtgtacagtgccaaacaggagtttctgttcctgacaaccatgccggaagtgaggaagttgccagaagagaagcacattcctgaggaactgaagccaactgggaaggagcttccagacagccagctcgttcagcccctggtctacatggagcgcctggaactcatcagaaacgtctgcagggatgatgccctgaagaatctctcgcacactcctgtctccaagtttgtcctggaccgaatatttgtctgtgacaagcacaagattcttttctgccagactcccaaagtgggcaacacccagtggaagaaagtgctgattgttctaaatggagcattttcttccattgaggagatccccgaaaacgtggtgcacgaccacgagaagaacggccttcctcggctctcttccttcagtgatgcagaaattcagaagcgattgaaaacatacttcaagttttttattgtaagagatcccttcgaaagacttatttctgcatttaaggataaatttgttcacaatccccggtttgagccttggtacaggcatgagattgctcctggcatcatcagaaaatacaggaggaaccggacagagacccgggggatccagtttgaagatttcgtgcgctacctcggcgatccgaaccacagatggctagaccttcagtttggggaccacatcattcactgggtgacgtatgtagagctctgtgctccctgtgagataatgtacagtgtgattggacaccacgagaccctggaggacgatgccccatacatcttaaaagaggctggcattgaccacctggtgtcatacccgactatccctccgggcattaccgtgtataacagaaccaaggtggagcactatttcctgggcatcagcaaacgagacatccgacgcctgtatgcccgtttcgaaggggactttaagctctttgggtaccagaaaccagactttttgctaaactaatgcataagacctatgaattcaaatatctttattagacctggggctaaccaggtgaagatctgagcccagaaatgacccttcctccaccacacccctcctttgaggacgcccggggtctcccacaggcctgtgagttgcctcggcatatgacgcagaaccccaactgttacaacttagtttggatgtaagatgctctgaggaccctgcccacacccctgcgtgcattaggatgtcgctggcctttgctcacctcagaggggagaaaaggctaaagatttgcagtttgacagcccagcagggaggaagcatcacacagcgttaggagccgtttccttcaggtgttaaggaaggggatgcccctgaggttctcctggctagtcagggtggcttcacccatcactggtgggttgcaggaacagcacccaggactctgaggagggacagagaagcaagggggctgctgaaatcgcagagacttttgcagcatcagatctgaggagtaaaacggcacctctggccttcatcttggtgctgcgacaattgtggaggcaaagcattctttctgtgactattttgttcctgtagacagtcagcgatggccagagggtggtgtggtgtccaggggtccatctttccagaatccatgcctgtgtaatgctggtccatgcttctgaacctgtgtctgccaagcgcctatttcattcagcacaagacatacgattttagaaggtgaggggaggggaggctttttctacctgagaaggggagtgtctttgagggccttaaaaggaccatggcccaggaatgggggcgctggttgggcttggagctcaggctgctgtggatcccggcgcatcagttctgacttgccttacctgggtggacagcagtgaatctccacctgtcttctccagggagctcccatgttggggctgaagacgagcaggggcaacctgccagcatcacagaattcagtgtagtttatacatttcgattcctttcatctcagcaaaatgggcactgccagagccatttctgatcacaccaccatcctggaccatgtgactggaaggtgggtaaccaagttcaccagcaataaaacccagcgcccaggtagcctccagcagtgcggcttcctggcaacaaggtaggccctggtgcagggcaagccgcagcgaccatttcagataccgtccacagccaggaccgctgagaactgggacagtttcctgggatgagtgccagcctgagcctgcatggtgccgccgagcccggggtggaggagggagccaggcttcgcttcaaggcggcctctaccttttctcagaatggtttcctgattgtgtcaatgtgaaagttaaataaaatttatgtgccaaacctga

SEQ ID NO: 4120 - DNA, 1338 bp, Homo sapiens
  source 1..1338: mol_type = unassigned DNA
aagaaggagcatgtgcagcttcggtgcgaggggagtcaggggtgggaatgcacgttccctgcctgaggggccccggggtgccctgagcctctgatcttcgctgtcaggaggcctgtccgaagttggaggttgaggcatgcagttctgcacttctggctgggaagtgacaagaggaaccaagaacctcagttcaggggaaacacagcaaggaaatgtgagccccaggctgcagaaggaagagtcagtgaatggctgcggtgtgacaacatgcaccaccagtggcttctgctggccgcatgcttttgggtgattttcatgttcatggtggctagcaagttcatcacgttgacctttaaagacccagatgtgtacagtgccaaacaggagtttctgttcctgacaaccatgccggaagtgaggaagttgccagaagagaagcacattcctgaggaactgaagccaactgggaaggagcttccagacagccagctcgttcagcccctggtctacatggagcgcctggaactcatcagaaacgtctgcagggatgatgccctgaagaatctctcgcacactcctgtctccaagtttgtcctggaccgaatatttgtctgtgacaagcacaagattcttttctgccagactcccaaagtgggcaacacccagtggaagaaagtgctgattgttctaaatggagcattttcttccattgaggagatccccgaaaacgtggtgcacgaccacgagaagaacggccttcctcggctctcttccttcagtgatgcagaaattcagaagcgattgaaaacatacttcaagttttttattgtaagagatcccttcgaaagacttatttctgcatttaaggataaatttgttcacaatccccggtttgagccttggtacaggcatgagattgctcctggcatcatcagaaaatacaggaggaaccggacagagacccgggggatccagtttgaagatttcgtgcgctacctcggcgatccgaaccacagatggctagaccttcagtttggggaccacatcattcactgggtgacgtatgtagagctctgtgctccctgtgagataatgtacagtgtgattggacaccacgagaccctggaggacgatgccccatacatcttaaaagaggctggcattgaccacctggtgtcatacccgactatccctccgggcattaccgtgtataacagaaccaaggtggagcactatttcctgggcatcagcaaacgagacatccgacgcctgtatgcccgtttcgaaggggactttaagctctttgggtaccagaaaccagactttttgctaaactaa

SEQ ID NO: 4121 - DNA, 519 bp, Homo sapiens
  source 1..519: mol_type = unassigned DNA
gcccggcgaagcccgacccgcgcggcgcccccagggccaggggaggagcctaaggacccggacgagcgccgctccagtaggtgacaagaggaaccaagaacctcagttcaggggaaacacagcaaggaaatgtgagccccaggctgcagaaggaagagtcagtgaatggctgcggtgtgacaacatgcaccaccagtggcttctgctggccgcatgcttttgggtgattttcatgttcatggtggctagcaagttcatcacgttgacctttaaagacccagatgccaactgggaaggagcttccagacagccagctcgttcagcccctggtctacatggagcgcctggaactcatcagaaacgtctgcagggatgatgccctgaagaatctctcgcacactcctgtctccaagtttgtcctggaccgaatatttgtctgtgacaagcacaagattcttttctgccagactcccaaagtgggcaacacccagtggaagaaagtgctgattgttctaaatg

SEQ ID NO: 4122 - DNA, 604 bp, Homo sapiens
  source 1..604: mol_type = unassigned DNA
tgggcccctctccccgccgcggggcgcacggaaaaaccggggaacccgcgggttttgtcctggcgagccacatcccgtgacaagaggaaccaagaacctcagttcaggggaaacacagcaaggaaatgtgagccccaggctgcagaaggaagagtcagtgaatggctgcggtgtgacaacatgcaccaccagtggcttctgctggccgcatgcttttgggtgattttcatgttcatggtggctagcaagttcatcacgttgacctttaaagacccagatgtgtacagtgccaaacaggagtttctgttcctgacaaccatgccggaagtgaggaagttgccagaagagaagcacattcctgaggaactgaagccaactgggaaggagcttccagacagccagctcgttcagcccctggtctacatggagcgcctggaactcatcagaaacgtctgcagggatgatgccctgaagaatctctcgcacactcctgtctccaagtttgtcctggaccgaatatttgtctgtgacaagcacaagattcttttctgccagactcccaaagtgggcaacacccagtggaagaaagtgctgattgttctaa

SEQ ID NO: 4123 - DNA, 574 bp, Homo sapiens
  source 1..574: mol_type = unassigned DNA
actatctaggtttatgtaagaacgctctgatgtttgcagaagaacatcgcctaacgatacatttctcagaagtgacaagaggaaccaagaacctcagttcaggggaaacacagcaaggaaatgtgagccccaggctgcagaaggaagagtcagtgaatggctgcggtgtgacaacatgcaccaccagtggcttctgctggccgcatgcttttgggtgattttcatgttcatggtggctagcaagttcatcacgttgacctttaaagacccagatgtgtacagtgccaaacaggagtttctgttcctgacaaccatgccggaagtgaggaagttgccagaagagaagcacattcctgaggaactgaagccaactgggaaggagcttccagacagccagctcgttcagcccctggtctacatggagcgcctggaactcatcagaaacgtctgcagggatgatgccctgaagaatctctcgcacactcctgtctccaagtttgtcctggaccgaatatttgtctgtgacaagcacaagattcttttctgccagactcccaaagtgggcaacacccag

SEQ ID NO: 4124 - DNA, 585 bp, Homo sapiens
  source 1..585: mol_type = unassigned DNA
atgcaataagaaggcgtccttgtgcgggatgctgtgacccgcggaattattgatattgtgcgagcctacaatttacttctttcatccttggctgagaatttgcgtttgtaattgtagatggagagaggaagaaagggttcagcttgggtccaaggagcatgcagaggaaggcagggaagaaggagcatgtgcagcttcgtgacaagaggaaccaagaacctcagttcaggggaaacacagcaaggaaatgtgagccccaggctgcagaaggaagagtcagtgaatggctgcggtgtgacaacatgcaccaccagtggcttctgctggccgcatgcttttgggtgattttcatgttcatggtggctagcaagttcatcacgttgacctttaaagacccagatgtgtacagtgccaaacaggagtttctgttcctgacaaccatgccggaagtgaggaagttgccagaagagaagcacattcctgaggaactgaagccaactgggaaggagcttccagacagccagctcgttcagcccctggtctacatggagcgcctggaactcatcagaaacgtctgcagggatg

SEQ ID NO: 4125 - DNA, 559 bp, Homo sapiens
  source 1..559: mol_type = unassigned DNA
agcgcctgggcccctctccccgccgcggggcgcacggaaaaaccggggaacccgcgggttttgtcctggcgagccacatcccgtgacaagaggaaccaagaacctcagttcaggggaaacacagcaaggaaatgtgagccccaggctgcagaagaccctactgtcgcattaatttctggcaaccacactgagaaaggtgtagattaagctggaaaatcacgaagagtgccaagggattggtcagtttttactgggggtctgcaccaggccaggaagagtcagtgaatggctgcggtgtgacaacatgcaccaccagtggcttctgctggccgcatgcttttgggtgattttcatgttcatggtggctagcaagttcatcacgttgacctttaaagacccagatgtgtacagtgccaaacaggagtttctgttcctgacaaccatgccggaagtgaggaagttgccagaagagaagcacattcctgaggaactgaagccaactgggaaggagcttccagacagccagctcgttcagcccctggtctacatggagcgcctg

SEQ ID NO: 4126 - DNA, 692 bp, Homo sapiens
  source 1..692: mol_type = unassigned DNA
gggtgggtttcagcgcctgggcccctctccccgccgcggggcgcacggaaaaaccggggaacccgcgggttttgtcctggcgagccacatcccgtgactgggttaaaatgaaaagacacaaagagagaagtggtcttttcccttccctccccattataattaagagcttagtccatcttggctcagaattggaattcagaattcagaattgctcttgaccctgaagaatagaatctcaaagaaatacctgagcagaaaattctcttcttcgctgaaatgaaaattggagtgtttgcaaaactgaacaaagaaaggaaagaatttgtaaacatcacaggcaacttgcagttatattcggatcatttttcagtgtttgaggagttcatacaataaaaagtgacaagaggaaccaagaacctcagttcaggggaaacacagcaaggaaatgtgagccccaggctgcagaaggaagagtcagtgaatggctgcggtgtgacaacatgcaccaccagtggcttctgctggccgcatgcttttgggtgattttcatgttcatggtggctagcaagttcatcacgttgacctttaaagacccagatgtgtacagtgccaaacaggagtttctgttcctgacaaccatgccggaagtgaggaagttgccagaagagaagcacattcctgaggaactgaag

SEQ ID NO: 4127 - DNA, 673 bp, Homo sapiens
  source 1..673: mol_type = unassigned DNA
agtagggtgagctcggggacgcgcaggcgggtgggtttcagcgcctgggcccctctccccgccgcggggcgcacggaaaaaccggggaacccgcgggttttgtcctggcgagccacatcccgatggagagaggaagaaagggttcagcttgggtccaaggagcatgcagaggaaggcagggaagaaggagcatgtgcagcttcggtgcgaggggagtcaggggtgggaatgcacgttccctgcctgaggggccccggggtgccctgagcctctgatcttcgctgtcaggaggcctgtccgaagttggaggttgaggcatgcagttctgcacttctggctgggaaggtgaaccaggttttccaaaatgtcatttttgctttccaagtctgcaaggcaggaaagggttgggcagtgaatggaaagtagtgcagccaggttctggttagctcagcggcaggactgtcataacgtgacaagaggaaccaagaacctcagttcaggggaaacacagcaaggaaatgtgagccccaggctgcagaaggaagagtcagtgaatggctgcggtgtgacaacatgcaccaccagtggcttctgctggccgcatgcttttgggtgattttcatgttcatggtggctagcaagttcatcacgttgacctttaaagacccagatg

SEQ ID NO: 4128 - DNA, 564 bp, Homo sapiens
  source 1..564: mol_type = unassigned DNA
gttctggcccccaaagccggtctagcgcgccgggcgtcttccttacttccgctgccgccgccgccacatcccgggacccgacgggccgcggcgcggaggcctcggggcaaggtggggcgggcctcccgagctcccaggaccccgcgcgcttcgcccacaggcccggcgaagcccgacccgcgcggcgcccccagggccaggggaggagcctaaggacccggacgagcgccgctccagtaggtgacaagaggaaccaagaacctcagttcaggggaaacacagcaaggaaatgtgagccccaggctgcagaagaccctactgtcgcattaatttctggcaaccacactgagaaaggtgtagattaagctggaaaatcacgaagagtgccaagggattggtcagtttttactgggggtctgcaccaggccaggcaaccctattggtgaccccaggaaacacacgaagccttatacacgggcacctgagggtggtttgcgagccatccggagaaaacccaggcagcttggcagatgcctggttcctgtgagattctaggatgtaaat

SEQ ID NO: 4129 - DNA, 596 bp, Homo sapiens
  source 1..596: mol_type = unassigned DNA
aggagcctaaggacccggacgagcgccgctccagtaggtgacaagaggaaccaagaacctcagttcaggggaaacacagcaaggaaatgtgagccccaggctgcagaagaccctactgtcgcattaatttctggcaaccacactgagaaaggtgtagattaagctggaaaatcacgaagagtgccaagggattggtcagtttttactgggggtctgcaccaggccaggtgggtgctggttttttgtctacattgtctcatttaatcctcatggccactctgaggtagtggtaggaggagggccttctattagagatgggacattgaggcttagagaggttaagtgacttatggagtcacagagctaatgggtgtgagcagggatttgaaccaagtctggggttctttgtgcctcactatctctgacatggagtggcggaaggaggaggggattgtgggatggagacaggagacaggacagctggcttgcaaggaatttggcatgcccctgctgggtggtgttgctgataaactacagtacactcggttaaatgtgaagttcagaaaacaacacataggtttttgtttttgtttttt

SEQ ID NO: 4130 - DNA, 487 bp, Homo sapiens
  source 1..487: mol_type = unassigned DNA
gtgttttggcgacttgaagacctccctagttcgcgggagtagcgggaagagccttcctcgcgttaattatgcaataagaaggcgtccttgtgcgggatgctgtgacccgcggaattattgatatttgactgggttaaaatgaaaagacacaaagagagaagtggtcttttcccttccctccccattataattaagagcttagtccatcttggctcagaattggaattcagaattcagaattgctcttgaccctgaagaatagaatctcaaagaaatacctgagcagaaaattctcttcttcgctgaaatgaaaattggagtgtttgcaaaactgaacaaagaaaggaaagaatttgtaaacatcacaggcaacttgcagttatattcggatcatttttcagtgtttgaggagttcatacaataaaaagtgacaagaggaaccaagaacctcagttcaggggaaacacagcaaggaaatgtgagcccc

SEQ ID NO: 4131 - DNA, 423 bp, Homo sapiens
  source 1..423: mol_type = unassigned DNA
gtgcatgtccaggctttggggcaggtaactgaagtctttggcctatgaggtgagaggtcacttgggtgacctgggagtaaatcccttcccctccctggctctgtaaagccaagtgttaaatgagagacttatattccaggcaaaggctttgtgcaaatgcccatctaagccatgccctctgcaaggaatcccctttcttagtgatgatggtggggaggtggggagggtgcagtgcaactcccattcctgatctcctatcaccagagcagaagaatcactggagaacgactctgtctgaagcttgttcagcctggcttccttgagcaagcaacttattcacaggcgccctcccctcgccgggggccgcgagttgcatttggtaaaacccagccccggaatatatagatcgttggagcgcaatga

SEQ ID NO: 4132 - DNA, 936 bp, Homo sapiens
  source 1..936: mol_type = unassigned DNA
ggaatatatagatcgttggagcgcaatgaagtagcctttggagagaagggagagggcccgtcggacagccacagcggccagcgcagcggcagcggcggcggcaccaccatcaccgctcgcaccccagccgcccggcccgcgaccaggcagcggcggccgccggcgggatcggaggaggcggcggagcggcgaggaggaggagcaggagcgcgcagccagcgggtccacgcatctcagcacttccagaccaactccggcaccttccacacccctgcccgggctgggggctccgagagcggccgcgaagcgactccgatcctccctctgagccttgctcagctctgccccgcgcctcccgggctccggtccgcgcggcggggtccctgctcctgcgccccgggcgcgcttcccggacaccccggtccccgcagccaggacaaagccatgaagccagcgctgctggaagtgatgaggatgaacagaatctgccggatggtgctggccacttgcttgggatcctttatcctggtcatcttctatttccaaagtatgttgcacccagtcatgcggaggaatccctttggtgtggacatctgctgccggaaggggtcccgaagccccctgcaggaactctacaacccaatccaggtaagcttcaagcactctgtcagcatgtgaattttttttttttgtaggtatggatactaaaaactctaaaattgtggtctttgggggatttaaaacttcctttcacagcctggcattttaccttcagtggttgctttctccgtcaccctttttctatgtagcatctctgaaaaatctagcaggggatgtttagaattagagaaatgcctaggtttagtgctaagcattcagacctgcccagggtttgaactcctgagattaacagtctcaagttcgagcaatgggact

SEQ ID NO: 4133 - DNA, 5696 bp, Homo sapiens
  source 1..5696: mol_type = unassigned DNA
atatatagatcgttggagcgcaatgaagtagcctttggagagaagggagagggcccgtcggacagccacagcggccagcgcagcggcagcggcggcggcaccaccatcaccgctcgcaccccagccgcccggcccgcgaccaggcagcggcggccgccggcgggatcggaggaggcggcggagcggcgaggaggaggagcaggagcgcgcagccagcgggtccacgcatctcagcacttccagaccaactccggcaccttccacacccctgcccgggctgggggctccgagagcggccgcgaagcgactccgatcctccctctgagccttgctcagctctgccccgcgcctcccgggctccggtccgcgcggcggggtccctgctcctgcgccccgggcgcgcttcccggacaccccggtccccgcagccaggacaaagccatgaagccagcgctgctggaagtgatgaggatgaacagaatctgccggatggtgctggccacttgcttgggatcctttatcctggtcatcttctatttccaaatcatgcggaggaatccctttggtgtggacatctgctgccggaaggggtcccgaagccccctgcaggaactctacaacccaatccagctggagctctcaaacactgctgtcctgcaccagatgcggcgggaccaggtgacagacacgtgccgagccaacagcgccacaagccgtaagcggagggtgctgacccccaacgacctgaagcacttggtggtggatgaggaccacgagctcatctactgctacgtgcccaaggtggcctgcaccaactggaagcggctcatgatggtcctgaccgggcgggggaagtacagcgaccccatggagatcccggccaacgaggcacacgtctccgccaacctgaagaccctgaaccagtacagcatcccagaaatcaaccaccgcttgaaaagctacatgaagttcctgtttgtccgggagcccttcgagaggctagtgtccgcctaccgcaacaagttcacccagaagtacaacatctccttccacaagcggtacggcaccaagatcatcaaacgccagcggaagaacgccacccaggaggccctgcgcaaaggggacgatgtcaaattcgaggagtttgtggcctatctcatcgacccacacacccagcgggaggagcctttcaacgaacactggcaaaccgtctactcactctgccatccctgccacatccactatgacctcgtgggcaagtacgagacactggaagaggattctaattacgtcctgcagctggcaggagtgggcagctacctgaagttccccacctatgcaaagtctacgagaactactgatgaaatgaccacagaattcttccagaacatcagctcagagcaccaaacgcagctgtacgaagtctacaaactcgattttttaatgttcaattactcagtgccaagctacctgaaattggaataaagggggtggggagagggagagaatcatgctttttaatttaagatttttatttgtcaaaagaattatatggatattgggttattttgtaaattaatatttctttggggatgatgctgcgagcagcatagtgagaattatttaaaatccttcgtagggaaggacagctgtctttgcaggggaaataggatgggtcgtccttgtctgtagaagtgaatactgcaacactgtctcaaaggtttcttgtgttctggtgaattccatgaattgtgcattccataaattctaattaatattatttatagttatttaaacatggtctcattatttctttttgtggcagcaaaattctaacatctttccagaagaaatctatgattcctgctttgcttgctacagctcatttgggggcatgaatgttctccttactaacctctcatggagtcatgtgataacagccattgtcatgtgtatggatgccaccattcttgaatttctgctagaaataagtaggttgctattgcacttagagtcatctttgcaagggactcattccaaaccaattccaatcgacctgaaagtcccttgcactaaagaaatgtgatttttttttaacccaaggagaaagttggttgtaacaatttttcaccagaattagcaatctgatagaataggcttttttaacaggaattttaaactggcggtgccagttgcagtgaaggtgaagtggctattgctttatattcgacaaatatttattgagcatctactatatactaggccctgaagatagagcgttgaacaaacccaatagtcttggccctcaaaaagctttatgtgacatagagcatccagctcgacaattagcaaacccctgatattattcatggacttgacatgaggtttggactattcatgagcaacagcagaaggtccatgacccctacaaatttacatttttctatggcccatatttgaaaacctcacattcggagcaggccactttatattcgtgagtgatcccaagctcactgaccaacagaaaagatgctaaaaaaatgtgtcctatcatgtgcctgctccaactgatgggtaatgtctgcctttaagccccagaatggattctccaggcacagtgtggaagagtgctgtggttgattagcaatgtctgccttgggtgaggaaaggggaacactcctcaagtgcctcctactgtcatctccattcagcctagcaccacatccccatgtagaagtgttgtcttctactgcttgccacgtacaagtgtgaaatgccaaggtgagactcgtacacttggggatttgcaatggtttttacccctcatgaaggtcagaggtggactatttgtacacatacacacatgcacaccctctcacgtcctccagaggctgaaagactatcagcatcttggtaactgccatgcatgagcagcaaggacagccttccataatccatgccccatttcctctggaagcctggaaacttttcatttcctgttccttgctaattaacatctaaacatgcttctcatttccagccattgctgatgcttctcagttgaagtttgagccacatccctcttacagctagtgaatgagttggtagcagctactgtatataataataataatagttttaataataggggagggtgggatggggtgtgggtaagttttgccttttgttttgtttttgatgccgtatatagtgaaggggtgaggatattctaaacaaacaaaaattgaataatttattcacagaaactattaagattgtattgtaaagctcacagcaagctcagtgggcagcagctgcaacatctcaccggggaaattattttatttaacgtgagtgagatgtgggccggagaaggtagctgaagctatttataaaacgttgtgtaccttcttccgagctctctcccctttgtgaagggcgcagcaactatacccttgatggatggagatttacgcaatgtgttttactgggtagagtgacagaccttggctgtccctggaattgagaatctggaccttatttccaggcagagaacactgtcctcagaaatgggacttctgataatgaaacaggttgtccaacattttctaatacgcattctacagaacacaggttccaggaggcatcaggttggtgtgatgcagactaagggttttgtggtcaaatatccttaagaaacaaagttaagtcagtttcctttctgcaaggacttttcagccttcaatgtgtgctgtgcatggtgaatccccaaaaataatccttgagtctgtagcatttcctgaacttacatgaccaggatactctattttgcagatcaccccacagagctagggttccaccgagtatactttgcttaggttgacttagcatatctgaggtcttcaaggataaaaactgccaccccaacacccttccattaaaaaaaaaatacaaaatagcaccacagtctccatctggtttatagcaacagaggtactttatttaatgaagcaatggttctaatcctggatactgccacggactacaattctatccctcccagagggagtggaggaagtcttgggtggtgtggacagaaggaagagaggagagggtgagtggggtatagggcccagggtggctccctactcctcaggctcaaaaggatgctcagtgggaacagatgatctcttgatgagtgcttcttcagtttcatagtttggaatcgttcactgtgtgctttttggggggttttcaatggaaattcacgttgctttgcatttctgtgtccgtctttggtcagttgtgcaagcctgctcactgtcatgtgaagatggcctttcatctggcttctctctcttaagtgagaaagattgtccttcaggggacatgacatcaataggtttctggaatgagggactctttctccccgtgttttgctttgtgttcacattttcttttctaatggcattgaaactttaaaaaaaatggattcaactgtttttgcagaatgtagaaagtattctgtgtccttggttaaagaaatccacttgtgaagtgtgcctggaaaatgaaagtttgtgttttttaaagaggaatatttgaaactgctttctatgcatgcttagctggagaaaagtacaggcaggcgtcccatctcccagccacttctcaaaggtgctgctgtgttttaaagaccaggtacagccagggcagtatttgcaaggacattcctgcttactttatccctttggttggaaagctctagatgattcccgcagctcctccagaccccgcctccctgccctccccagctggtctgggaagaggtggtctgctgacctgtggtatctcagaggggacgttcctcctcctccctgtgcaccaggtgggctgcaccctcctgcctattcaggatgtggatgccacaggagagcagcaggcagtggaaacttcagttgcactggttctcctggtggcaaaggcatgaagcacaggggtcgattaatccaggctactagaaagctccagagcaaagtgtgcgggtcccacaaatgcttggctggtggggtctggatcagtgctgagatagagttggcagaagaagcagaggcactctgcttgctttcctagccagtcctcccctacacacacacacacacacacacacacacacacacacaatctcagctgcgccattctgtgcaatcccagtgaccaaatcccttccttgcccacctctatgtcagcaggactgaccacatcactcccccgagttcccaccaccagcatttcctccaacctttttccatcacaaccagttagaaccctacaggcaacaaggccttctagaatccgcttaacccttggctgataacaggcaaatttcagtctgctacactttgttaggtccagaaggagctgcccatactactttcttatgagcatgctcagtatggcatatggacatgtaatgtcacatctttgtggagtgtgattttcttttttcacatatttgtatgcagtagagagcctgttgtagaaaacgctccctgtatcttgctgtactgttaaagaaagctgaattccacattgccaacaaaagcgtgaaaatgttcatgaaccttcctccaggaaaagccattcaagcctgattatttttctaagtaacttcaattaaattgaagaaaaaagaa

SEQ ID NO: 4134 - DNA, 5709 bp, Homo sapiens
  source 1..5709: mol_type = unassigned DNA
atatagatcgttggagcgcaatgaagtagcctttggagagaagggagagggcccgtcggacagccacagcggccagcgcagcggcagcggcggcggcaccaccatcaccgctcgcaccccagccgcccggcccgcgaccaggcagcggcggccgccggcgggatcggaggaggcggcggagcggcgaggaggaggagcaggagcgcgcagccagcgggtccacgcatctcagcacttccagaccaactccggcaccttccacacccctgcccgggctgggggctccgagagcggccgcgaagcgactccgatcctccctctgagccttgctcagctctgccccgcgcctcccgggctccggtccgcgcggcggggtccctgctcctgcgccccgggcgcgcttcccggacaccccggtccccgcagccaggacaaagccatgaagccagcgctgctggaagtgatgaggatgaacagaatctgccggatggtgctggccacttgcttgggatcctttatcctggtcatcttctatttccaaagtatgttgcacccagtcatgcggaggaatccctttggtgtggacatctgctgccggaaggggtcccgaagccccctgcaggaactctacaacccaatccagctggagctctcaaacactgctgtcctgcaccagatgcggcgggaccaggtgacagacacgtgccgagccaacagcgccacaagccgtaagcggagggtgctgacccccaacgacctgaagcacttggtggtggatgaggaccacgagctcatctactgctacgtgcccaaggtggcctgcaccaactggaagcggctcatgatggtcctgaccgggcgggggaagtacagcgaccccatggagatcccggccaacgaggcacacgtctccgccaacctgaagaccctgaaccagtacagcatcccagaaatcaaccaccgcttgaaaagctacatgaagttcctgtttgtccgggagcccttcgagaggctagtgtccgcctaccgcaacaagttcacccagaagtacaacatctccttccacaagcggtacggcaccaagatcatcaaacgccagcggaagaacgccacccaggaggccctgcgcaaaggggacgatgtcaaattcgaggagtttgtggcctatctcatcgacccacacacccagcgggaggagcctttcaacgaacactggcaaaccgtctactcactctgccatccctgccacatccactatgacctcgtgggcaagtacgagacactggaagaggattctaattacgtcctgcagctggcaggagtgggcagctacctgaagttccccacctatgcaaagtctacgagaactactgatgaaatgaccacagaattcttccagaacatcagctcagagcaccaaacgcagctgtacgaagtctacaaactcgattttttaatgttcaattactcagtgccaagctacctgaaattggaataaagggggtggggagagggagagaatcatgctttttaatttaagatttttatttgtcaaaagaattatatggatattgggttattttgtaaattaatatttctttggggatgatgctgcgagcagcatagtgagaattatttaaaatccttcgtagggaaggacagctgtctttgcaggggaaataggatgggtcgtccttgtctgtagaagtgaatactgcaacactgtctcaaaggtttcttgtgttctggtgaattccatgaattgtgcattccataaattctaattaatattatttatagttatttaaacatggtctcattatttctttttgtggcagcaaaattctaacatctttccagaagaaatctatgattcctgctttgcttgctacagctcatttgggggcatgaatgttctccttactaacctctcatggagtcatgtgataacagccattgtcatgtgtatggatgccaccattcttgaatttctgctagaaataagtaggttgctattgcacttagagtcatctttgcaagggactcattccaaaccaattccaatcgacctgaaagtcccttgcactaaagaaatgtgatttttttttaacccaaggagaaagttggttgtaacaatttttcaccagaattagcaatctgatagaataggcttttttaacaggaattttaaactggcggtgccagttgcagtgaaggtgaagtggctattgctttatattcgacaaatatttattgagcatctactatatactaggccctgaagatagagcgttgaacaaacccaatagtcttggccctcaaaaagctttatgtgacatagagcatccagctcgacaattagcaaacccctgatattattcatggacttgacatgaggtttggactattcatgagcaacagcagaaggtccatgacccctacaaatttacatttttctatggcccatatttgaaaacctcacattcggagcaggccactttatattcgtgagtgatcccaagctcactgaccaacagaaaagatgctaaaaaaatgtgtcctatcatgtgcctgctccaactgatgggtaatgtctgcctttaagccccagaatggattctccaggcacagtgtggaagagtgctgtggttgattagcaatgtctgccttgggtgaggaaaggggaacactcctcaagtgcctcctactgtcatctccattcagcctagcaccacatccccatgtagaagtgttgtcttctactgcttgccacgtacaagtgtgaaatgccaaggtgagactcgtacacttggggatttgcaatggtttttacccctcatgaaggtcagaggtggactatttgtacacatacacacatgcacaccctctcacgtcctccagaggctgaaagactatcagcatcttggtaactgccatgcatgagcagcaaggacagccttccataatccatgccccatttcctctggaagcctggaaacttttcatttcctgttccttgctaattaacatctaaacatgcttctcatttccagccattgctgatgcttctcagttgaagtttgagccacatccctcttacagctagtgaatgagttggtagcagctactgtatataataataataatagttttaataataggggagggtgggatggggtgtgggtaagttttgccttttgttttgtttttgatgccgtatatagtgaaggggtgaggatattctaaacaaacaaaaattgaataatttattcacagaaactattaagattgtattgtaaagctcacagcaagctcagtgggcagcagctgcaacatctcaccggggaaattattttatttaacgtgagtgagatgtgggccggagaaggtagctgaagctatttataaaacgttgtgtaccttcttccgagctctctcccctttgtgaagggcgcagcaactatacccttgatggatggagatttacgcaatgtgttttactgggtagagtgacagaccttggctgtccctggaattgagaatctggaccttatttccaggcagagaacactgtcctcagaaatgggacttctgataatgaaacaggttgtccaacattttctaatacgcattctacagaacacaggttccaggaggcatcaggttggtgtgatgcagactaagggttttgtggtcaaatatccttaagaaacaaagttaagtcagtttcctttctgcaaggacttttcagccttcaatgtgtgctgtgcatggtgaatccccaaaaataatccttgagtctgtagcatttcctgaacttacatgaccaggatactctattttgcagatcaccccacagagctagggttccaccgagtatactttgcttaggttgacttagcatatctgaggtcttcaaggataaaaactgccaccccaacacccttccattaaaaaaaaaatacaaaatagcaccacagtctccatctggtttatagcaacagaggtactttatttaatgaagcaatggttctaatcctggatactgccacggactacaattctatccctcccagagggagtggaggaagtcttgggtggtgtggacagaaggaagagaggagagggtgagtggggtatagggcccagggtggctccctactcctcaggctcaaaaggatgctcagtgggaacagatgatctcttgatgagtgcttcttcagtttcatagtttggaatcgttcactgtgtgctttttggggggttttcaatggaaattcacgttgctttgcatttctgtgtccgtctttggtcagttgtgcaagcctgctcactgtcatgtgaagatggcctttcatctggcttctctctcttaagtgagaaagattgtccttcaggggacatgacatcaataggtttctggaatgagggactctttctccccgtgttttgctttgtgttcacattttcttttctaatggcattgaaactttaaaaaaaatggattcaactgtttttgcagaatgtagaaagtattctgtgtccttggttaaagaaatccacttgtgaagtgtgcctggaaaatgaaagtttgtgttttttaaagaggaatatttgaaactgctttctatgcatgcttagctggagaaaagtacaggcaggcgtcccatctcccagccacttctcaaaggtgctgctgtgttttaaagaccaggtacagccagggcagtatttgcaaggacattcctgcttactttatccctttggttggaaagctctagatgattcccgcagctcctccagaccccgcctccctgccctccccagctggtctgggaagaggtggtctgctgacctgtggtatctcagaggggacgttcctcctcctccctgtgcaccaggtgggctgcaccctcctgcctattcaggatgtggatgccacaggagagcagcaggcagtggaaacttcagttgcactggttctcctggtggcaaaggcatgaagcacaggggtcgattaatccaggctactagaaagctccagagcaaagtgtgcgggtcccacaaatgcttggctggtggggtctggatcagtgctgagatagagttggcagaagaagcagaggcactctgcttgctttcctagccagtcctcccctacacacacacacacacacacacacacacacacacacaatctcagctgcgccattctgtgcaatcccagtgaccaaatcccttccttgcccacctctatgtcagcaggactgaccacatcactcccccgagttcccaccaccagcatttcctccaacctttttccatcacaaccagttagaaccctacaggcaacaaggccttctagaatccgcttaacccttggctgataacaggcaaatttcagtctgctacactttgttaggtccagaaggagctgcccatactactttcttatgagcatgctcagtatggcatatggacatgtaatgtcacatctttgtggagtgtgattttcttttttcacatatttgtatgcagtagagagcctgttgtagaaaacgctccctgtatcttgctgtactgttaaagaaagctgaattccacattgccaacaaaagcgtgaaaatgttcatgaaccttcctccaggaaaagccattcaagcctgattatttttctaagtaacttcaattaaattgaagaaaaaagaa

SEQ ID NO: 4135 - DNA, 756 bp, Homo sapiens
  source 1..756: mol_type = unassigned DNA
gcctttggagagaagggagagggcccgtcggacagccacagcggccagcgcagcggcagcggcggcggcaccaccatcaccgctcgcaccccagccgcccggcccgcgaccaggcagcggcggccgccggcgggatcggaggaggcggcggagcggcgaggaggaggagcaggagcgcgcagccagcgggtccacgcatctcagcacttccagaccaactccggcaccttccacacccctgcccgggctgggggctccgagagcggccgcgaagcgactccgatcctccctctgagccttgctcagctctgccccgcgcctcccgggctccggtccgcgcggcggggtccctgctcctgcgccccgggcgcgcttcccggacaccccggtccccgcagccaggacaaagccatgaagccagcgctgctggaagtgatgaggatgaacagaatctgccggatggtgctggccacttgcttgggatcctttatcctggtcatcttctatttccaaatcatgcggaggaatccctttggtgtggacatctgctgccggaaggggtcccgaagccccctgcaggaactctacaacccaatccaggtaagcttcaagcactctgtcagcatgtgaattttttttttttgtaggtatggatactaaaaactctaaaattgtggtctttgggggatttaaaacttcctttcacagcctggcattttaccttcagtggttgctttctccgtcaccctttttcta

SEQ ID NO: 4136 - DNA, 573 bp, Homo sapiens
  source 1..573: mol_type = unassigned DNA
atagatacctgaacacccgtgttcatagcagcatgagtcacggtggccagaaggtggaagcaaccctaatgcccatcagtggatgaatgaatagtgtcatgcggaggaatccctttggtgtggacatctgctgccggaaggggtcccgaagccccctgcaggaactctacaacccaatccagctggagctctcaaacactgctgtcctgcaccagatgcggcgggaccaggtgacagacacgtgccgagccaacagcgccacaagccgtaagcggagggtgctgacccccaacgacctgaagcacttggtggtggatgaggaccacgagctcatctactgctacgtgcccaaggtggcctgcaccaactggaagcggctcatgatggtcctgaccgggcgggggaagtacagcgaccccatggagatcccggccaacgaggcacacgtctccgccaacctgaagaccctgaaccagtacagcatcccagaaatcaaccaccgcttgaaaagctacatgaagttcctgtttgtccgggagcccttcgagaggctagtgtccgcctaccgcaaca

SEQ ID NO: 4137 - DNA, 15979 bp, Homo sapiens
  source 1..15979: mol_type = unassigned DNA
gggctgcctctggggggtccgctagtcgcggggcggcggcggcggctgcgggcgcgaggttcccagcaggatgccccggctctgcaggaagctgaagtgagaggcccggagagggcccagcccgcccggggcaggatgaccaaggcccggctgttccggctgtggctggtgctggggtcggtgttcatgatcctgctgatcatcgtgtactgggacagcgcaggcgccgcgcacttctacttgcacacgtccttctctaggccgcacacggggccgccgctgcccacgcccgggccggacagggacagggagctcacggccgactccgatgtcgacgagtttctggacaagtttctcagtgctggcgtgaagcagagcgaccttcccagaaaggagacggagcagccgcctgcgccggggagcatggaggagagcgtgagaggctacgactggtccccgcgcgacgcccggcgcagcccagaccagggccggcagcaggcggagcggaggagcgtgctgcggggcttctgcgccaactccagcctggccttccccaccaaggagcgcgcattcgacgacatccccaactcggagctgagccacctgatcgtggacgaccggcacggggccatctactgctacgtgcccaaggtggcctgcaccaactggaagcgcgtgatgatcgtgctgagcggaagcctgctgcaccgcggtgcgccctaccgcgacccgctgcgcatcccgcgcgagcacgtgcacaacgccagcgcgcacctgaccttcaacaagttctggcgccgctacgggaagctctcccgccacctcatgaaggtcaagctcaagaagtacaccaagttcctcttcgtgcgcgaccccttcgtgcgcctgatctccgccttccgcagcaagttcgagctggagaacgaggagttctaccgcaagttcgccgtgcccatgctgcggctgtacgccaaccacaccagcctgcccgcctcggcgcgcgaggccttccgcgctggcctcaaggtgtccttcgccaacttcatccagtacctgctggacccgcacacggagaagctggcgcccttcaacgagcactggcggcaggtgtaccgcctctgccacccgtgccagatcgactacgacttcgtggggaagctggagactctggacgaggacgccgcgcagctgctgcagctactccaggtggaccggcagctccgcttccccccgagctaccggaacaggaccgccagcagctgggaggaggactggttcgccaagatccccctggcctggaggcagcagctgtataaactctacgaggccgactttgttctcttcggctaccccaagcccgaaaacctcctccgagactgaaagctttcgcgttgctttttctcgcgtgcctggaacctgacgcacgcgcactccagtttttttatgacctacgattttgcaatctgggcttcttgttcactccactgcctctatccattgagtactgtatcgatattgttttttaagattaatatatttcaggtatttaatacgaaatgtggaagggaatgctggagtaaaatatcccctctcccctccgcccgcccacccgcccgcccgctcgcccgctcgcccgctcctgtggtttttctgagcgtgcgggcgccgggaggggatgctgaggctgatggagctgcctccagggctagggccactcaccggaggagggcggggcctgcacttgaagtcaggccgcacctgtctgtttttggaagggtagccgacaaatccttccagagggaaagttctttgtttaagtgttgtacttgaaaaggtcaatcttcagggcttcctgtttgaagtcaagtcagaggtaaaccggtcagttacagaagcaggatttctaggatttctaactccagctgttcccatactgtctagtttaaattatggctgttaaggccgggcgggtgactcaggcaggtaatcccagaactttgggaggcccagacagaaggatcgcttgaggtcaggaatttgagacctggccaacatggtgaaaccctgtctctactaaaaaaaaaaaaaaaaaaaaaaaaaaaaaaaaaaaaatgagtcgggtgtggtggtgtgcacctgtagtcccagctactcaggagttctgagatggaaagattgcttgaacccaggaggcagaggctgcagtgagctgagatcgcgacattgcactctagcctgggtgacagagtgagattccatctcaaaataaataaataaatattaatacattatggctattaaggctgggcacggtggctcatgcctgcaatcctggcactttgggaggctgaggggggaagatcacttgagcccaggagttcaagaccagcttgggcaacatagcaaggacctcatctctacaaaaaataaaaaggacgtggtggtgcacatctgtaaacccagctactcaggaggctgaggagggaggatcacttgagcccaggagttcaagatcagtttggaccacatagcgagaccctgtgtctacaaaaaataagaaaatcagccggacatgatggtgcacacctgtaatcccagctactcgggaggctgaggcaggaggatcgctggagcccaggagttcaaggctgcagtgacctatgatcgtgccactgcactccagcctgggcagcaaagtgagactctgtttctaaatagacagatagaagataggtagatagatagattaaatagaaagtaaactatggctgttgaggtttacagttggcaggagtggagtggtttggcgtttatctctagaccgtgctggatgacagtacccagtgtcaccaagaagaggctccgtgtgactgtctctgtggctttctggttggtttagctccagtgccttcaccctcaaggacacgactgaccttgaaccctcaggtttgatgggccctgtcttgataaaagtgtcagaggaggctctggaaacatctggctgaaactcctttgctatttctgcttctaagctgtagttggagagatggttgcaatcatttcgtggtgtcgggcaccctgcttgacctgtcttcctcgtgtgtggtatttgtcaccactgcccagtccctggttgctggccacgctcagttgggacataccctggtgtcctctgtgtgtggtgtccctgtgtttcccaggctcaggtgggcttgtgtgggtcttggcccccagtgcctgctagcctcaggtgtcccctgtgttagacacctcctgccttcctttctgaagcttcgctttcttttatttttgttttgttttgtttttggagacagggtctcgctctgtcatccgggctggaatacactggtgcaatcacagctcactgcagcttcaacctcctgggctcaagtgatcttcccatctcagactcccaagtagctggggttacaggtgagcgccagcctgcccagctagttttttattttcagcagagatgaggtctcactgtgttgcccaggctgctctcaaactcctgggctcaagtgaccctcctgcatcaccctcccaaagtgctgggattacaggcatgagccatcacacctggcccctccaagttttttattatgataaaaatgtttaattttaaacgtaccatcttaaccattgttaagtgcactgttgtgtggcattaagcacattcgtattgtcgtgccaccaccaccatcatctccagagctttctcatcttcccaaactgaaactctgtccccattcagcactcgctccccattggtagaaggcagcagcttccactctctgatttctactacccgagctccctcagaaatggagtcacacagtattggtccttttgggactgaagtacttcacctcatgcaatgtcctctaggttcatcggtgtcgtggcaggtgtcagaactaacttcctttctgaggcggaataatgtcccattgtgtggaagaggcatggtttgtttatctgttcatcagttggtggacactgagttgcttctgccttcctgcgaatgtgaattgaatgctgctgtgaacagggtgtcagtgaatctgctgagggcttgttttccgtattctgggcatggccctttgtgtctgcctttgctggagcacctccccgggatgcgtttgtttataggatgttcagacgaatgtcagaacccactgggcggttcactcactgaggggggcccgcgtcccctccatttctgcattcccagttcttggtatggttcctctgaggttcggttttcctgagcacctggggtgtttgcagggatgtggaggggttcctgcagaagacaccacccacatccacgcacctgctcagattcccgggccatggtcggggccaccgcccgtggggatgactccggatgggagtggcagaaaagggcctgctgggccgaggggaggcgtctccgggaagagagggaggtgtgagcggggagaacccactttgattcttcgctgtttgcctgatgcgcagcaccacactgcgtagagacctttggctctggttttttctttttccactgaaacacagcaaattatacattttatgaaaattggcatcgtacaactggaaaatttaaccataaacttaaaactcttttaccctgttggcccccatcctccagctgtgtccacactttgagcacagtcatgagaatgacttggttgggtgcggggtggtgtcacaaagccctgtctcttgtgtgatggctgcgcctcgaatcagtgggagggcacctcgcccgtttacagttgggcaatgcttgggctgggcggcctggctgctcctggactcgcctcccagcgtctgatgctgtgtattttccatctgccccaggaatttgacacaggtgtgacttgcaggttgtgtgggtgatgcctccctccctctttcctcttaaagcatctcatgcttcttcattcgctgatacttacaacccccagtggatatttagtggagtttgctgtagtgcttttgccatttatttggactattggaaaaatttcaggtttggttttggccctatgtcttgatggagggcaagggttaggatttcagtttatcttcccggtgaggtctgagcacgtctgtgccctgaggtgggtggtttggtgaaggtggggctttaacctagctctgccacttaggaatcagaacacacacacacacgcgcgcacacacacacacacacacacactctctctcacacacacatcgggatatttttcttgtttccttcttccagagggtgtaggagttgtgttccaagtttgttcctgcaaaccctccgatgaggccagctgcattcatcggggcctggatggccgcacctctctctccccgccctgtctcctgcactcaggtgagaggctggcagggctgccgtaggggtggagagtgaacgcagggtggctaagccctcgtccctgtgagggacagtgacacggatgggagcagccatctgagctggaagctgtggacatggtccttgtgtgggtccaagcaaagtgggtggcgtgtgcattttgtgaacacgtggtctgcttcctggtgcagaccaggtctccccagagggaccctcctgagctgagctgcccggggcacctgtccctggatgtgaactgccttggttgtaccttggtggggggacctttcctgaatgtgttggttcggcatggtgacaggtgtttccctgcggcagaatgttggggccacaccaacgtccccagagtcttctccctagagtctctgaaaggaagcctgggttcctggtggtgctcccctccatgtgtgctcacccgcctgtatggaggcagcccaggggagcggctgagactcttggcagagagctggggacgctctgttctcattggcagccccaccctgaagaataacagactcccaaatatcacacaggctgcagataccacccagcccccaaggatgccatcaccaggctggggcgctcccatgcccattatccaggggtaatttttgctcacttatttataagccacacatcctcttctatcctaccaaacctaagaatatcaaaagggaaagcttggcttgcatggacgtaattaacctaaaagtctttaaacgtttctcccgagtgttggagtgactgtttgcacacatctgttgtgttttgcctgtgtgcattcctcctcctggtcagagagcccgtctcttccgccctctcccttaccctaggagggctgagtcaggcctccctacccaggcccaagggcagatgcacctgagccattgtgtcccatggttgatacgggacggggctgatttcctgacctggacccctgagacccagtgctcttagctgtgagcctctgggaagaggttctggcaggtggaggggatggacgttacagtgctgtggccacctagaaaagccgtcccggaactgagaccaactgctgagggaggaagggccaccagatcgggggccgggccggggtgagcacctgaagccggctccacctgctcttctcagctgtgcgcctccaggaatttgcactcgcttcagctgatttgggttggatttctagcgtttcacatacaggatctagactcgcacacaactgcattaatatgttggtgtttgataaactagggttgaaggagttccatcagtgaagagagaagccacgtgacctgaggatgcagggcactgttcacgtggacatgagccgtttcttagcatcatgagattttagaaacatgttcttactctgccaggacccagggataggtgaggctctcctattgggataccatttcaccagcagagagattaattggagaatgtgtaattttttcccctttggaaataatttgttcttttttttttttgacagagtttctttctgtcatccaggctggagtgcagtggtgtgatcatagctcactgcagcctcgacctcctgggctcaagtggtcctcccacctcagcctcccaagtagctgggactacaggcatgcaccaccatgcccggctaatttttacatttttggtagaggccgggtacggtggctcatgcctgtaatcccggcactttgggaggccgaggtgggtggatcacgaggtcaggagatcaagaccatcctggataacatggtgaaaccccgtctctactaaaatacaaaaaaattagccgggcgtggtggtgggcgcctgtagtcccagctactcgggaggctgaggcaggagaatggcgtgaacccgggaggcggagcttgcagtgagcggagattggcgccactacactccagcctgggcgacagagcgagactccgtctcaaaaaaaaatttttttttttggtagatacggggtcttgctttgtcacccaggctggtctcaaactcctgagctcgagtgctccttctgcctcagcctcccaaagtgctgggattacaggcgtgggctgctgtgcccagcaggaataatttctcagtgcatctctgatggggaggctaatgaagaaaggacacctggtttgaaggcttctctgtgtctgtccgtgggcgctactgatctgagccaagcaccattccgcaggcatgcctgaaatgactcccatggctgtcatggtgccatctggagagcatttgctcactgtaatggtcccgtcacacttgtctgatgaggatctgttggttgactttgacagtgataaacgaacacagcctatctgggtgttttttgcacttatagtttgggggtttgaagtactggctagaagctggcggggtgtgtgtgtgcaggtgtgcgagtgcatgtgcaagtgtgcgtgcaagtgtgagtctgcacttgtgtgcaagagaatgtgtgtgtgtgtgtgtttggagatttggacttgaaaattctagctcaggtctttggggtagtgtttgacctgaactctgaaaggcagagggtcccagactttcctgggatgatgggaactgggcaccccagatgaggctcggttgtgagtaggagcggggtgggccaccgaagagaagacagagtgggcctgtagggccagcccgaggtacccacagtggagggtctacaggctgatttgggaggtggtggtttatacctgtagtcaccttctatcttagttaggaattcaccttcacacttccagaaactgccaagaagaatgccgccgctcaggtttatctggtagaataagctgtttgaacaaagatctggaggttgcacaatcctgtgtcattctggatttatcttggggtcgggagtcaacgatacttcttgtgctgtcgtttctccggccgtgtgaagttaccacctcgtgagtggtcataagttagcgtgtctaaatgcactttgaaatcctaggatgaaaaagccaggccctgtcttttttccttgtctaagcaccatccttgcttaggagagacacggctgtggctctcaggctgtggggcaatgttctgcttataatgtttcaagaggttcaaagcgtgcaggccccatgctccgtgagagccttgacctgggtcagcaggggcggctgggcttgactcgagaattcccacagggcccgagggaagagcagagcaagagggaggagcgcgtggagccctatgtggcctgcgatattggggtggcgtccaggcccgcctagatgggggagggagacaacagagctgccacctgctcaccgcagacccaggggcccaggaggagcggactaggaccggcagtgccttccagcctaggtctcctgcccctgggctggagttcatcttttaggcaaatttggaataggaaccttaaaaatgctttcttcactcgtttaaatagtaatgataagaatatggctgcagggggcagcttatgcctgtaatcccaccattttgggagctcaaggcaggagtattgcttgagcccagaagtttgagaccagtctgggcaacatagtggaaacttgtctctccaaaagctaaaagaaaaagccgtgcatggtggtatgcacctgtagtcccagctacttgggaggctgaggtgggaggatcgcttgagtctgggaggtcgaggctgctgtgagccatgattgcaccactgcattccagcctgggtgacagagcaagatcttgtcttaaaaaaaaaaaaaaaaaaaaaggtgttgtattttatcattagaaggccatcctgtttagaagagtgggtttctcataagaaaaaaaagaaaaaggttgaccttgtaagtatattttcttgggtgaattgtggtggtggtaatggttttaactggtgttaatttcagttcttttaaaagttgtggtaagatacatgcaacataaaatgtgccctcttccccatttttaagtgaacagttcagtggcattaagcacattcagtttgcctgccaccgttaccaccatccatctccaaaattctctccatttacaaaactgaaactctgtccctattaaacactagctccccattccccactgtgccgcccccccaaagcccctggcaccaaccattctacttcctgtctctgagtttgactagggacctcctgtaagtggatttgtacaatatttgtccttttgtgtctggcttcttcatgtagtataatgtcttcaaggttcattcatgttgtagtcaggatcaccttccttttaaaggttgaacgatatcccgttgtatggacagaccacattttatccattcacccagggatggacacctgggttgcttccatctctcggctcttgtgaataatgctgctgtgaacacgggtgtgcagatacctgttcaagtccctgctgttttcttttgagacggagtctcgctctgtctcccaggctggagtgcggtggcaccatctcagctcactgcaagctccgcctcccaggttcaggccattctcctgcctcagcctcccgagtagctgggactacaggtgcccaccaccacgcctggctaattttttgtatttttagtagagacggagtttcaccatgttagccaggatgctctggatctcctgacctcgtgatccacccacctcggcctcccaaactgctgggattacaggcatgagacaccacgccccgccgagtccctgcttttaattctttggggcagggatccccaaccccctggtgatggaccaatactggcctgcggccccttaggaactggactgcacagcaggaggtgagcggcaggtgagcgtgcattcccgccggagccccgcctcccgtcagatcagcggcggcattagattctcataggagcgggaaccctcctgtgaaccctgcataccagggttctccatgcaacaatctaatgcctgatgatctgaagtggaacaggtttttgttttttttttccagacagagtcttgctctttcgcctaggctggagtgcagtggcatgatctcggctcactgcaacccctgcttcctgggttcaagtggttctcctgcctcagcctcccaagtagctgggattacaggtgcccgccaccatggccagctaatttttttgtttatttgtttatttattattttttgaggtggagtcttgctgtcacccaggctggagtgcagtggtgcaatctcagctcactgcaacctctgccttctgggttcaagccattcttgtgcctcagcttcccgagtaggtggaattataggcgtgtgccaccatgcccagctaatttttgtatttttagtagaggcgggatttcaccatgttggccaggctggtctcactcttgacctcaagtgatctgcccgcctcggcctcccaaagtgttgggattacaggtgtgagccaccgtgctcagcctgaagtgaaacagtttcatcccaaaagcatatacctctgccccatccatggaaaaattgcctctcatgaaaccagtccctggtgccaaaaaggttggggaccgcggctctggagtatatgcctaggagtaggagtgtggggtcatatggtaatttatctttaatttttggaggaattgaatttcaattcttattattaccaaaaatacttaaaattcttacagatggcatgggaaagtagcacacagtcgggactctgcagccgagtttgcctccttgaatgcacacataacacaggaacaaagacagagctgcttccctcctgttgggtctctggcggacagtcaggtatgctgagggagacactgttctcaaactccaggccagggtggtttccggagggtccaccggtggtctcatctcttctctctcaaaccatggatggtgccttttaaagaaaatgacaccggccaggtgcggtggctcatggctgtaatcccagcactttgggaggccgaggcgggtggatcacctgaggtcggaagttcaacaccagcctggccaacatggtgaaaccccgtctctattaaaaatacaaaaattaggccgggcgcggtggctcacgcctgtaatcccagcactttgggaggccgaggcgggcggatcacgaggtcaggagatcgagaccatcccggctaaaacggtgaaaccccgtctctactaaaaatacaaaaaattagccgggcgtagtggcgggcgcctgtagtcccagctacttgggaggctgaggcaggagaatggcgtgaacccgggaggcggagcttgcagtgagccgagatcccgccactgcactccagcctgggcgacagagcgagactccgtctcaaaaaaaaaaaaaaaaaaaaaaaaatacaaaaattagctgggtgtggtggtgggcacctgtaatcccagctactgaggaggctgaggcatgagattcgcttgagcctgggaggcagaggttgcagtgagctgagatcgcgccattgcactccagcctgggcaacagagtgagactctgtctcaaaaaacaaacaaaaatcaaagtgccaacctctgggctgtcccctcctggcctgccttgttcctgagctcaccagggtccttcactctgtggcactggcctcagccagcaccaaggctgaaagagcccattcagaggccagaaagaaactgttaggctctgaagccgtgggccaggccaagacagagattctgaggcatggttctggaatgggtttttccgcccacaggcactcaaggaggacagcattgggagatggctgggtggagagtctgcgggaggctacaaggcaaaaatcccctactccccctgggctccttcacagtttgtgtgtcctcacagagcaaggaagttctgtgagcctcattcaatcatctgaggttcttcccaggaaaattatagtgggaactctggctttgatgaaactgcttttttttcaaagcagtttgcaaaataaccggggccttaaaaaacaatctggatgaaatggtttttgccatttcaattggttctcttccaacgtgtcttccttccagtaggtttccagaatattttggtttcaaaatttgggggcacagatttgcaaagtggatttcaacatgtcgggtttcaaagggggctggctttgaaagtggtctgggcttctaaaaggtttgattgaaaactggtttggttctcagacattccagaagcttctcccggagtccagagcctcccagtggtgctttgggaagggggccaggcagggcgtcctggtgagtggacgtagggtgggcagggccacccttgtcctgggatgttgtggaggacttggcacgccctgtctcaggcctggctctggctctgggtggatgttttgcatcttcagaaaaaagctcctgtgggatatttctcctccagccgaccccgccccccagggcattcgagaaaagggtgcttgtctcttggtgagagggccacggttccttcagtttctccgttcctacgggcctctttctttttcctttttgagacggaatctcactgtgtcgcccaggctcactgcaacctatgcctcccgggttcaagtggttctcatgcttcagcctcctgagtagctgggattacaggtgtgtgccaccacatccagctaattttttgtatttttagtagagatggggttttcccatgttggccaggccggtctcgaactcctgacctcgtgatctgcccacgttggcctccaaagtgctaggattataagtgtgagccaccacaccaggcccgtttcatccctgcctcagcctgcatgccaagctccctgggtgcccgcccacaggtgtcaccctttaaggagaaagtggcctggggctggaaacaggactttgtagggaaggacagcgcgtgtgagaaaaggcctgttgatgggcacgccagggtttaatggacggctctttgaagtcatgggctgagccagaaggaattgtcatgatgtcagtctcatttccagatggggaaagggagacccaggctgcggtgacccactgaggcacaggatcagtgagaacccagccctggctttgcccagacctctcaagggcacttcgtgggaccattgccggccgttgtggcatctgtccctggccttgcccccatccgtctctgcacagcccaggtgggtccgagccagccccaggtctccagggtcccagcccagcctctagaagagccagcagcagggctggaagggagagcacatgctgggccttggggctgccttggacctcaggccgttgacaaggaaaagcggagagttgggaaaaaaggacaaatagctgagcgccagccgcagtctgggggacgggagcctcgtgcgactctcggagtgctggccagattggcagaggggaggagagaggaaaaacccaggctctgaggaaaaacctctccagcccagcgcgtggcctggcattaacccactgcagccccaggaagtggttccaccccaggcagccaacaaggcggtgcctgaactatgtctgtggatgacggagccacgacctgtccctcagggctcagcgctgcggctatgtccagggacccctggctgtgcccacgtcggggcttcccgttccttacctgccatgagaatgagatgtccagggacctccctgctccagctgggacctgtggggctttgtctgttgtcccgagcaccttggagatgtcatttctaacattttaacccaggaatccccccaccaagggacagagtgcaaggacatgatcgaacagaaaaagttctggtacaagatcaaccccgtggggtggtgagtgctgcagccccgggcctcacatcctgccgtccctgtgggagattggagcggtcccagtgcccaccgctgattctctggctccagcaacccctccaggtggatccgtcccacgcagcctggcctgaaacactgcccagccactgggtccagtaagacagagcctcgagtcattctgccaagaggatccagaaacacagactttttctggggtcctggaggcttctggcccatggggagcccctgggtcccagcgatccagccctgatgtgctgagggtgcagggcccagctgcagagcagaggagagtggcccccagggaccagcagcacgaaaggcacactgaggcacactggcaggcctgggctgcagagagcctgaaggtcatggggtagctggtggaagcaggaagaccccatacagcagcgaccactgaggctggtgctgcactttctcagggaattgagtgtgggctcccaccatcccggccactggcttcctccaaagcctcctcctcttacatcagcaaaccttctgttcggtgaccccctcagtgaccctctgtgcttgccttcgtggtcttcctcatggaggatttcgggtcagcgtgggggtcagaggtcatttcccataccccctcaaaggtacttcttgctgtggtccccacactctgacaccctcttctgaaatgaacacttttttgttgttgttgttgagacagagtcttgctctgtcgcccaggctggagtgcagtggcacaatcttagctcactgcaacctccacctcccaggttcaagcgattttcatgcctcagcttcccgagtagctgggattacaggcatgtgccaccaagcccagctaatttttgtatttttagtagagatgaggtttcaccatgttggccaggctggtctcgaacttctgacctcaagtgattcgcccgcctcggcctcccaaagtgctgggattacaagcatgagccactgcgcccggccacaaacacttttttttttttaaacaagtgaaaacaagtttattaacaaagttaagaaataaagaatggctattccatagggagagcagcctgaataaacactttttttgttgttgttgaggcagagcctcactctgtcgcccaggcaggagtgcagtggtgcgacctcagctctcagctccctgcaccgtccacctcctgggttcaagcgcttcttccccaagtagctgggactataggcacacaccaccatgcccggctaatttttctctttttagtagagacaggatttcgccatgtgggtcgggctggtctcgaactcctggtctcaagtgatccgccctcctcggccttccaaaatgctaggattacaggcatgagccgccgtgcctggccacaaacatattttaaatttgaacaataaaggaactggaccaggaagtgtggagttggggagaccctgctctcgccaggtgccttcccggcaggttgtctctgcctccccttgcaccccttgaatggcgggctccctctcccatagcccctgccaggctggataaccaacttcattcttatacccgtccgaatctgccccctgttaatggcacccaccagtccttgtccaaacctcgaagctcaggacctcacagagcaccacgtcctcttctgtgtcatatgcagctggatctcagtaaatggcaatgtcttctct

SEQ ID NO: 4138 - DNA, 921 bp, Homo sapiens
  source 1..921: mol_type = unassigned DNA
ggatccccagctcccgagggcccccgtgtgcctgctgtcacctgaacggggctccccggccccgccgaccgcagccctggagcctgcagacgccagcagcaccggcaggttcccagcaggatgccccggctctgcaggaagctgaagtgagaggcccggagagggcccagcccgcccggggcaggatgaccaaggcccggctgttccggctgtggctggtgctggggtcggtgttcatgatcctgctgatcatcgtgtactgggacagcgcaggcgccgcgcacttctacttgcacacgtccttctctaggccgcacacggggccgccgctgcccacgcccgggccggacagggacagggagctcacggccgactccgatgtcgacgagtttctggacaagtttctcagtgctggcgtgaagcagagcgaccttcccagaaaggagacggagcagccgcctgcgccggggagcatggaggagagcgtgagaggctacgactggtccccgcgcgacgcccggcgcagcccagaccagggccggcagcaggcggagcggaggagcgtgctgcggggcttctgcgccaactccagcctggccttccccaccaaggagcgcgcattcgacgacatccccaactcggagctgagccacctgatcgtggacgaccggcacggggccatctactgctacgtgcccaaggtggcctgcaccaactggaagcgcgtgatgatcgtgctgagcggaagcctgctgcaccgcggtgcgccctaccgcgacccgctgcgcatcccgcgcgagcacgtgcacaacgccagcgcgcacctgaccttcaacaagttctggcgccgctacgggaagctctcccgccacctcatgaaggtcaagctcaagaagtacaccaagttcctcttcgtgcgcg

SEQ ID NO: 4139 - DNA, 2067 bp, Homo sapiens
  source 1..2067: mol_type = unassigned DNA
cacacacacatcgggatatttttcttgtttccttcttccagagggtgtaggagttgtgttccaagtttgttcctgcaaaccctccgatgaggccagctgcattcatcggggcctggatggccgcacctctctctccccgccctgtctcctgcactcagtctcatttccagatggggaaagggagacccaggctgcggtgacccactgaggcacaggatcagtgagaacccagccctggctttgcccagacctctcaagggcacttcgtgggaccattgccggccgttgtggcatctgtccctggccttgcccccatccgtctctgcacagcccaggtgggtccgagccagccccaggtctccagggtcccagcccagcctctagaagagccagcagcagggctggaagggagagcacatgctgggccttggggctgccttggacctcaggccgttgacaaggaaaagcggagagttgggaaaaaaggacaaatagctgagcgccagccgcagtctgggggacgggagcctcgtgcgactctcggagtgctggccagattggcagaggggaggagagaggaaaaacccaggctctgaggaaaaacctctccagcccagcgcgtggcctggcattaacccactgcagccccaggaagtggttccaccccaggcagccaacaaggcggtgcctgaactatgtctgtggatgacggagccacgacctgtccctcagggctcagcgctgcggctatgtccagggacccctggctgtgcccacgtcggggcttcccgttccttacctgccatgagaatgagatgtccagggacctccctgctccagctgggacctgtggggctttgtctgttgtcccgagcaccttggagatgtcatttctaacattttaacccaggaatccccccaccaagggacagagtgcaaggacatgatcgaacagaaaaagttctggtacaagatcaaccccgtggggtggtgagtgctgcagccccgggcctcacatcctgccgtccctgtgggagattggagcggtcccagtgcccaccgctgattctctggctccagcaacccctccaggtggatccgtcccacgcagcctggcctgaaacactgcccagccactgggtccagtaagacagagcctcgagtcattctgccaagaggatccagaaacacagactttttctggggtcctggaggcttctggcccatggggagcccctgggtcccagcgatccagccctgatgtgctgagggtgcagggcccagctgcagagcagaggagagtggcccccagggaccagcagcacgaaaggcacactgaggcacactggcaggcctgggctgcagagagcctgaaggtcatggggtagctggtggaagcaggaagaccccatacagcagcgaccactgaggctggtgctgcactttctcagggaattgagtgtgggctcccaccatcccggccactggcttcctccaaagcctcctcctcttacatcagcaaaccttctgttcggtgaccccctcagtgaccctctgtgcttgccttcgtggtcttcctcatggaggatttcgggtcagcgtgggggtcagaggtcatttcccataccccctcaaaggtacttcttgctgtggtccccacactctgacaccctcttctgaaatgaacacttttttgttgttgttgttgagacagagtcttgctctgtcgcccaggctggagtgcagtggcacaatcttagctcactgcaacctccacctcccaggttcaagcgattttcatgcctcagcttcccgagtagctgggattacaggcatgtgccaccaagcccagctaatttttgtatttttagtagagatgaggtttcaccatgttggccaggctggtctcgaacttctgacctcaagtgattcgcccgcctcggcctcccaaagtgctgggattacaagcatgagccactgcgcccggccacaaacacttttttttttttaaacaagtgaaaacaagtttattaacaaagttaagaaataaagaatggctattccata

SEQ ID NO: 4140 - DNA, 2131 bp, Homo sapiens
  source 1..2131: mol_type = unassigned DNA
gctcctgcgccgggggcggggccggcgagggctgcctctggggggtccgctagtcgcggggcggcggcggcggctgcgggcgcgaggtgaggggcgcgaggtgagggtcgcgaggttcccagcaggatgccccggctctgcaggaagctgaagtgagaggcccggagagggcccagcccgcccggggcaggatgaccaaggcccggctgttccggctgtggctggtgctggggtcggtgttcatgatcctgctgatcatcgtgtactgggacagcgcaggcgccgcgcacttctacttgcacacgtccttctctaggccgcacacggggccgccgctgcccacgcccgggccggacagggacagggagctcacggccgactccgatgtcgacgagtttctggacaagtttctcagtgctggcgtgaagcagagcgaccttcccagaaaggagacggagcagccgcctgcgccggggagcatggaggagagcgtgagaggctacgactggtccccgcgcgacgcccggcgcagcccagaccagggccggcagcaggcggagcggaggagcgtgctgcggggcttctgcgccaactccagcctggccttccccaccaaggagcgcgcattcgacgacatccccaactcggagctgagccacctgatcgtggacgaccggcacggggccatctactgctacgtgcccaaggtggcctgcaccaactggaagcgcgtgatgatcgtgctgagcggaagcctgctgcaccgcggtgcgccctaccgcgacccgctgcgcatcccgcgcgagcacgtgcacaacgccagcgcgcacctgaccttcaacaagttctggcgccgctacgggaagctctcccgccacctcatgaaggtcaagctcaagaagtacaccaagttcctcttcgtgcgcgaccccttcgtgcgcctgatctccgccttccgcagcaagttcgagctggagaacgaggagttctaccgcaagttcgccgtgcccatgctgcggctgtacgccaaccacaccagcctgcccgcctcggcgcgcgaggccttccgcgctggcctcaaggtgtccttcgccaacttcatccagtacctgctggacccgcacacggagaagctggcgcccttcaacgagcactggcggcaggtgtaccgcctctgccacccgtgccagatcgactacgacttcgtggggaagctggagactctggacgaggacgccgcgcagctgctgcagctactccaggtggaccggcagctccgcttccccccgagctaccggaacaggaccgccagcagctgggaggaggactggttcgccaagatccccctggcctggaggcagcagctgtataaactctacgaggccgactttgttctcttcggctaccccaagcccgaaaacctcctccgagactgaaagctttcgcgttgctttttctcgcgtgcctggaacctgacgcacgcgcactccagtttttttatgacctacgattttgcaatctgggcttcttgttcactccactgcctctatccattgagtactgtatcgatattgttttttaagattaatatatttcaggtatttaatacgaaatgtggaagggaatgctggagtaaaatatcccctctcccctccgcccgcccacccgcccgcccgctcgcccgctcgcccgctcctgtggtttttctgagcgtgcgggcgccgggaggggatgctgaggctgatggagctgcctccagggctagggccactcaccggaggagggcggggcctgcacttgaagtcaggccgcacctgtctgtttttggaagggtagccgacaaatccttccagagggaaagttctttgtttaagtgttgtacttgaaaaggtcaatcttcagggcttcctgtttgaagtcaagtcagaggtaaaccggtcagttacagaagcaggatttctaggatttctaactccagctgttcccatactgtctagtttaaattatggctgttaaggccgggcgggtgactcaggcaggtaatcccagaactttgggaggcccagacagaaggatcgcttgaggtcaggaatttgagacctggccaacatggtgaaaccctgtctctact

SEQ ID NO: 4141 - DNA, 4810 bp, Homo sapiens
  source 1..4810: mol_type = unassigned DNA
gtcccctccctgcgccccgccgcgtctcgggaggcggcgtgactcgggagttgccggcgcttcccggcggtggcggcgtctctggccggccttggtgcggcgagccgagcgaggcagctctgagccgcgcggaaatctggcattttttaaagtttgcgccccacaaagaggaaatattccaaaggtactcaggatgtaaaaggggagatcttcacagatgcctccgtggatggcatggcaatccatccatcaatgagaagaccatgatttcttttaattttctgtgtgtttccacattccccagtgagaattcttccacctttttttgtgccatgggaaaaacctgaagggcaggcagagctgctcccgaacttgtgaccttctctgaggttgcagcggctcttgtagaacatgactctgggacatcacttccttttgttttctttcggagctgaaccaaagaatgtgcaccctctttctctagtgctgtggtgtctgcttatttttgtatttgtgctttccatccatcttctgtgatcacaaggcattcttaaggttttctagcacgacttgcggacatccagactcgtggggggcccacccatggctcggtaagccagcagcccagggcactggcactaccatgaggcactgcattaattgctgcatacagctgttacccgacggcgcacacaagcagcaggtcaactgccaagggggcccccatcacggtcaccaggcgtgccccacgtgcaaaggagaaaacaaaattctgtttcgtgtggacagtaagcagatgaacttgcttgctgttctcgaagtgaggactgaagggaacgaaaactggggtgggtttttgcgcttcaaaaaggggaagcgatgtagcctcgtttttggactgataataatgaccttggtaatggcttcttacatcctttctggggcccaccaagagcttctgatctcatcacctttccattacggaggcttccccagcaaccccagcttgatggacagcgaaaacccaagtgacacaaaggagcatcaccaccaatcctctgtaaataatatttcatacatgaaggactatccaagcattaaattaattatcaacagcatcacaactaggattgagttcacgaccagacagctcccagacttagaagaccttaagaagcaggagttgcatatgttttcagtcatccccaacaaattccttccaaacagtaagagcccctgttggtacgaggagttctcggggcagaacaccaccgacccctacctcaccaactcctacgtgctctactccaagcgcttccgctccaccttcgacgccctgcgcaaggccttctggggccacctggcgcacgcgcacgggaagcacttccgcctgcgctgcctgccgcacttctacatcatagggcagcccaagtgcgggaccacagacctctatgaccgcctgcggctgcaccctgaggtcaagttctccgccatcaaggagccacactggtggacccggaagcgctttggaatcgtccgcctaagagatgggctgcgagaccgctatcccgtggaagattatctggacctctttgacctggccgcacaccagatccatcaaggactgcaggccagctctgcaaaggagcagagcaagatgaatacaatcattatcggggaggccagtgcctccacgatgtgggataataatgcctggacgttcttctacgacaacagcacggatggcgagccaccgtttctgacgcaggacttcatccacgcctttcagccaaatgccagactgattgtcatgctcagggaccctgtggagaggttgtactcagactatctctactttgcaagttcgaataaatccgcggacgacttccatgagaaagtgacagaagcactgcagctgtttgaaaattgcatgcttgattattcactgcgcgcctgcgtctacaacaacaccctcaacaacgccatgcctgtgaggctccaggttgggctctatgctgtgtaccttctggactggctcagcgtttttgacaagcaacagtttctcattcttcgcctggaagatcatgcatccaacgtcaagtacaccatgcacaaggtcttccagtttctgaacctagggcccttaagtgagaagcaggaggctttgatgaccaagagccccgcatccaatgcacggcgtcccgaggaccggaacctggggcccatgtggcccatcacacagaagattctgcgggatttctacaggcccttcaacgctaggctggcgcaggtcctcgcggatgaggcgtttgcgtggaagacgacgtgagagctgaattgttgctgcacgtgctgggcccgccaatgccgtcatcatcaggattttacaaatctctttgcggggaactgtttcactcatggtatggaaaaccccaggactctgccactctaggcacacatgaattataaccattttggaatttccttcgtgatgttcgagagctcagcaatggacccctcacagagctcctctatccgaggccattggagaccccagtttctcaagaattcagctctgctctgagcgtcctggagcttggggatgcagccagctggcctgcactgggtgtggagagaacacctagggaaggcagcctggccctgcccgcctccgccttctggagagcctctgggttctgagtcagcaagccagaggtcatgccacaggcctggctggaacttacacttcacgttccctttttttccccctagagatggggtctcgccgtgttgcacagactgtctgtattcaatggctatcttcacaggtgtgatcataccacattcacttctgaaacactcttgttgcgatcgctaacctcactgggacagagaaccgcagtctttcgagaatggaggctcttcattttttttttctcctttactccaaactcagccctccagtttcttcagatgtaaaccctgttaacgtcactgtttccaaaaggaaaaaaataagtcagtttttggcagcaccttcatctttctgacctcctcctattctgtccttgtggacttatgtttaacatagaaaatgaatgcgtttaaaacaaaaccactttctgcatttaaccagtcctggctctctctctgctgcctcttcatacgttttctcaagaacttcagtttataattggaagagaaatttttgctgttaatgccagaatgagcaacctcaaggaattgaacacttcttggaaaatctaggtaattcaagccctcatcaggtttacaagatcatcagagaaacagaggattttaatttttagttctggccggctacaggctccatttctctgccttcccattggaaatagtttatttccacattctccactgcgtgtggtcaaagttcctcacccagcaagggactatagatactcgtgtcccaattccaaaacacaatgcacaagctgaacttgggctgaacgtggcgtgttgagatttggaatgaggtttctaagagccgtgttcttcatggaattttccaggccacttggcagcttggtttaccgatggatgggctagagatcttgtcgtttcttggaagtcacagggaagattgaagagaacgcttgagcatccttggcaacagcccaggtgggacctggatgaagctttgcactcaagtattgtcaagggaagcttcctgtgaaccaaagttctcaggccaaggtctcgcccaccaaagccagaaagtgcaagcacccgtctacccagctctaacttgtatgtgtgagacagaccaggcttcgggggtaggaggatctgcagttgttcagccgtctttctgctggtgttgtctttctgccatcagagaagggacacacagcccgttcgaaggtgtgcagagggctctgagcgccaggatggccagggctgtttttgctactgaaggagcgtgtgtcctgaactcccacttgcagggacagtccccaccttctctatagccggcactgggagcagccgccagcagggaaatctggcctgagcacaaggatgctttagggagagatcacttcagtgtgtgtgtatatttatttgcagtacagtgcgcgcgtgtgtgtgtgtgtacgcgcacgtgtgggtgagtgcgtcttctgagtgggttctgttcagttgctaatgaggctcctccgctctggacacaacccttttatagattaatttctctgccaattaacttgtcattttcagtacatattttactattccacaccaaccataattacaacaagggatttttcttatgcactcctatgcatgtgaataacatgtggtgtaattctgcttcttacagaagtattactgaaggtattatttccaatattatttggtttattatgcggatcttttttatatatgcagtcccatcccttctgtgccactcaatgccatccagacatggtttttccctccaggggcctttctctccagagggcacttcggctgcctctgcttcctctcattcgaggcccggctcttgctgacagaataggttccgttctgggcggtggttctcgagcctgccattcaaaaccaaagcaaattggagcatttctcacaacatggtattgaagttcctttttgttctcaaaagttgtgaccgtgttaaattgtactcccttagtcctgtaaggtatgttaagtgaatcgcagttacgctgtacttttattaatatttaacataattaaagatggacccataagagtgacgcctgtggagcgcgtgctcttcctctgcagccaa

SEQ ID NO: 4142 - DNA, 3553 bp, Homo sapiens
  source 1..3553: mol_type = unassigned DNA
gactcgggagttgccggcgcttcccggcggtggcggcgtctctggccggccttggtgcggcgagccgagcgaggcagctctgagccgcgcggaaatctggcattttttaaagtttgcgccccacaaagaggaaatattccaaaggtactcaggatgtaaaaggggagatcttcacagatgcctccgtggatggcatggcaatccatccatcaatgagaagaccatgatttcttttaattttctgtgtgtttccacattccccagtgagaattcttccacctttttttgtgccatgggaaaaacctgaagggcaggcagagctgctcccgaacttgtgaccttctctgaggttgcagcggctcttgtagaacatgactctgggacatcacttccttttgttttctttcggagctgaaccaaagaatgtgcaccctctttctctagtgctgtggtgtctgcttatttttgtatttgtgctttccatccatcttctgtgatcacaaggcattcttaaggttttctagcacgacttgcggacatccagactcgtggggggcccacccatggctcggtaagccagcagcccagggcactggcactaccatgaggcactgcattaattgctgcatacagctgttacccgacggcgcacacaagcagcaggtcaactgccaagggggcccccatcacggtcaccaggcgtgccccacgtgcaaaggagaaaacaaaattctgtttcgtgtggacagtaagcagatgaacttgcttgctgttctcgaagtgaggactgaagggaacgaaaactggggtgggtttttgcgcttcaaaaaggggaagcgatgtagcctcgtttttggactgataataatgaccttggtaatggcttcttacatcctttctggggcccaccaagagcttctgatctcatcacctttccattacggaggcttccccagcaaccccagcttgatggacagcgaaaacccaagtgacacaaaggagcatcaccaccaatcctctgtaaataatatttcatacatgaaggactatccaagcattaaattaattatcaacagcatcacaactaggattgagttcacgaccagacagctcccagacttagaagaccttaagaagcaggagttgcatatgttttcagtcatccccaacaaattccttccaaacagtaagagcccctgttggtacgaggagttctcggggcagaacaccaccgacccctacctcaccaactcctacgtgctctactccaagcgcttccgctccaccttcgacgccctgcgcaaggccttctggggccacctggcgcacgcgcacgggaagcacttccgcctgcgctgcctgccgcacttctacatcatagggcagcccaagtgcgggaccacagacctctatgaccgcctgcggctgcaccctgaggtcaagttctccgccatcaaggagccacactggtggacccggaagcgctttggaatcgtccgcctaagagatgggctgcgagaccgctatcccgtggaagattatctggacctctttgacctggccgcacaccagatccatcaaggactgcaggccagctctgcaaaggagcagagcaagatgaatacaatcattatcggggaggccagtgcctccacgatgtgggataataatgcctggacgttcttctacgacaacagcacggatggcgagccaccgtttctgacgcaggacttcatccacgcctttcagccaaatgccagactgattgtcatgctcagggaccctgtggagaggttgtactcagactatctctactttgcaagttcgaataaatccgcggacgacttccatgagaaagtgacagaagcactgcagctgtttgaaaattgcatgcttgattattcactgcgcgcctgcgtctacaacaacaccctcaacaacgccatgcctgtgtgtaccccccccccccgtaccccccgagctggcccctggcagaaggagctggtttgttgttattatgcaagcggcattgtgggtttgcgtttcagcataggaacagagagaagcgttttaatgtgcaaatgctgttccccattattcatggatgtaaaagctgaaaactgatgggctcttggtctggctcctgccttcctccctgctggtcacctgccacctccccctcctccctcagcaggaggatgagggtgcctttaggaagattaccatttagcaagacacccagcaattagaatcggcagacatgaggacacccaactctcaaattgtcttaagagcattctcttgagcggtggattgttttgttggtttaaaaaactacccatcaatgattttcaatgcttctttgacagagtctcaattgaaaaacattttctgttgattcctcaatcgtatctcttgttcttccttcagaactatgtctgtaaatttctagcctttttgaatgcaaaaagctgttattggtgaattcagcaccttttagccccgggatagttttccatgctgggctccctgggctggctgtgtacttcaacagcagggcttatgcagcgagcattgccgctgcgtgttccagagtggctttacaagccttgctctgctcagcgtctcgcatagcaaggcaccaacaggcctgctgtggagtcttggaagcccccaggtggtgggacttcaggccaagaggctctgccccctctttcttactacagaggccgtgggatctgggaggcagcatgcaggggcagcaggtgggattccaggctgccctgttggactttgtagtttggcaaggaagatgccacagggacacaggtaaccccagagcctgctctggtgccaggtaggaggagtacactttggaaccagccattggtgtgggtcaggtttccagcttggccatttgctggctctgtgactctaggcagttgtctcagcctttctgagactcagttgctttgtcatacaatggggtaataatgctgctgtaccaggctgttgtgatgggtctgtcttgcattcctgcgttcattcttgccactatgtcccctgcatgacgctgggtcctggggccacagcaatgccaggacaggtgtggtccttgccttcctgtgcagctggcggggagagaagatggaggctgggcagggagctctggccaccagagaaccacctgagaacggggcttcaggcaggttcttaggagagggaatgtctgtgctgaggcctgaaggagagttggccagggaactgagagcagcgtgtgcagaggcccagtggtcagcaccacctaccatacagaacgcagccagccgcctggtgtgggagatggggggcactgaggcagggggcttgggtgcgtggcacatggggccgcaccacctggtctagcctcagaagaagtctagacatcaccctgagagagatgggacccctcagagggttttaagcagaagatagtgtaggagtggaaaaggaatatctcactactgtgttcatggctgaggcacctataataaaagactaacgcgagaaagca

SEQ ID NO: 4143 - DNA, 436 bp, Homo sapiens
  source 1..436: mol_type = unassigned DNA
cgacaacagcacggatggcgagccaccgtttctgacgcaggacttcatccacgcctttcagccaaatgccagactgattgtcatgctcagggaccctgtggagaggttgtactcagactatctctactttgcaagttcgaataaatccgcggacgacttccatgagaaagtgacagaagcactgcagctgtttgaaaattgcatgcttgattattcactgcgcgcctgcgtctacaacaacaccctcaacaacgccatgcctgtgtgtaccccccccccccgtaccccccgagctggcccctggcagaaggagctggtttgttgttattatgcaagcggcattgtgggtttgcgtttcagcataggaacagagagaagcgttttaatgtgcaaatgctgttccccattattcatggatgtaaaagctgaaaactga

SEQ ID NO: 4144 - DNA, 826 bp, Homo sapiens
  source 1..826: mol_type = unassigned DNA
cgctcggggagtcaggttgacgcgccctggatgcggggctagaggctcggggctgggcgcgctcccgcggagccggagccgcagaggctcccgggctggactcaggcttctcaggaaatctggcattttttaaagtttgcgccccacaaagaggaaatattccaaaggtactcaggatgtaaaaggggagatcttcacagatgcctccgtggatggcatggcaatccatccatcaatgagaagaccatgatttcttttaattttctgtgtgtttccacattccccagtgagaattcttccacctttttttgtgccatgggaaaaacctgaagggcaggcagagctgctcccgaacttgtgaccttctctgaggttgcagcggctcttgtagaacatgactctgggacatcacttccttttgttttctttcggagctgaaccaaagaatgtgcaccctctttctctagtgctgtggtgtctgcttatttttgtatttgtgctttccatccatcttctgtgatcacaaggcattcttaaggttttctagcacgacttgcggacatccagactcgtggggggcccacccatggctcggtaagccagcagcccagggcactggcactaccatgaggcactgcattaattgctgcatacagctgttacccgacggcgcacacaagcagcaggtcaactgccaagggggcccccatcacggtcaccaggcgtgccccacgtgcaaaggagaaaacaaaattctgtttcgtgtggacagtaagcagatgaacttgcttgctgttctcgaagtgaggactgaagggaacgaaaa

SEQ ID NO: 4145 - DNA, 4820 bp, Homo sapiens
  source 1..4820: mol_type = unassigned DNA
gtcactcccaaacttttcctcccagcgctcggggagtcaggttgacgcgccctggatgcggggctagaggctcggggctgggcgcgctcccgcggagccggagccgcagaggctcccgggctggactcaggcttctcaggaaatctggcattttttaaagtttgcgccccacaaagaggaaatattccaaaggtactcaggatgtaaaaggggagatcttcacagatgcctccgtggatggcatggcaatccatccatcaatgagaagaccatgatttcttttaattttctgtgtgtttccacattccccagtgagaattcttccacctttttttgtgccatgggaaaaacctgaagggcaggcagagctgctcccgaacttgtgaccttctctgaggttgcagcggctcttgtagaacatgactctgggacatcacttccttttgttttctttcggagctgaaccaaagaatgtgcaccctctttctctagtgctgtggtgtctgcttatttttgtatttgtgctttccatccatcttctgtgatcacaaggcattcttaaggttttctagcacgacttgcggacatccagactcgtggggggcccacccatggctcggtaagccagcagcccagggcactggcactaccatgaggcactgcattaattgctgcatacagctgttacccgacggcgcacacaagcagcaggtcaactgccaagggggcccccatcacggtcaccaggcgtgccccacgtgcaaaggagaaaacaaaattctgtttcgtgtggacagtaagcagatgaacttgcttgctgttctcgaagtgaggactgaagggaacgaaaactggggtgggtttttgcgcttcaaaaaggggaagcgatgtagcctcgtttttggactgataataatgaccttggtaatggcttcttacatcctttctggggcccaccaagagcttctgatctcatcacctttccattacggaggcttccccagcaaccccagcttgatggacagcgaaaacccaagtgacacaaaggagcatcaccaccaatcctctgtaaataatatttcatacatgaaggactatccaagcattaaattaattatcaacagcatcacaactaggattgagttcacgaccagacagctcccagacttagaagaccttaagaagcaggagttgcatatgttttcagtcatccccaacaaattccttccaaacagtaagagcccctgttggtacgaggagttctcggggcagaacaccaccgacccctacctcaccaactcctacgtgctctactccaagcgcttccgctccaccttcgacgccctgcgcaaggccttctggggccacctggcgcacgcgcacgggaagcacttccgcctgcgctgcctgccgcacttctacatcatagggcagcccaagtgcgggaccacagacctctatgaccgcctgcggctgcaccctgaggtcaagttctccgccatcaaggagccacactggtggacccggaagcgctttggaatcgtccgcctaagagatgggctgcgagaccgctatcccgtggaagattatctggacctctttgacctggccgcacaccagatccatcaaggactgcaggccagctctgcaaaggagcagagcaagatgaatacaatcattatcggggaggccagtgcctccacgatgtgggataataatgcctggacgttcttctacgacaacagcacggatggcgagccaccgtttctgacgcaggacttcatccacgcctttcagccaaatgccagactgattgtcatgctcagggaccctgtggagaggttgtactcagactatctctactttgcaagttcgaataaatccgcggacgacttccatgagaaagtgacagaagcactgcagctgtttgaaaattgcatgcttgattattcactgcgcgcctgcgtctacaacaacaccctcaacaacgccatgcctgtgaggctccaggttgggctctatgctgtgtaccttctggactggctcagcgtttttgacaagcaacagtttctcattcttcgcctggaagatcatgcatccaacgtcaagtacaccatgcacaaggtcttccagtttctgaacctagggcccttaagtgagaagcaggaggctttgatgaccaagagccccgcatccaatgcacggcgtcccgaggaccggaacctggggcccatgtggcccatcacacagaagattctgcgggatttctacaggcccttcaacgctaggctggcgcaggtcctcgcggatgaggcgtttgcgtggaagacgacgtgagagctgaattgttgctgcacgtgctgggcccgccaatgccgtcatcatcaggattttacaaatctctttgcggggaactgtttcactcatggtatggaaaaccccaggactctgccactctaggcacacatgaattataaccattttggaatttccttcgtgatgttcgagagctcagcaatggacccctcacagagctcctctatccgaggccattggagaccccagtttctcaagaattcagctctgctctgagcgtcctggagcttggggatgcagccagctggcctgcactgggtgtggagagaacacctagggaaggcagcctggccctgcccgcctccgccttctggagagcctctgggttctgagtcagcaagccagaggtcatgccacaggcctggctggaacttacacttcacgttccctttttttccccctagagatggggtctcgccgtgttgcacagactgtctgtattcaatggctatcttcacaggtgtgatcataccacattcacttctgaaacactcttgttgcgatcgctaacctcactgggacagagaaccgcagtctttcgagaatggaggctcttcattttttttttctcctttactccaaactcagccctccagtttcttcagatgtaaaccctgttaacgtcactgtttccaaaaggaaaaaaataagtcagtttttggcagcaccttcatctttctgacctcctcctattctgtccttgtggacttatgtttaacatagaaaatgaatgcgtttaaaacaaaaccactttctgcatttaaccagtcctggctctctctctgctgcctcttcatacgttttctcaagaacttcagtttataattggaagagaaatttttgctgttaatgccagaatgagcaacctcaaggaattgaacacttcttggaaaatctaggtaattcaagccctcatcaggtttacaagatcatcagagaaacagaggattttaatttttagttctggccggctacaggctccatttctctgccttcccattggaaatagtttatttccacattctccactgcgtgtggtcaaagttcctcacccagcaagggactatagatactcgtgtcccaattccaaaacacaatgcacaagctgaacttgggctgaacgtggcgtgttgagatttggaatgaggtttctaagagccgtgttcttcatggaattttccaggccacttggcagcttggtttaccgatggatgggctagagatcttgtcgtttcttggaagtcacagggaagattgaagagaacgcttgagcatccttggcaacagcccaggtgggacctggatgaagctttgcactcaagtattgtcaagggaagcttcctgtgaaccaaagttctcaggccaaggtctcgcccaccaaagccagaaagtgcaagcacccgtctacccagctctaacttgtatgtgtgagacagaccaggcttcgggggtaggaggatctgcagttgttcagccgtctttctgctggtgttgtctttctgccatcagagaagggacacacagcccgttcgaaggtgtgcagagggctctgagcgccaggatggccagggctgtttttgctactgaaggagcgtgtgtcctgaactcccacttgcagggacagtccccaccttctctatagccggcactgggagcagccgccagcagggaaatctggcctgagcacaaggatgctttagggagagatcacttcagtgtgtgtgtatatttatttgcagtacagtgcgcgcgtgtgtgtgtgtgtacgcgcacgtgtgggtgagtgcgtcttctgagtgggttctgttcagttgctaatgaggctcctccgctctggacacaacccttttatagattaatttctctgccaattaacttgtcattttcagtacatattttactattccacaccaaccataattacaacaagggatttttcttatgcactcctatgcatgtgaataacatgtggtgtaattctgcttcttacagaagtattactgaaggtattatttccaatattatttggtttattatgcggatcttttttatatatgcagtcccatcccttctgtgccactcaatgccatccagacatggtttttccctccaggggcctttctctccagagggcacttcggctgcctctgcttcctctcattcgaggcccggctcttgctgacagaataggttccgttctgggcggtggttctcgagcctgccattcaaaaccaaagcaaattggagcatttctcacaacatggtattgaagttcctttttgttctcaaaagttgtgaccgtgttaaattgtactcccttagtcctgtaaggtatgttaagtgaatcgcagttacgctgtacttttattaatatttaacataattaaagatggacccataagagtgacgcctgtggagcgcgtgctcttcctctgcagccaagc

SEQ ID NO: 4146 - DNA, 3245 bp, Homo sapiens
  source 1..3245: mol_type = unassigned DNA
ctctggctgctgctccagctctggcagacacgccaagctttgagaaagctcccagtgaggaactggtcttctggagactctgtgtggcatagagtgattcaaccaccttaagaagacctctggctttcctggaacacagatgtcgagacatctcccatggatttgtgatcagcgttgcagctctcccagcagccctggacggtggtgagtcccctcagctggccaggacagtactctgctctcacctctctgcttcttgggctccatcccagctccccatcaactgatcttcttgcaaacccacagggctccaggacaccctccttctggagcccatgctgcctacagcacttcactccccaccagtgatgacaacagttgctgttctttgtccactttatttacttgtttatctttaatgacaaaagttttttttttgttgtttttttttttttttttgaaacggagtctcactcttcactcaggctgcagtgcagtggcgcaatctcagctcactgccacctctgcctcccaggttcacgccattctcctgcctcagcctcccgagtagctgggactacaggcgcccaccatcacgcctggctaattttttgtatttttagtagagatggggtctcactgtgttagccaggatggtctcgatctcctgacctcgtgatccgcccgcctcggcctcccataatgctgggattacaggcgtgagccaccgcgcctggctgacaaaagttttatacctgcctgttaaaaaaattatataatacagaagcacaccttgtaaaaggtgcaatcctcagttatgggcatgactgcgtgttcccttcccccatcttcattataataaccccccaatccccccagatcctgtgagccaggtaccggaattatccctctttcacacacgggtaaagtgatccgtcacagagagatttaagtgatcttcataagcaagatcataggctaggaagtggcagagccaggattcaacctcggcgagcctggtggtgctctgacatccaccgaagcccccatcaagcccttttagctccacaacctaaaagggtctctctaagaggtatcctgaagcaaaagacaggagttctctttgaaacatagtatttctctctacagatagatagcctgtaggtatgtaagtaggtgggtgggtgggtaggtagacagtttgatgatatcccacattattctgcaactggacttctgctgtgagcacagactatattctggcctatgtcttgactccgtattcctgggaaagtgctcgactgagaccttgggagtcttgggaagtccaatgggtagggtagccgaatctgagggctgatccctgagggcactgggcagtaattggggcatgggatgggcatgagggcccgggtccctaaagttgcccactccacccgaaggcccccagccgcccgcatgtggctgccacggttctccagcaagacagtgacagtgctcctcctggcacagaccacctgcctcctgctcttcatcatctcccggccagggccctcatccccagccggcggcgaggatcgtgtgcacgtgctggtgctgtcctcgtggcgctcgggctcatccttcttgggccagctcttcagccagcaccccgacgtcttctacctgatggagcccgcgtggcatgtgtggaccaccctgtcgcagggcagcgcggcaacgctgcacatggccgtgcgcgacctgatgcgctctatctttttgtgcgacatggacgtgtttgatgcctacatgccacagagccgaaacctgtccgcctttttcaactgggcaacgagccgcgcgctgtgctcgccgcccgcctgcagcgcctttccccgaggcaccatcagcaagcaggacgtatgcaagacactgtgcacgcggcagccattcagcctggcccgggaggcctgccgctcctacagccacgtggtgctcaaggaggtgcgcttcttcaacctgcaggtgctctacccgctgctcagcgaccccgcgctcaacctgcgcatcgtgcacctggtgcgcgacccgcgggccgtgctgcgctcccgggaggcggcgggcccgatactggcacgcgacaacggcatcgtgctgggcaccaacggcaagtgggtggaggccgaccctcacctgcgcctgattcgcgaggtgtgccgcagccacgtgcgcatcgccgaggccgccacactcaagccgccacccttcctgcgcggccgctaccgcctggtgcgcttcgaggacctggcgcgggagccgctggcagagatccgcgcactctacgccttcaccggcctgaccctcacgccacagctcgaggcctggatccacaacatcacccacgggtcggggatcggcaagccaatcgaggccttccatacttcgtctaggaatgcgcgcaacgtctcccaggcctggcgccacgcgttgcccttcactaagatcctgcgcgtgcaggaggtgtgcgccggcgcgctgcagctgctgggctaccggcctgtgtactctgcggaccagcagcgtgacctcaccctggatctggtgctgccacgaggcccagaccacttcagctgggcatcgcctgactgagaactctgggccttagagcaggccccgaactgtggtcgccaggcccaggaggcgactgcatggtggagagggagctggggcgcatggggaagcaggtccctactatcaaccgggagtttggggtcctcccctgaagtaggcaaggactgcacgtttctttctctcctgattctcggttttcctttgagtcttctggagctgccttctcatcaggtgcactcttcatggaaagcaactcttgcccctacctcttctgggcgcagggagtaagttactgctaaattaaattaaatgtgtgccaggccgggtgcggtggctcatgcctgtaatcccagcattttgagaggctgaggcgggtggatcacctgaggtcaggagttcgaaaccagcctggccaacatagtgaaaccccctctctactaaaaatgcaaaaattagtccggcgtggtggcacactcctgtaatcccagctacttaggaggctgaggtgggagaatcacttggactccagaggtggaggttgcagtaagctgagatcatgccactgcaccctagcttgggtggcagagcaagactctatcaaaaaaataagtaataaatttgttcaaaagtcc

SEQ ID NO: 4147 - DNA, 514 bp, Homo sapiens
  source 1..514: mol_type = unassigned DNA
aaagagctggctgtgcggtggaacttggaagagacgacgtctgggagcttttgctgagcccagggggagaggcgtccctctggctgctgctccagctctggcagacacgccaagctttgagaaagctcccagtgaggaactggtcttctggagactctgtgtggcatagagtgattcaaccaccttaagaagacctctggctttcctggaacacagatgtcgagacatctcccatggatttgtgatcagcgttgcagctctcccagcagccctggacggtggcccccagccgcccgcatgtggctgccacggttctccagcaagacagtgacagtgctcctcctggcacagaccacctgcctcctgctcttcatcatctcccggccagggccctcatccccagccggcggcgaggatcgtgtgcacgtgctggtgctgtcctcgtggcgctcgggctcatccttcttgggccagctcttcagccagcaccccgacgtcttctacctgatggagc

SEQ ID NO: 4148 - DNA, 1040 bp, Homo sapiens
  source 1..1040: mol_type = unassigned DNA
ttcgctgggagccttcccggcgcgcaagccggatccggcagtgctgcggggaggagagaggacgaggcggcggcggcagcaggaggtgggggaccgatcgcgccgggggccgaagaggaacgccgccccgcgccctctcgctccccgcacgctccggctgccggccccacgctgctcgcccacagatcgcactgggttccgcttggagcgggcggaggcaccgggcccgagctgggtcggaggtcctctccgccgcctgcgcgccccaagcagaggatccgccgcggagaaccgctcccggactggaggcgcccgcggcctcgggtgcgtccgctgcgccaggtttaaaggtcaacaagaatatcttaccttaatttgacaagtacgcaagaaataatgcaagactcgtttatgttcagatctcggcctgatggacgcctggtgtggacgatgagggaagaacgtgccccccacacccaagaggtgacccctgagccagccccggatgaccctgcgacctggaacaatgcggctggcctgcatgttctcttccatcctgctgttcggagctgcaggcctcctcctcttcatcagcctgcaggaccctacggagctcgccccccagcaggtgccaggaataaagttcaacatcaggccaaggcagccccaccacgacctcccaccaggcggctcccaggatggtgacttgaaggaacccacagagagggtcactcgggacttatccagtggggccccgaggggccgcaacctgccagcgcctgaccagcctcaacccccgctgcagaggggaacccgtctgcggctccgccagcgccgtcgccgtctgctcatcaagaaaatgccagctgcggcgaccatcccggccaacagctcggacgcgcccttcatccggccgggacccgggacgctggatggccgctgggtcagcctgcaccggagccagcaggagcgcaagcgggtgatgcaggaggcctgcgccaagtaccgggcgagcagcagccgccgggccgtcacgcccc

SEQ ID NO: 4149 - DNA, 2133 bp, Homo sapiens
  source 1..2133: mol_type = unassigned DNA
ccggcgcgcaagccggatccggcagtgctgcggggaggagagaggacgaggcggcggcggcagcaggaggtgggggaccgatcgcgccgggggccgaagaggaacgccgccccgcgccctctcgctccccgcacgctccggctgccggccccacgctgctcgcccacagatcgcactgggttccgcttggagcgggcggaggcaccgggcccgagctgggtcggaggtcctctccgccgcctgcgcgccccaagcagaggatccgccgcggagaaccgctcccggactggaggcgcccgcggcctcgggtgcgtccgctgcgccagatctcggcctgatggacgcctggtgtggacgatgagggaagaacgtgccccccacacccaagaggtgacccctgagccagccccggatgaccctgcgacctggaacaatgcggctggcctgcatgttctcttccatcctgctgttcggagctgcaggcctcctcctcttcatcagcctgcaggaccctacggagctcgccccccagcaggtgccaggaataaagttcaacatcaggccaaggcagccccaccacgacctcccaccaggcggctcccaggatggtgacttgaaggaacccacagagagggtcactcgggacttatccagtggggccccgaggggccgcaacctgccagcgcctgaccagcctcaacccccgctgcagaggggaacccgtctgcggctccgccagcgccgtcgccgtctgctcatcaagaaaatgccagctgcggcgaccatcccggccaacagctcggacgcgcccttcatccggccgggacccgggacgctggatggccgctgggtcagcctgcaccggagccagcaggagcgcaagcgggtgatgcaggaggcctgcgccaagtaccgggcgagcagcagccgccgggccgtcacgccccgccacgtgtcccgtatcttcgtggaggaccgccaccgcgtgctctactgcgaggtgcccaaggccggctgctccaattggaagcgggtgctcatggtgctggccggcctggcctcgtccactgccgacatccagcacaacaccgtccactatggcagcgctctcaagcgcctggacaccttcgaccgccagggtatcttgcaccgtctcagcacctacaccaagatgctctttgtccgcgagcccttcgagaggctggtgtccgccttccgcgacaagtttgagcaccccaacagctactatcacccggtcttcggcaaggccatcctggcccggtaccgcgccaatgcctctcgggaggccctgcggaccggctctggggtgcgttttcccgagttcgtccagtacctgctggacgtgcaccggcccgtggggatggacattcactgggaccatgtcagccggctctgcagcccctgcctcatcgactacgatttcgtaggcaagttcgagagcatggaggacgatgccaacttcttcctgagcctcatccgcgcgccgcggaacctgaccttcccccggttcaaggaccggcactcgcaggaggcgcggaccacagcgaggatcgcccaccagtacttcgcccaactctcggccctgcaaaggcagcgcacctacgacttctactacatggattacctgatgttcaactattccaagccctttgcagatctgtactgaggggcgccgcagctggccggggccgccctgccccggtcactcacctgtgctcccgggcatcctcctgtccctggctcctcatcctgggagcaacagggctctgaggacgtgaggagccatcgctgtgggaggcagcaggccccgggtggggggcagaggcgcccagccttggatggggaccccagcccctggcctgtacctgtttcctcattccttggctgagggagaggctgagaactgggcagacacccctggagctcagccgacagttttgatgagcagggaagtctgaggcccagaggacggggggcccagcggtaagggatgtcccgcactcccttagccattgccttggaccaaaccacgtggtttgcagcttttctacgagccaggggggaggttcccttggattaaggttccaaataaagcacatggtttccagagca

SEQ ID NO: 4150 - DNA, 683 bp, Homo sapiens
  source 1..683: mol_type = unassigned DNA
cggatccggcagtgctgcggggaggagagaggacgaggcggcggcggcagcaggaggtgggggaccgatcgcgccgggggccgaagaggaacgccgccccgcgccctctcgctccccgcacgctccggctgccggccccacgctgctcgcccacagatcgcactgggttccgcttggagcgggcggaggcaccgggcccgagctgggtcggaggtcctctccgccgcctgcgcgccccaagcagaggatccgccgcggagaaccgctcccggactggaggcgcccgcggcctcgggtgcgtccgctgcgccagatctcggcctgatggacgcctggtgtggacgatgagggaagaacgtgccccccacacccaagaggtgacccctgagccagccccggatgaccctgcgacctggaacaatgcggctggcctgcatgttctcttccatcctgctgttcggagctgcaggcctcctcctcttcatcagcctgcaggaccctacggagctcgccccccagcaggtgccaggacagagacctctgcggtgtcttcaattaatggaagaccaccagcctgtattgcagagggtggcgtgcttctgcagcccagaagattagaggaaatctgggaattcaagactttcacaggcatcgacctacagtccccaacgcatttctcaggg

SEQ ID NO: 4151 - DNA, 2479 bp, Homo sapiens
  source 1..2479: mol_type = unassigned DNA
gggactcgtcccagagtttgctgccgccgccgccgctgccattagagcggttttaattagctgcaggatttttaatgagctgaaatcaagaagagccccatctcagaagtaagcgagagccgcgcgcagggaagaactagtctgacaaaacagaaggaggtggtgctctcgggggactgggctgtaggctcccaccgatcgatcggcgacgagcagatgagttcccgaggccaggaggctgaggagggaagccagggctcagagaccagcgcccggtgcagagtccccgctgctgccaccgcggcagaaggcacggtgccggattcaaggtgacggcagtgcctggctccattctcctcaagttgccatagcagcctctctcccaacaagcagcttctccgggagccctcagccgggagggacgtcattgttctctcctgcccgtgtggtgcaaggagacccaccggacagagaactttcccgagcccggggtccgctgaccacgtgggtgcacccatgctgcctggagccaggcacagggacaggtccccacggccacagggaatcctctgggcagctgaggggagcgtccaggcccagaagcagctgcagccaagcgtgtccttggagccgtccatgcgtctgtccgcctgctgccggtcgccactggagatctcggcctgatggacgcctggtgtggacgatgagggaagaacgtgccccccacacccaagaggtgacccctgagccagccccggatgaccctgcgacctggaacaatgcggctggcctgcatgttctcttccatcctgctgttcggagctgcaggcctcctcctcttcatcagcctgcaggaccctacggagctcgccccccagcaggtgccaggaataaagttcaacatcaggccaaggcagccccaccacgacctcccaccaggcggctcccaggatggtgacttgaaggaacccacagagagggtcactcgggacttatccagtggggccccgaggggccgcaacctgccagcgcctgaccagcctcaacccccgctgcagaggggaacccgtctgcggctccgccagcgccgtcgccgtctgctcatcaagaaaatgccagctgcggcgaccatcccggccaacagctcggacgcgcccttcatccggccgggacccgggacgctggatggccgctgggtcagcctgcaccggagccagcaggagcgcaagcgggtgatgcaggaggcctgcgccaagtaccgggcgagcagcagccgccgggccgtcacgccccgccacgtgtcccgtatcttcgtggaggaccgccaccgcgtgctctactgcgaggtgcccaaggccggctgctccaattggaagcgggtgctcatggtgctggccggcctggcctcgtccactgccgacatccagcacaacaccgtccactatggcagcgctctcaagcgcctggacaccttcgaccgccagggtatcttgcaccgtctcagcacctacaccaagatgctctttgtccgcgagcccttcgagaggctggtgtccgccttccgcgacaagtttgagcaccccaacagctactatcacccggtcttcggcaaggccatcctggcccggtaccgcgccaatgcctctcgggaggccctgcggaccggctctggggtgcgttttcccgagttcgtccagtacctgctggacgtgcaccggcccgtggggatggacattcactgggaccatgtcagccggctctgcagcccctgcctcatcgactacgatttcgtaggcaagttcgagagcatggaggacgatgccaacttcttcctgagcctcatccgcgcgccgcggaacctgaccttcccccggttcaaggaccggcactcgcaggaggcgcggaccacagcgaggatcgcccaccagtacttcgcccaactctcggccctgcaaaggcagcgcacctacgacttctactacatggattacctgatgttcaactattccaagccctttgcagatctgtactgaggggcgccgcagctggccggggccgccctgccccggtcactcacctgtgctcccgggcatcctcctgtccctggctcctcatcctgggagcaacagggctctgaggacgtgaggagccatcgctgtgggaggcagcaggccccgggtggggggcagaggcgcccagccttggatggggaccccagcccctggcctgtacctgtttcctcattccttggctgagggagaggctgagaactgggcagacacccctggagctcagccgacagttttgatgagcagggaagtctgaggcccagaggacggggggcccagcggtaagggatgtcccgcactcccttagccattgccttggaccaaaccacgtggtttgcagcttttctacgagccaggggggaggttcccttggattaaggttccaaataaagcacatggtttccagagca

SEQ ID NO: 4152 - DNA, 2225 bp, Homo sapiens
  source 1..2225: mol_type = unassigned DNA
ttcgctgggagccttcccggcgcgcaagccggatccggcagtgctgcggggaggagagaggacgaggcggcggcggcagcaggaggtgggggaccgatcgcgccgggggccgaagaggaacgccgccccgcgccctctcgctccccgcacgctccggctgccggccccacgctgctcgcccacagatcgcactgggttccgcttggagcgggcggaggcaccgggcccgagctgggtcggaggtcctctccgccgcctgcgcgccccaagcagaggatccgccgcggagaaccgctcccggactggaggcgcccgcggcctcgggtgcgtccgctgcgccaggtttaaaggtcaacaagaatatcttaccttaatttgacaagtacgcaagaaataatgcaagactcgtttatgttcagatctcggcctgatggacgcctggtgtggacgatgagggaagaacgtgccccccacacccaagaggtgacccctgagccagccccggatgaccctgcgacctggaacaatgcggctggcctgcatgttctcttccatcctgctgttcggagctgcaggcctcctcctcttcatcagcctgcaggaccctacggagctcgccccccagcaggtgccaggaataaagttcaacatcaggccaaggcagccccaccacgacctcccaccaggcggctcccaggatggtgacttgaaggaacccacagagagggtcactcgggacttatccagtggggccccgaggggccgcaacctgccagcgcctgaccagcctcaacccccgctgcagaggggaacccgtctgcggctccgccagcgccgtcgccgtctgctcatcaagaaaatgccagctgcggcgaccatcccggccaacagctcggacgcgcccttcatccggccgggacccgggacgctggatggccgctgggtcagcctgcaccggagccagcaggagcgcaagcgggtgatgcaggaggcctgcgccaagtaccgggcgagcagcagccgccgggccgtcacgccccgccacgtgtcccgtatcttcgtggaggaccgccaccgcgtgctctactgcgaggtgcccaaggccggctgctccaattggaagcgggtgctcatggtgctggccggcctggcctcgtccactgccgacatccagcacaacaccgtccactatggcagcgctctcaagcgcctggacaccttcgaccgccagggtatcttgcaccgtctcagcacctacaccaagatgctctttgtccgcgagcccttcgagaggctggtgtccgccttccgcgacaagtttgagcaccccaacagctactatcacccggtcttcggcaaggccatcctggcccggtaccgcgccaatgcctctcgggaggccctgcggaccggctctggggtgcgttttcccgagttcgtccagtacctgctggacgtgcaccggcccgtggggatggacattcactgggaccatgtcagccggctctgcagcccctgcctcatcgactacgatttcgtaggcaagttcgagagcatggaggacgatgccaacttcttcctgagcctcatccgcgcgccgcggaacctgaccttcccccggttcaaggaccggcactcgcaggaggcgcggaccacagcgaggatcgcccaccagtacttcgcccaactctcggccctgcaaaggcagcgcacctacgacttctactacatggattacctgatgttcaactattccaagccctttgcagatctgtactgaggggcgccgcagctggccggggccgccctgccccggtcactcacctgtgctcccgggcatcctcctgtccctggctcctcatcctgggagcaacagggctctgaggacgtgaggagccatcgctgtgggaggcagcaggccccgggtggggggcagaggcgcccagccttggatggggaccccagcccctggcctgtacctgtttcctcattccttggctgagggagaggctgagaactgggcagacacccctggagctcagccgacagttttgatgagcagggaagtctgaggcccagaggacggggggcccagcggtaagggatgtcccgcactcccttagccattgccttggaccaaaccacgtggtttgcagcttttctacgagccaggggggaggttcccttggattaaggttccaaataaagcacatggtttccagagc

SEQ ID NO: 4153 - DNA, 11388 bp, Homo sapiens
  source 1..11388: mol_type = unassigned DNA
gtcagggccagggtgagcgcccgactccgagctgtccccgctcccggcgcggcgctccgctctcagccacctcacggctgccaggagtgcgcgggagtttgccccggagcgcggggaagtttcctccgaagctgcgctcctggaacagcagcacctgcaagcgcccggcagcggcccgcgaggttactttatggaattgggctcttagagaacaagaaaagactgaagttttacgggaaaacaaatcatgtggtcttcagattctgaaataaggagaaatgcagccatctgaaatggtcatgaaccccaaacaagtcttcctctctgtgctgatatttggagtagctgggctactcctcttcatgtatttgcaagtctggattgaagaacaacatacagggagagtggagaagagaagagaacaaaaagtaacttcaggatggggaccagtgaagtacttgcggcctgtacccagaatcatgagtacagaaaaaatccaggaacatatcaccaaccagaaccccaagtttcacatgcctgaggatgtacgagaaaaaaaggaaaatcttctactcaattctgagagatctactaggctcttaacaaagaccagtcattcacaaggaggggatcaagctttaagtaagtccacagggtcaccaacagagaagttgattgaaaaacgtcaaggagctaagactgtttttaacaagttcagcaacatgaattggccagtggacattcaccctttaaacaaaagtttagtcaaagataataaatggaagaaaactgaggagacccaagagaaacgaaggtctttccttcaggagttttgcaagaaatacggtggggtgagtcatcatcagtcacatctttttcatacagtatccagaatctatgtagaagataaacacaaaatcttatattgtgaggtacctaaggctggctgttccaattggaaaagaattctgatggtactaaatggattggcttcctctgcatacaacatctcccacaatgctgtccactacgggaagcatttgaagaagctagatagctttgacctaaaagggatatatacccgcttaaatacttacaccaaagctgtgtttgttcgtgatcccatggaaagattagtatcagcctttagggacaaatttgaacaccccaatagttattaccatccagtattcggaaaggcaattatcaagaaatatcgaccaaatgcctgtgaagaagcattaattaatggatctggagtcaagttcaaagagtttatccactacttgctggattcccaccgtccagtaggaatggacattcactgggaaaaggtcagcaaactctgctatccgtgtttgatcaactatgattttgtagggaaatttgagactttggaagaagatgccaattactttttacagatgatcggtgctccaaaggagctgaaatttcccaactttaaggataggcactcttccgatgaaagaaccaatgctcaagtcgtgagacagtatttaaaggatctgactagaactgagagacaattaatctatgacttttattacttggactatttaatgtttaattatacaactccatttttgtagtttgcattcattttctaaaaccctgtatatacttaatgatgataagttcaaatcagctgtaatttttctataattctctgtatgacagaaatttaaccaagtgcagttgtcttgatttaatgtagatttttaccaaatagtatgacaccaattggcacaaagttataggaaaatcacctacaggagatgtaaacaacttgagttgctctaaaatgtttggaaaagagctgcttttgcattatgaattatattgttgaagcaataacctagccagctgttgcattagctaaagcagcctcttgcaatggtaggaaaaaaggatctcaaatagcatgagtgtatgtctatatcctgaaatttattgtctaaaatgcatgaatatatttttagcagtctgtggcatattaatcaaactgttgaattgttttcttacaccctggaaatctttctatcaactataatgataaatccattttgaagtgatattttggacttaggcattttactttagattggaaggcattatgtgatttacaatatgagaatatagcagaaaaaccagatgaggctgtggctttttatattcaacagccaataaaaaatgcacaacatgctaagatcaaagcaacaaaaccaaccttcttcttccagaaaaacttaagggaattgattctgttttcttttgagccttccacaaagagacaaaatgaacacaagcactaaaggtctacatttctgaagcaggcagttgagaagcttaagtctcatcagatataaatgtgctcctaattctggtttaattgagcaggggggaaattgtttcaggatggaataatcatcaaaaacaaaagttgccattctgaatatggaactcaaacaataacaaagttttataagtatattatttgaatcaaagcatcatgtgcatagctttatatgtggaatacaccctaagaatagcttttgttttcagtttaattattcagcttaggaatgactttttaaaaactaatataccacttcaaagataggttatgttctagagaataaacataaaaagagcccctagaaatgtgtttaataggcttatgcataagtaaattaaggtattttctttttaagtttaaatattctatactaacaaagtcagataccattgcattcaaatattaaatcaaagtccttagaaaaataggtccatgtgtcacccttatgaatagttgtaatgcattttggaatttttttccaagggatcctaaattagatcccttggggaaaaaaaaagggatcattttggatgggaaacatttggatgggaaacctactttaattggtcgacttttaccccgagttaagaaaatcacaagtctttcaaaccctgcttaaatgcttttcctgaacatcttcctcttcctaagctatcatttttttcttatcagtaaatattcagtaatggctttcaaagaacagtaggtattaatagttgaatgttaatagaccaagatagttgcagtcatacttatttcattttgattttctatttcatggctgagtattcatgaattgcttcgctccttacacacacctgccgtgtcccatctgtgtctcctaaggagtaagtaaactgcaatgggctgagagatcaaaagtattaaaccttctaatccaaccttttactacttttccatgccattaactcttgcctctagaccatacacttaagctgtgctctcagtttttaagacgttttactctggagtaatctaaattacataatttaaaattttgctgcaccatgtagagtagattcctagtaatttagggaaattgaaattatctttttatggagagagaaaataaaaaatattccagaagcctgaaattttattcctaagaaacacaaaacttgctttatatgaaatccactataaagaataaaggcaatttcctcaaaagtattcctaaaactatataaggaacagacaaagaactttcaatagctttagaaggaaaaaaatggaaacaacagtcctacctctcttattggcatttgtaatgcattgggcagggtggaatgcatacctatataaatgtttggctttgatggtggagaggagggatgagtggaagaaaatgatacccagtgttctctacggaaagctgtattgtaccttttgctgtatatgttcctttcctgaccctttccaacgagcccgtgtcaccatgggtcattcttttcctaaatgggctctatgatgccaagtgacaccctgtgtagttgcaagttccaaaagccatgcatgtctttgccaagtaagaacaaactttttatgtacctgctcttcattttagatggcttattttcatgttaggaccaaagaagccagtcatcatcctggattacttgtgagtttaaagccaaactccatttttctctcctgacttatttggccttgcagaccagctcacattcacctttgtcatttctgcctgtgcataaatccaggtgggaacaccactgttctttaggaccatcacaatttcatgaatttaattcctaaaggcaagtgaccaaatccagactcatcttccagatgtccaaagttcccattttaacattaggtgcaattataagtcctccaattaaaccctaaggatcctatttgtttttataggcagcagtaacacaatgggcagaccccttcgctctgttattcccctgtctggaattactatcagggtaacaagttggcaattaaatccaaaaccacagttatgtaacctgtaaactatctatagatgtgcaatattgatgtgattgtgcccagaaactgccataaacttcaatggaaatgtatgtacaggacatccagttttcggattttctcaaacatttggaaatatccattaattcaatggaaatgtgatgccacttgctagatgtctataaaacattctgtaacagaaaataataatattattatcattagggaattagtagttctaattcaagaactacttgtatgtcatttttaattagaaagaggaaaaatacttttacattttattgatgtattattattcttatctcctaaaatgtatagtatttagcagaaggtatatataagaagatgcagagaattttgaatattagagtgccctttgaaaaaatcacttgctgaattaatagaacttgggattaggctaggactacagtaaacgtctccctcctgtgcattctcatgtggcctctcagggcatcccagcctctaggccttcatggggcgtggtgaagcagatgttttgcccagggctaaccctcccaagatgctctgatacttgaaaaaggattggccaaaggcgtttaattatagctcaactacctgagaaccttaggccaaggctaattcaatttagtcctacatttaggctcataccttctcaatctcaatcatgatcattatacagtaatcgtatgcatgatcctagctaacatttattcaatacttactgggtgtcaggcactcttcaagtagtttacatgcattaatttaatctccatagccagtctaacataggtaatattatgtagccctctccctttccatctatcataaaggaaagtaaagcagactatagctgagtaacttgcctaaggagacagagatgataagtaggtcagaagccaggatgaagccaagcagcaaataccactaccaaactctttgcttagaatattacaaaccaatatttacttttgctttccgttacctctattcaggataggtagaggcaaaaacaatatattggaatcctgaaattttttccatacaaatatgggtgtctgtgtgtgtgtgtgtgtgtgtgtgtgtgtgtgtgtgtgtatttagctagttagttatcacatttcaaatcagcttatttctttattcctgctgagttaaactgacaggttcaaagactttggaagaaattaggtttcctccccacaacttttttgtaatccttagttaatcatggaaacaatgtttttaagaagaaaaaatagtccctggaacaaatttagccttgtgaaaacaaaatatcatttctttgacaagaaattccagacagctacaagaccagtcaaggataagcagaatctaagaggaagaaagttcaggcgaactttccacacataggcccctgacagccactgcagatggtcacggttcagcaagctagtcacacacagtgagaaccactcctgctagaaacagagcaactgtgcattatccccttcttcctgagtctccttccctagtactagtttgtagtcagattaccctgagcctacacgggaagactgcagaaaagaatagaggagcaagctgacttaaaccgactgaaaaaacaccatgaaaccaggtgaaaataaataagctcttgctagaagatggcagacatttcccaggcctgtgatcattacctgaggaaggccaggtctggggagttcaacagaacattgcctcatatcatttcattctcagaatttcctagtcagtcacatcttagtttttcaccaggatcatatgcttccaggcaaaagtatttaaatccatttaagcagtcatctttttccatccctaaacctctcctcaagtctcacactatatttggaatgctcccctctctatatatctggacattcatttcttgttaactcaccaaggaatctcttgagattattcaatttcaaaatctcatctctttatgagctccctgataggcagaaaaagacagcagagttttcccctggtgtaacatgcatcagattattctcttaccaataaatgcaggcattcctttcctcgattttttttgtcagggaggttcgttaatttatttgttcatgtgctatttatctcactttttatgaatataaaatatctgttgttgtcattggaatgtcttaggtcttccaagaggaaaggaactgtgtctgttgaatgcactttgtaccatgtctagcaaggcactcagtggaaagcgttactttaacagatgcttttgatgctgttgtttaaaggttcctgtacaacttcttttagtgtagaattcgtatatttctgcctgtgaccttcaggcatctataggaccagaggatctgaaaggaaggtgctagagcagggcagctgagggaagggagctgagccacacaccttttctacactaatagtcatcccttgacctgaaggatagttgcagacacagaaatcttttacatttctaagaaatagcagttgcttgattgtttggggaagaaaattttgagaaaaatgcatgattctggtcaacataagagccatttactgaggatctactcagtagcagacacgggaaaaatactttgcatacattcatttaatgacatgaagagtaagtctaaccgtttccaaaagtagctttcaaaaaaatcaaagtcgagtatttttccacctatcatttcatgaatgagaaaactgagtatcaaagaggtttaataacagtctctctggctccaaagctgagaccatacattggcagcccacggggtagatctggctacagatatgtttggtttggctgacagtgcattttatttaacatctgaattagctgccaacattgggcctcattaatgacaggggatttgttaccctacattctatatgcccacctgaaaatagttggacagaggcaaggtcagtccctttagatgaggttggagatctctagttgttcacactcttcactaatccaccatcactcattcaccttacttgcctggcccctaagcatctcacttttcaagtcctgctctgaagagtgtattccttcccccgccaagcttccaaaggaaatcaactcctgaacattatccttgaccctatttgtgttgtgcaggtagtgaggttatcccattccgggtttccatatccttgctcacagtgctgcttgccctttggtcctatatccagtgggatctccaaacagtatttcattgtttggggaagtctcttttgaccaatgacaaagatgttgggagaaatccagtacctttttttggcatctttctgtcgtagccactgggtcccctggcaacgacattccttcccacctctttctgcagagatgagtcattctcccaggctcttggagctctagtatctagggacagaaactggctcccactgctgcctctagactgctgttctataaccttcatccaaaaatctcttctgttttgcaggtgtgcccgcttcctcaactctaaaaatcacctgcttcccagccttctccgaagattcttctttctgatttataacatgcctctccaccctacttcctgctattatctgggtgattgtagcaccccctgtaacattctactctcttgcttcttaatgctctgacaacctcctcctcctcctcttccctcctcttcctcctcctcctcctactcctcctactcctccccccacttctatacttagagaggtggagaaaacaggagaagggataactacgacttttgtcctcaaataccaggaaaactagtaaaacacacagtatctcattttatgcattcatttgctgaaaatatttccaaagtttagaaaaatgatttttggatgtactatataataaataaaaatgcactcagaatgctagagtgtctaccaacttaaaagaacaatattatttgtttgactgtgattatccttaggaaaaaataagccctgatttaacttatcaatttctgaaaaaaatagtgtatggacgacctgtatcagaattaacctaatttttgttaaaaacatattcccagaccccatccaagatacacagaattggaatctctatgaaaaccacctgaaaatttcctttttaataatctcttggggtacttctcgtgtgtgtgtgaattttttaagtcctggttgattataaatgataatacaacctgctcttttcattctgtcactgtgttgaaaagttaacaactctcagctcagagaattgtcagtgggtattggtaccaaagtcctctgtgggattttgaccagcactgaagcagaaacttggcgtccgaagtctgccaagtgcaagaactagagctgaaatgatgaagtgagggacggggacagcactgggcactgcccaaactttttgaaagctttcagaatgaaatggggaaatggaaactttcctctgtttgaaatataaaagacaaatgtgtactgaaggcaattttggcaactcaacttcacattgaacaagtgaagacaatatgagtttctccaataaaaactaaaaagctgttttcaaattgacctaagatgattgaaaatggaaaatatttgctatttggttattagtttgagagcaagtgccccaggaaatattttgcaatttaacttaaatggttataatgtatattttcttgaacttcattaaaggatttgtctctttttgcctttctattaggttgaaccatatgacattgccaacatttgactgactctgacatataaacacagccctttcatgtgggtccactaacagttctgctgctacctacccaattctaaccacattggctctcctcagaactattggaaatagcctctgaatagaagtcctgccttttttatttatttatttaaaaattacttcttttctctttgcatttttcttcttttgatattttcaattgtggcaaaatccacataacataaaattttatcaccttatcattttttggtatccttttaatgaatattttcctatccctccccatcttacctatttttttttttgagacagagtttcactcttgtcgcccaggctgcagtgcagtggcaccatctctgctcactgcaacctccacgtcctgggttcaagctattctcctgtctcagcctcccgagtagctgggactacaggtgcacagcaccacgcccagctaatttttgtatttttagtagagattgggtttcaccacattggccaggatggtctcgatctcttgacctcgtgacccatccgccacagcctcccaaagtgctgggattacaggcatgagccaccatgccttgccaccattttttaagtgtacagttcagcagcatttagtgtagttgtgcaagcatcaccactatcccatcacataccttccttccttgtgaaaaatggatactctgcacctattaaacaacttcactttttgccctcccccagttctggcaaccatcattctaccttttgtctctatgaatttgataacttaaaatacctcatataaatggaatcatacagcatgtgtctttttgtgactggcgtatttctcttagcataatgtcctcaaggttcatccatattgaaggacgtaccagaatttttttcttttcaaggctgaattgtattccattctcattgcctggcctcaatctctcaagactataacccattcccagcttaatcacctgatagctgcatcaaacccactattatccagccacatggaaccattacattctctgaaaacacctcttgctttttcccctattttgctcacactattacacgacctgaagtgtcctttattcctctttaaggacctccacatgggtgccccctccaagagttgcctgccccgcatgaccatcccacattcagctcgctctaccctctctgcttggggactctcttccactctccttgctttagctccaccattaggctgatggttccgaaatctttttctaggctatgtttctatcacgaactttgattcagattcccagtttcttgtgggactgcttcatctagatgtctcactggagcttccaactcaacatgaccaaagctgaactcatcacctaacccccaaacctgctttctccttatttggtggcaacaccatccatctactccatcttctgagttaggaacctagaagtcaaccccgatttctccctaagctgactcctcacagccacagaattcagaaagcccattaacttcactgcctgactttttctcaagcttctcctctcctcccatccattctgctaatatctaagttcagactctcaccttctcctgtctacaactctacgataatcttgaacttctctcccactctcatttccctcaatgccatcctccatacagctgcccttgtaatcactttaaaatgcaaatccaattccagttctgtttcccactatacattctatatcctgcatgatcccaattcttctccaggcatatttctggccattttctgcctcctggcttaatctccaacagcctagaatggacataataccctaacattggatagttttcttcctcctgggtctactcagcttgtccctctattagggcacccacctaccccccttcacctccccaacacttcctaatccctaaactaagctcagggaggcatttgtcatctctgcctggctcagatgagatgctctgccctgagtactatgagagattgggaagcaggattctatgtaggatggttaggagcctggggcttgtcatgagtaagaactgggtttgaattccgtatcctcaactttcaaatgttgggacctctgaaattgctttaacttctctcagtgccagttttctcatctgaaaactgaggatagaatacctacctagtaaggggggtatgggaaatgcatgtaaagtatttaataagtgctcaataaaataaaaccattgatttatctca

SEQ ID NO: 4154 - DNA, 2043 bp, Homo sapiens
  source 1..2043: mol_type = unassigned DNA
agtcttttctgtcttcagagcattagtgtgcacattaagtcttcagccttgttgagatagtgaatatttatgccgtatttgagaattaatattagcagaaatgtacaatgtagatttctttttaaaattctaggttactttatggaattgggctcttagagaacaagaaaagactgaagttttacgggaaaacaaatcatgtggtcttcagattctgaaataaggagaaatgcagccatctgaaatggtcatgaaccccaaacaagtcttcctctctgtgctgatatttggagtagctgggctactcctcttcatgtatttgcaagtctggattgaagaacaacatacagggagagtggagaagagaagagaacaaaaagtaacttcaggatggggaccagtgaagtacttgcggcctgtacccagaatcatgagtacagaaaaaatccaggaacatatcaccaaccagaaccccaagtttcacatgcctgaggatgtacgagaaaaaaaggaaaatcttctactcaattctgagagatctactaggctcttaacaaagaccagtcattcacaaggaggggatcaagctttaagtaagtccacagggtcaccaacagagaagttgattgaaaaacgtcaaggagctaagactgtttttaacaagttcagcaacatgaattggccagtggacattcaccctttaaacaaaagtttagtcaaagataataaatggaagaaaactgaggagacccaagagaaacgaaggtctttccttcaggagttttgcaagaaatacggtggggtgagtcatcatcagtcacatctttttcatacagtatccagaatctatgtagaagataaacacaaaatcttatattgtgaggtacctaaggctggctgttccaattggaaaagaattctgatggtactaaatggattggcttcctctgcatacaacatctcccacaatgctgtccactacgggaagcatttgaagaagctagatagctttgacctaaaagggatatatacccgcttaaatacttacaccaaagctgtgtttgttcgtgatcccatggaaagattagtatcagcctttagggacaaatttgaacaccccaatagttattaccatccagtattcggaaaggcaattatcaagaaatatcgaccaaatgcctgtgaagaagcattaattaatggatctggagtcaagttcaaagagtttatccactacttgctggattcccaccgtccagtaggaatggacattcactgggaaaaggtcagcaaactctgctatccgtgtttgatcaactatgattttgtagggaaatttgagactttggaagaagatgccaattactttttacagatgatcggtgctccaaaggagctgaaatttcccaactttaaggataggcactcttccgatgaaagaaccaatgctcaagtcgtgagacagtatttaaaggatctgactagaactgagagacaattaatctatgacttttattacttggactatttaatgtttaattatacaactccatttttgtagtttgcattcattttctaaaaccctgtatatacttaatgatgataagttcaaatcagctgtaatttttctataattctctgtatgacagaaatttaaccaagtgcagttgtcttgatttaatgtagatttttaccaaatagtatgacaccaattggcacaaagttataggaaaatcacctacaggagatgtaaacaacttgagttgctctaaaatgtttggaaaagagctgcttttgcattatgaattatattgttgaagcaataacctagccagctgttgcattagctaaagcagcctcttgcaatggtaggaaaaaaggatctcaaatagcatgagtgtatgtctatatcctgaaatttattgtctaaaatgcatgaatatatttttagcagtctgtggcatattaatcaaactgttgaattgttttcttacaccctggaaatctttctatcaactataatgataaatccattttgaagtg

SEQ ID NO: 4155 - DNA, 2033 bp, Homo sapiens
  source 1..2033: mol_type = unassigned DNA
cccgactccgagctgtccccgctcccggcgcggcgctccgctctcagccacctcacggctgccaggagtgcgcgggagtttgccccggagcgcggggaagtttcctccgaagctgcgctcctggaacagcagcacctgcaagcgcccggcagcggcccgcgaggttactttatggaattgggctcttagagaacaagaaaagactgaagttttacgggaaaacaaatcatgtggtcttcagattctgaaataaggagaaatgcagccatctgaaatggtcatgaaccccaaacaagtcttcctctctgtgctgatatttggagtagctgggctactcctcttcatgtatttgcaagtctggattgaagaacaacatacagggagagtggagaagagaagagaacaaaaagtaacttcaggatggggaccagtgaagtacttgcggcctgtacccagaatcaaaccccaagtttcacatgcctgaggatgtacgagaaaaaaaggaaaatcttctactcaattctgagagatctactaggctcttaacaaagaccagtcattcacaaggaggggatcaagctttaagtaagtccacagggtcaccaacagagaagttgattgaaaaacgtcaaggagctaagactgtttttaacaagttcagcaacatgaattggccagtggacattcaccctttaaacaaaagtttagtcaaagataataaatggaagaaaactgaggagacccaagagaaacgaaggtctttccttcaggagttttgcaagaaatacggtggggtgagtcatcatcagtcacatctttttcatacagtatccagaatctatgtagaagataaacacaaaatcttatattgtgaggtacctaaggctggctgttccaattggaaaagaattctgatggtactaaatggattggcttcctctgcatacaacatctcccacaatgctgtccactacgggaagcatttgaagaagctagatagctttgacctaaaagggatatatacccgcttaaatacttacaccaaagctgtgtttgttcgtgatcccatggaaagattagtatcagcctttagggacaaatttgaacaccccaatagttattaccatccagtattcggaaaggcaattatcaagaaatatcgaccaaatgcctgtgaagaagcattaattaatggatctggagtcaagttcaaagagtttatccactacttgctggattcccaccgtccagtaggaatggacattcactgggaaaaggtcagcaaactctgctatccgtgtttgatcaactatgattttgtagggaaatttgagactttggaagaagatgccaattactttttacagatgatcggtgctccaaaggagctgaaatttcccaactttaaggataggcactcttccgatgaaagaaccaatgctcaagtcgtgagacagtatttaaaggatctgactagaactgagagacaattaatctatgacttttattacttggactatttaatgtttaattatacaactccatttttgtagtttgcattcattttctaaaaccctgtatatacttaatgatgataagttcaaatcagctgtaatttttctataattctctgtatgacagaaatttaaccaagtgcagttgtcttgatttaatgtagatttttaccaaatagtatgacaccaattggcacaaagttataggaaaatcacctacaggagatgtaaacaacttgagttgctctaaaatgtttggaaaagagctgcttttgcattatgaattatattgttgaagcaataacctagccagctgttgcattagctaaagcagcctcttgcaatggtaggaaaaaaggatctcaaatagcatgagtgtatgtctatatcctgaaatttattgtctaaaatgcatgaatatatttttagcagtctgtggcatattaatcaaactgttgaattgttttcttacaccctggaaatctttctatcaactataatgataaatccattttgaag

SEQ ID NO: 4156 - DNA, 4550 bp, Homo sapiens
  source 1..4550: mol_type = unassigned DNA
ggcgagctaagccggaggatgtgcagctgcggcggcggcgccggctacgaagaggacggggacaggcgccgtgcgaaccgagcccagccagccggaggacgcgggcagggcgggacgggagcccggactcgtctgccgccgccgtcgtcgccgtcgtgccggccccgcgtccccgcgcgcgagcgggaggagccgccgccacctcgcgcccgagccgccgctagcgcgcgccgggcatggtcccctcttaaaggcgcaggccgcggcggcgggggcgggcgtgcggaacaaagcgccggcgcggggcctgcgggcggctcgggggccgcgatgggcgcggcgggcccgcggcggcggcggcgctgcccgggccgggcctcgcggcgctagggcgggctggcctccgcgggcgggggcagcgggctgagggcgcgcggagcctgcggcggcggcccggcgggcggagcggcgcgggcatggccgcgcgcggccggcgcgcctggctcagcgtgctgctcgggctcgtcctgggcttcgtgctggcctcgcggctcgtcctgccccgggcttccgagctgaagcgagcgggcccacggcgccgcgccagccccgagggctgccggtccgggcaggcggcggcttcccaggccggcggggcgcgcggcgatgcgcgcggggcgcagctctggccgcccggctcggacccagatggcggcccgcgcgacaggaactttctcttcgtgggagtcatgaccgcccagaaatacctgcagactcgggccgtggccgcctacagaacatggtccaagacaattcctgggaaagttcagttcttctcaagtgagggttctgacacatctgtaccaattccagtagtgccactacggggtgtggacgactcctacccgccccagaagaagtccttcatgatgctcaagtacatgcacgaccactacttggacaagtatgaatggtttatgagagcagatgatgacgtgtacatcaaaggagaccgtctggagaacttcctgaggagtttgaacagcagcgagcccctctttcttgggcagacaggcctgggcaccacggaagaaatgggaaaactggccctggagcctggtgagaacttctgcatgggggggcctggcgtgatcatgagccgggaggtgcttcggagaatggtgccgcacattggcaagtgtctccgggagatgtacaccacccatgaggacgtggaggtgggaaggtgtgtccggaggtttgcaggggtgcagtgtgtctggtcttatgagatgcagcagcttttttatgagaattacgagcagaacaaaaaggggtacattagagatctccataacagtaaaattcaccaagctatcacattacaccccaacaaaaacccaccctaccagtacaggctccacagctacatgctgagccgcaagatatccgagctccgccatcgcacaatacagctgcaccgcgaaattgtcctgatgagcaaatacagcaacacagaaattcataaagaggacctccagctgggaatccctccctccttcatgaggtttcagccccgccagcgagaggagattctggaatgggagtttctgactggaaaatacttgtattcggcagttgacggccagccccctcgaagaggaatggactccgcccagagggaagccttggacgacattgtcatgcaggtcatggagatgatcaatgccaacgccaagaccagagggcgcatcattgacttcaaagagatccagtacggctaccgccgggtgaaccccatgtatggggctgagtacatcctggacctgctgcttctgtacaaaaagcacaaagggaagaaaatgacggtccctgtgaggaggcacgcgtatttacagcagactttcagcaaaatccagtttgtggagcatgaggagctggatgcacaagagttggccaagagaatcaatcaggaatctggatccttgtcctttctctcaaactccctgaagaagctcgtcccctttcagctccctgggtcgaagagtgagcacaaagaacccaaagataaaaagataaacatactgattcctttgtctgggcgtttcgacatgtttgtgagatttatgggaaactttgagaagacgtgtcttatccccaatcagaacgtcaagctcgtggttctgcttttcaattctgactccaaccctgacaaggccaaacaagttgaactgatgagagattaccgcattaagtaccctaaagccgacatgcagattttgcctgtgtctggagagttttcaagagccctggccctggaagtaggatcctcccagtttaacaatgaatctttgctcttcttctgcgacgtcgacctcgtgtttactacagaattccttcagcgatgtcgagcaaatacagttctgggccaacaaatatattttccaatcatcttcagccagtatgacccaaagattgtttatagtgggaaagttcccagtgacaaccattttgcctttactcagaaaactggcttctggagaaactatgggtttggcatcacgtgtatttataagggagatcttgtccgagtgggtggctttgatgtttccatccaaggctgggggctggaggatgtggaccttttcaacaaggttgtccaggcaggtttgaagacgtttaggagccaggaagtaggagtagtccacgtccaccatcctgtcttttgtgatcccaatcttgaccccaaacagtacaaaatgtgcttggggtccaaagcatcgacctatgggtccacccagcagctggctgagatgtggctggaaaaaaatgatccaagttacagtaaaagcagcaataataatggctcagtgaggacagcctaatgtccagctttgctggaaaagacgtttttaattatctaatttatttttcaaaaattttttgtatgatcagtttttgaagtccgtatacaaggatatattttacaagtggttttcttacataggactcctttaagattgagctttctgaacaagaaggtgatcagtgtttgcctttgaacacatcttcttgctgaacattatgtagcagacctgcttaactttgacttgaaatgtacctgatgaacaaaacttttttaaaaaaatgttttcttttgagaccctttgctccagtcctatggcagaaaacgtgaacattcctgcaaagtattattgtaacaaaacactgtaactctggtaaatgttctgttgtgattgttaacattccacagattctaccttttgtgttttgttttttttttttacaattgttttaaagccatttcatgttccagttgtaagataaggaaatgtgataatagctgtttcatcattgtcttcaggagagctttccagagttgatcatttcctctcatggtactctgctcagcatggccacgtaggttttttgtttgttttgttttgttctttttttgagacggagtctcactctgttacccaggctggaatgcagtggcgcaatcttggctcactttaacctccacttccctggttcaagcaattcccctgcctttgcctcccgagtagctgggattacaggcacacaccaccacgcccagctagtttttttgtatttttagtagagacggggtttcaccatgcaagcccagctggccacgtaggttttaaagcaaggggcgtgaagaaggcacagtgaggtatgtggctgttctcgtggtagttcattcggcctaaatagacctggcattaaatttcaagaaggatttggcattttctcttcttgacccttctctttaaagggtaaaatattaatgtttagaatgacaaagatgaattattacaataaatctgatgtacacagactgaaacatacacacatacaccctaatcaaaacgttggggaaaaatgtatttggttttgttcctttcatcctgtctgtgttatgtgggtggagatggttttcattctttcattactgttttgttttatcctttgtatctgaaatacctttaatttatttaatatctgttgttcagagctctgccatttcttgagtacctgttagttagtattatttatgtgtatcgggagtgtgtttagtctgttttatttgcagtaaaccgatctccaaagatttccttttggaaacgctttttcccctccttaatttttatattccttactgttttactaaatattaagtgttctttgacaattttggtgctcatgtgttttggggacaaaagtgaaatgaatctgtcattataccagaaagttaaattctcagatcaaatgtgccttaataaatttgttttcatttagatttcaaacagtgatagacttgccattttaatacacgtcattggagggctgcgtatttgtaaatagcctgatgctcatttggaaaaataaaccagtgaacaatatttttctattgtacttttcgaaccattttgtctcattattcctgttttagctgaagaattgtattacatttggagagtaaaaaacttaaacacgattca

SEQ ID NO: 4157 - DNA, 1949 bp, Homo sapiens
  source 1..1949: mol_type = unassigned DNA
gacttaatgagaatgttggctctccttgcagcggacaagaaggacatttgctaatgaagactgtggaagatgcagcagcttttttatgagaattacgagcagaacaaaaaggggtacattagagatctccataacagtaaaattcaccaagctatcacattacaccccaacaaaaacccaccctaccagtacaggctccacagctacatgctgagccgcaagatatccgagctccgccatcgcacaatacagctgcaccgcgaaattgtcctgatgagcaaatacagcaacacagaaattcataaagaggacctccagctgggaatccctccctccttcatgaggtttcagccccgccagcgagaggagattctggaatgggagtttctgactggaaaatacttgtattcggcagttgacggccagccccctcgaagaggaatggactccgcccagagggaagccttggacgacattgtcatgcaggtcatggagatgatcaatgccaacgccaagaccagagggcgcatcattgacttcaaagagatccagtacggctaccgccgggtgaaccccatgtatggggctgagtacatcctggacctgctgcttctgtacaaaaagcacaaagggaagaaaatgacggtccctgtgaggaggcacgcgtatttacagcagactttcagcaaaatccagtttgtggagcatgaggagctggatgcacaagagttggccaagagaatcaatcaggaatctggatccttgtcctttctctcaaactccctgaagaagctcgtcccctttcagctccctgggtcgaagagtgagcacaaagaacccaaagataaaaagataaacatactgattcctttgtctgggcgtttcgacatgtttgtgagatttatgggaaactttgagaagacgtgtcttatccccaatcagaacgtcaagctcgtggttctgcttttcaattctgactccaaccctgacaaggccaaacaagttgaactgatgagagattaccgcattaagtaccctaaagccgacatgcagattttgcctgtgtctggagagttttcaagagccctggccctggaagtaggatcctcccagtttaacaatgaatctttgctcttcttctgcgacgtcgacctcgtgtttactacagaattccttcagcgatgtcgagcaaatacagttctgggccaacaaatatattttccaatcatcttcagccagtatgacccaaagattgtttatagtgggaaagttcccagtgacaaccattttgcctttactcagaaaactggcttctggagaaactatgggtttggcatcacgtgtatttataagggagatcttgtccgagtgggtggctttgatgtttccatccaaggctgggggctggaggatgtggaccttttcaacaaggttgtccaggcaggtttgaagacgtttaggagccaggaagtaggagtagtccacgtccaccatcctgtcttttgtgatcccaatcttgaccccaaacagtacaaaatgtgcttggggtccaaagcatcgacctatgggtccacccagcagctggctgagatgtggctggaaaaaaatgatccaagttacagtaaaagcagcaataataatggctcagtgaggacagcctaatgtccagctttgctggaaaagacgtttttaattatctaatttatttttcaaaaattttttgtatgatcagtttttgaagtccgtatacaaggatatattttacaagtggttttcttacataggactcctttaagattgagctttctgaacaagaaggtgatcagtgtttgcctttgaacacatcttcttgctgaacattatgtagcagacctgcttaactttgacttgaaatgtacctgatgaacaaaacttttttaaaaaaatgttttcttttgagaccctttgct

SEQ ID NO: 4158 - DNA, 553 bp, Homo sapiens
  source 1..553: mol_type = unassigned DNA
aagaaggacatttgctaatgaagactgtggaagggtcttgcactgtcacctaggctggagtgcagtagtgcgatcatggctcactgcagcctcgacctcccaggctcgtgatcctcccccctcagcctcctgagtaactgggaccacagatgcagcagcttttttatgagaattacgagcagaacaaaaaggggtacattagagatctccataacagtaaaattcaccaagctatcacattacaccccaacaaaaacccaccctaccagtacaggctccacagctacatgctgagccgcaagatatccgagctccgccatcgcacaatacagctgcaccgcgaaattgtcctgatgagcaaatacagcaacacagaaattcataaagaggacctccagctgggaatccctccctccttcatgaggtttcagccccgccagcgagaggagattctggaatgggagtttctgactggaaaatacttgtattcggcagttgacggccagccccctcgaagaggaatggactccgcccagagggaagccttggacga

SEQ ID NO: 4159 - DNA, 564 bp, Homo sapiens
  source 1..564: mol_type = unassigned DNA
agccctgaaacatctcacaggaagggagatggctttgctggagttgaaggatatggaggcactttttataacaaagattaagggttgtttcatggacagtggaaattaaatgaagtcatcagtgccactataagcatcttaagaaggtttctttgctgagttttttttaagcaaggaatactcttatgcagcagcttttttatgagaattacgagcagaacaaaaaggggtacattagagatctccataacagtaaaattcaccaagctatcacattacaccccaacaaaaacccaccctaccagtacaggctccacagctacatgctgagccgcaagatatccgagctccgccatcgcacaatacagctgcaccgcgaaattgtcctgatgagcaaatacagcaacacagaaattcataaagaggacctccagctgggaatccctccctccttcatgaggtttcagccccgccagcgagaggagattctggaatgggagtttctgactggaaaatacttgtattcggcagttgacggccagccccctcgaagaggaatggact

SEQ ID NO: 4160 - DNA, 819 bp, Homo sapiens
  source 1..819: mol_type = unassigned DNA
ggttgccagcacttcagttagacttgacacagaacagctggatttctagcttccctttaaacccggctgcactgggcctgtgtggcacgtcctggtccccccgagctccatcccttctggcttacatccaccttgtccctgacaaaagggtgagaaaaccacttctctgtaatgaactgaaacgctgcctaagtccgaatgggaagttgtcgctctgtagcagtgatggtctgtagctgaggctgaaccgtgtacgtgctgaaggacagtcatgtaaacagttaacaggaagaacgaggacttaatgagaatgttggctctccttgcagcggacaagaaggacatttgctaatgaagactgtggaaggtatttgttaaccaaagattagatatgggtagttgatggttattcccagctgggctagaagttcctgggaatagcgtgaccttggtattagcccctctcagattcactggagaatgacgcagagccctgaaacatctcacaggaagggagatggctttgctggagttgaaggatatggaggcactttttataacaaagattaagggttgtttcatggacagtggaaattaaatgaagtcatcagtgccactataagcatcttaagaaggtttctttgctgagttttttttaagcaaggaatactcttgtgagtattaagttaacctgtctagattgagttgtgttttcttctgcagtacttctaactttctgttttataatattcttctaggtgatgtgccaaattatagattattgaaataccttataataaaatcctcttaaactttgaa

SEQ ID NO: 4161 - DNA, 139 bp, Homo sapiens
  source 1..139: mol_type = unassigned DNA
agagtggtgccctccgtgtactctcttggaggatgaacttggactgctgctccatcacactgtacttcctaacatggtccaagacaattcctgggaaagttcagttcttctcaagtgagggttctgacacatctgtacc

SEQ ID NO: 4162 - DNA, 3850 bp, Homo sapiens
  source 1..3850: mol_type = unassigned DNA
gggtggcagcctaggagcggacgcgttgccgccgccgctgctcctcctcctcctcctgcagctcctccagctgccgctgctgccgccgctgccgccaccgccgccgccgggagaagtttcactcccgacccttgctcggagccccggcccagagctgagcgggagcccggcaggcagctgcagcccgcggcagtcgaggcgtccgcggcgcttcgacctccagccggtgtcggcgcctaggcggccggctgcggccgcggctgggggcgcaaaggcggaggaggggcgggtgtgagccggggaaaccgcgtgccgcgccgcgacagcccagcgagcgtccgcgcccgggacagccgcgatggctgtgcgctctcgccgcccgtggatgagcgtggcattagggctggtgctgggcttcaccgccgcgtcctggctcatcgcccccagggtggcggagctgagcgagaggaagagacgtggctccagcctctgctcctactacggtcgctctgctgctggcccccgcgccggcgctcagcagccgctcccccagccccagtcccgaccacggcaggagcagtcgccgccccccgcgcgccaggatctccaggggccaccgctgcccgaggcagcacccgggatcaccagttttcgaagcagcccctggcagcagccacctccgctgcagcagcggcggcgaggacgcgagcctgagggcgcgacggggcttcccggtgctccagcggccgagggggagcccgaggaggaggacgggggcgcggctgggcagcggagagacggccggccggggagtagccacaacggcagcggggacgggggcgctgccgccccgagcgcccgaccccgggacttcctgtacgtgggggtgatgaccgcgcagaagtacctgggcagccgcgcgctggccgcgcagcggacctgggcgcgtttcatcccgggccgcgtggagttcttttccagccagcagccccccaacgccggccagcccccgccacccctgcctgtcatcgcgctaccgggtgtggacgactcctatcctccccagaaaaagtccttcatgatgatcaagtacatgcacgaccactacctggacaagtatgagtggttcatgcgcgccgacgacgatgtctacatcaaaggtgataaattagaagagtttcttagatcgctaaacagcagtaagcctctctacctgggacagactggcctggggaatattgaagagcttggaaagctgggactggagcctggggaaaacttctgtatgggaggacctggcatgatctttagccgagaagttctcaggaggatggtgccacatattggtgaatgccttagagaaatgtacacgactcatgaggatgtggaagtaggaagatgcgttcgccgttttggtgggactcagtgtgtctggtcttacgagatgcaacaactgttccatgaaaattatgaacacaatcggaagggttacatccaagaccttcacaatagcaaaatccatgcagccataacacttcatcccaacaaaaggcctgcataccaatacaggctgcataattacatgctcagccgcaaaatttctgaacttcgctaccgcaccatccagctccacagggaaagtgccctgatgagcaagctcagtaacacagaagtgagcaaagaggaccagcagctgggagtgataccttctttcaaccacttccagcctcgggagagaaatgaagtgatagaatgggagttcctgacagggaagcttctatactcagcagctgagaaccagccccctcgacagagcctcagtagcattttaagaacagcactggatgataccgtcctacaggtgatggagatgatcaatgagaatgccaagagcagaggacggctcattgacttcaaggaaattcagtatggctaccgcagagttaaccccatgcacggggtggagtacattttggatttactccttttatacaaaagacacaagggaaggaaactgactgtgccagtgagacgtcatgcctatcttcagcagttgttcagcaagcctttcttcagagagaccgaagagctagatgtcaacagtcttgtggagagtattaacagtgaaactcagtcattctcctttatatctaattctttaaagatattatcttcttttcaaggtgccaaagaaatgggagggcacaatgaaaagaaagtacacattctcgttcctctcatcggaaggtatgacattttcttgagattcatggagaactttgaaaacatgtgtcttatcccaaagcagaatgtaaagttggtcattatccttttcagtagggattctggccaagactccagcaagcatattgagctgataaaagggtaccagaacaagtaccccaaagcagaaatgaccctgatcccaatgaagggagagttttccagaggtcttggtcttgaaatggcttctgcccagtttgacaatgacactttgctgctattttgtgatgttgacttgatcttcagagaagattttctccaacgatgtagagacaatacaattcagggacaacaggtgtactatcccatcatctttagccagtatgacccaaaggtaacaaacgggggaaatcctcccactgatgattacttcatattctcaaaaaagactggattttggagagactatggatatggcatcacctgtatttacaaaagtgatcttctaggtgcaggtggatttgatacctcaatacaaggctggggactagaagatgtagatctctacaataaagtcattctatctggcttaaggccattcagaagccaagaagtaggagtggtgcatattttccatccagttcattgtgatcctaacttggaccctaagcagtataagatgtgcttaggatccaaggcaagtactttcgcctcaaccatgcaactggctgaactctggcttgaaaaacatttaggtgtcaggtacaatcgaactctctcctgacagtccaggcaacacattttgccttttttaaggggagtttacctcattgttggttgttgttatttttattgtattattgttattttattattattattgttataattttattttgttgtcctggtcttaaactactcttggttgtcttcctaagggtgtttgttgacctcaagcaagaagagtctgcagttcactgatgtttcagatttctactgaagtcaatatgttattacttttatataactttatttgagattgagttaaatcatagcaatcaaatgacttttgaaacgcattcatcacaagagacagcttagaagaatgttctcttggggcttaaagatgcaatatcgacttttatttggtttctcaaattcaatgtgatacaaatatttactggtgaaaggtaccacaaaagtgctttatgcttcctatggggaagggactctgtaacataaacttgagttttgtaatttatacaaggacttaaatatataaacaataattttcttcatctttagaatttttaaagtaaatgaatacctatgattgtatgtttattttttaaaaaaagttttaaaaattgaggagttttgttccacaagcaaccggtactggctaccctggtcttatgacaattatgagctcctcacaactgtctgctataaatgcgaatgaactttattttctcaaggaaatatgatttaattaaatattcatgtacattttagaagctttatgaaacaatgtccttcatttgctggcaagaagataaaatatgacagaacctgtttatttaaaataaaacacaggtatagcagtattctttttcaaaaacactga

SEQ ID NO: 4163 - DNA, 636 bp, Homo sapiens
  source 1..636: mol_type = unassigned DNA
agaagagtttcttagatcgctaaacagcagtaagcctctctacctgggacagactggcctggggaatattgaagagcttggaaagctgggactggagcctggggaaaacttctgtatgggaggacctggcatgatctttagccgagaagttctcaggaggatggtgccacatattggtgaatgccttagagaaatgtacacgactcatgaggatgtggaagtaggaagatgcgttcgccgttttggtgggactcagtgtgtctggtcttacgagatgagctttcatgaactctcagtccacactgccatagatggtcattcccacagctcctgctctgcatggtgtagccccatagacagagatgcaacaactgttccatgaaaattatgaacacaatcggaagggttacatccaagaccttcacaatagcaaaatccatgcagccataacacttcatcccaacaaaaggcctgcataccaatacaggctgcataattacatgctcagccgcaaaatttctgaacttcgctaccgcaccatccagctccacagggaaagtgccctgatgagcaagctcagtaacacagaagtgagcaaagaggaccagcagctgggagtgataccttctttcaacc

SEQ ID NO: 4164 - DNA, 4088 bp, Homo sapiens
  source 1..4088: mol_type = unassigned DNA
gcagtgcgcgacggcggcggcggcgcgggaggttcggagcgggagctcgggctcgcggacggtatggaggactacgagcaggagctgtgcggcgtcgaggatgatttccacaaccagttcgcggccgagctggaggtgctggcagagctggaaggggcgtcgactccgtcgccctccggggtccccctgttcaccgcgggccgacccccgcggacgttcgaggaggcccttgccagaggggacgcggcctccagtcccgccccagccgcatctgtgggcagcagccagggcggcgccaggaagaggcaggcggccccccatcttggaggactacgtccacgtgacatccacggagggcgtccgggcttatctggtgctgcgtgctgaccccatggccccgggggtgcagggctctctcctccacgtcccatggcgaggcggtggccagctggacctgctgggtgtgtccttagcctccctgaagaagcaggtcgacggcgagcggcgggagcggctgcttcaggaggcccagaagctttcagacaccctgcacagtctcaggtcgggggaggaggaggcagcccagcccttgggggcccctgaggaggagccgactgacggtcaagacgcctccagtcactgcctctgggtggatgagtttgcaccccgccactacacggagctgctcagtgatgacgtgaggtcttgttctcactcaagtgtggctggcttcctctgttcccaagatggaagaacctgggcccagtgatttttgcacagccaatccactgggcctcggagacggagtgggctctggtttgcccttttgagttgtaggtggtgaactgagcacagggctgtgtgctactggtcccctgtgacctgtgaggcaggctaggggtccagggtgtcacctgatccaagtctctgttccctttcctaccttcacagcagctgacactggagtgcccctggggagggcaggggcctcccagatgggttgtggccagagccgtgggggtggagcccctggtgtgagccttgcggtcactcgctggcaggaagacgggggtggccattcatcctgtggcttggcatcccatggggcatggggctcatggtggcaggtggactgtccgtgcctggaggcggtgccctcaggctgtgcttcccttcccgtccttcccgcagttcaccaaccgctgcctgctcaagtggctgaagttgtgggacctggtggtgtttggccacgagaggccttcccggaagcccaggcccagtgttgagccggcccgggtcagcaaggaggccacagccccaggcaagtggaagagccacgaacaggtgctggaggagatgctggaggctgggctggacccgagccagcgaccgaagcagaaggtgagccccgctggctgtgccgccgggaacaagcctgaggctttgcactcggcgccggcacccttgcagcctgttgactttctccaggagccgtgggtgtggtgacgtgtgggtcttggcgtgaagcgccattagcgtgagttagaactggagcgttgcagtaacaactcgggggaagtcgttgtccctgaagggctctgcggctggccaggatgatctgggtggacggtgggtggtttctgggggccagtcacactggtatcagctgtgttttgtctgcacgaactttgctttgtgtaggtttttttttccgttgccatcttggtgtgtgaaagtgctcaattttgttcttatttgatggctggagtggggtggagggagcgcccagcctgtgggacacatgtggcagtccctggctgctaggccgggagcgtcctgtaggtgcggtgcacactacgccttcatctacctgggctgcaggtggcactgctctgtgggcccccggggctggggaagaccaccctggcacacgtgattgcgcgtcacgcggggtactctgtggtggagatgaacgccaggtgagtgatgtgaggtccgtctctggctcgccttctgtcctgacgtgtttgagttctggtggcggacctgaaaccgggtgtggatgttcccgtcttgagggtggtgggggcctgggtgtgtgggccgggaaaacgtgtccttcctcggggttcacgggatcggcagcagccgcgtcatgtgacggtctccacgcaaatgcggcagccccggccttgggaggctgccctgccagggacgcccactgccctgacgacccctgacctccccattgcagtgacgaccgtagcccggaggtcttccgcacacgcatcgaggcggccacccagatggagtcggtgctgggtgctggcgggaagcccaactgcctggtcatcgatgagatcgacggggcccccgtggtgggctccttgatgcctgggccgccatcaacgtcctcctgagcatcctgaaccgcaaggggccacaggaggtggggccacagggcccggctgtgccttcgggaggcggccgacggcgccgggcagagggggggctcctcatgaggcccattatctgcatttgcaatgaccagttcgcaccgtccctgcggcagctgaagcagcaggccttcctgctccacttcccgccgactctgccctcgaggctggtgcagcggctccaggaggtctccctgcggcagggcatgagggccgacccaggggtgctggccgccctctgtgagaaaactgacaatgacatccgggcctgcatcaacaccctgcagttcctgtacagccggggccagcgggagctgagcgtgcgggacgtgcaggccacacgcgtgggcctcaaggaccagcgcagagggctcttctcggtgtggcaggaggtcttccagctgcctcgagcccagaggcgccgtgtgggccaggaccccgccctgcctgctgacacactcctgctgggtgacggggacgcgggctccctcacctccgcctcacagcgattctaccgtgtcctgcatgccgctgcctctgcgggcgagcacgagaaggtggtccagggcttgtttgacaacttcctgcgtctgcggctgcgagactccagcctgggtgctgtgtgtgtggccctcgactggctggccttcgatgacctgctggcgggggctgctcatcacagccagagcttccagctgctgcgctacccacccttcctgcccgtggccttccatgtgctgtttgcttccagccacacacccaggatcaccttccccagcagccagcaggaggcccagaaccggatgagccagatgaggaacctgatccagacgctggtgtccggcatcgcgccagccacgcgcagccgggccacgccccaggccctgctcctcgatgccctctgcctgctcctggacattcttgcacccaagctccgccccgtgagcacacagctgtacagcacccgtgaaaagcaacagctggccagcctggtgggcacgatgctcgcttacagcctgacctaccgccaggagcgcacgcccgatggccagtacatctacaggctggagccgaacgtggaggaactctgccgcttccctgagctgcctgcccgcaagcccctcacctaccagacgaagcagctcatcgcccgcgagatcgaggtggagaagatgcggcgggcggaggcttctgcccgggtagagaacagcccccaggtggatgggagccccccagggctcgagggtctgctggggggcattggggagaaaggggtgcaccgacctgccccacgcaaccatgagcagcggctggagcacatcatgaggcgagcggcccgggaggaacagcctgagaaggacttctttggacgtgtggtcgtcaggagcacagcagtcccgagtgcaggggacacggccccggagcaggactcagtggagcggcgcatgggcacagcggtgggcaggagcgaggtctggttccgcttcaacgagggtgtctccaacgccgtgcggcgcagcctgtacatcagggacttgctctagttctctgagccgcggacatgccctcgcattgcttcccgcagagtgcagagacaggaagctggagatgtctttataaagtcacaccttt

SEQ ID NO: 4165 - DNA, 3090 bp, Homo sapiens
  source 1..3090: mol_type = unassigned DNA
gcagtgcgcgacggcggcggcggcgcgggaggttcggagcgggagctcgggctcgcggacggtatggaggactacgagcaggagctgtgcggcgtcgaggatgatttccacaaccagttcgcggccgagctggaggtgctggcagagctggaaggggcgtcgactccgtcgccctccggggtccccctgttcaccgcgggccgacccccgcggacgttcgaggaggcccttgccagaggggacgcggcctccagtcccgccccagccgcatctgtgggcagcagccagggcggcgccaggaagaggcaggtggacgccgacctgcagccggccgggtccctgccccacgcccccaggatcaaacggcctaggctgcaggtggtcaagaggctgaacttcagatcggaggagatggaggagccgccccctcccgactcctcgccgacggacatcaccccgccgccgagccctgaggacctcgcagagctttggggccacggagtctcagaagctgctgccgacgtgggtctcacacgggcctcaccagctgcccgcaatcccgtcctgaggcggccccccatcttggaggactacgtccacgtgacatccacggagggcgtccgggcttatctggtgctgcgtgctgaccccatggccccgggggtgcagggctctctcctccacgtcccatggcgaggcggtggccagctggacctgctgggtgtgtccttagcctccctgaagaagcaggtcgacggcgagcggcgggagcggctgcttcaggaggcccagaagctttcagacaccctgcacagtctcaggtcgggggaggaggaggcagcccagcccttgggggcccctgaggaggagccgactgacggtcaagacgcctccagtcactgcctctgggtggatgagtttgcaccccgccactacacggagctgctcagtgatgacttcaccaaccgctgcctgctcaagtggctgaagttgtgggacctggtggtgtttggccacgagaggccttcccggaagcccaggcccagtgttgagccggcccgggtcagcaaggaggccacagccccaggcaagtggaagagccacgaacaggtgctggaggagatgctggaggctgggctggacccgagccagcgaccgaagcagaaggtggcactgctctgtgggcccccggggctggggaagaccaccctggcacacgtgattgcgcgtcacgcggggtactctgtggtggagatgaacgccagtgacgaccgtagcccggaggtcttccgcacacgcatcgaggcggccacccagatggagtcggtgctgggtgctggcgggaagcccaactgcctggtcatcgatgagatcgacggggcccccgtggccgccatcaacgtcctcctgagcatcctgaaccgcaaggggccacaggaggtggggccacagggcccggctgtgccttcgggaggcggccgacggcgccgggcagagggggggctcctcatgaggcccattatctgcatttgcaatgaccagttcgcaccgtccctgcggcagctgaagcagcaggccttcctgctccacttcccgccgactctgccctcgaggctggtgcagcggctccaggaggtctccctgcggcagggcatgagggccgacccaggggtgctggccgccctctgtgagaaaactgacaatgacatccgggcctgcatcaacaccctgcagttcctgtacagccggggccagcgggagctgagcgtgcgggacgtgcaggccacacgcgtgggcctcaaggaccagcgcagagggctcttctcggtgtggcaggaggtcttccagctgcctcgagcccagaggcgccgtgtgggccaggaccccgccctgcctgctgacacactcctgctgggtgacggggacgcgggctccctcacctccgcctcacagcgattctaccgtgtcctgcatgccgctgcctctgcgggcgagcacgagaaggtggtccagggcttgtttgacaacttcctgcgtctgcggctgcgagactccagcctgggtgctgtgtgtgtggccctcgactggctggccttcgatgacctgctggcgggggctgctcatcacagccagagcttccagctgctgcgctacccacccttcctgcccgtggccttccatgtgctgtttgcttccagccacacacccaggatcaccttccccagcagccagcaggaggcccagaaccggatgagccagatgaggaacctgatccagacgctggtgtccggcatcgcgccagccacgcgcagccgggccacgccccaggccctgctcctcgatgccctctgcctgctcctggacattcttgcacccaagctccgccccgtgagcacacagctgtacagcacccgtgaaaagcaacagctggccagcctggtgggcacgatgctcgcttacagcctgacctaccgccaggagcgcacgcccgatggccagtacatctacaggctggagccgaacgtggaggaactctgccgcttccctgagctgcctgcccgcaagcccctcacctaccagacgaagcagctcatcgcccgcgagatcgaggtggagaagatgcggcgggcggaggcttctgcccgggtagagaacagcccccaggtggatgggagccccccagggctcgagggtctgctggggggcattggggagaaaggggtgcaccgacctgccccacgcaaccatgagcagcggctggagcacatcatgaggcgagcggcccgggaggaacagcctgagaaggacttctttggacgtgtggtcgtcaggagcacagcagtcccgagtgcaggggacacggccccggagcaggactcagtggagcggcgcatgggcacagcggtgggcaggagcgaggtctggttccgcttcaacgagggtgtctccaacgccgtgcggcgcagcctgtacatcagggacttgctctagttctctgagccgcggacatgccctcgcattgcttcccgcagagtgcagagacaggaagctggagatgtctttataaagtcacacctttacagactgtaa

SEQ ID NO: 4166 - DNA, 471 bp, Homo sapiens
  source 1..471: mol_type = unassigned DNA
agtgcgcgacggcggcggcggcgcgggaggttcggagcgggagctcgggctcgcggacggtatggaggactacgagcaggagctgtgcggcgtcgaggatgatttccacaaccagttcgcggccgagctggaggtgctggcagagctggaaggggcgtcgactccgtcgccctccggggtccccctgttcaccgcgggccgacccccgcggacgttcgaggaggcccttgccagaggggacgcggcctccagtcccgccccagccgcatctgtgggcagcagccagggcggcgccaggaagaggcaggtggacgccgacctgcagccggccgggtccctgccccacggatcaaacggcctaggctgcaggtggtcaagaggctgaacttcagatcggaggagatggaggagccgccccctcccgactcctcgccgacggacatcaccccgccgccgagccctgaggacctc

SEQ ID NO: 4167 - DNA, 569 bp, Homo sapiens
  source 1..569: mol_type = unassigned DNA
agtgcgcgacggcggcggcggcgcgggaggttcggagcgggagctcgggctcgcggacggtatggaggactacgagcaggagctgtgcggcgtcgaggatgatttccacaaccagttcgcggccgagctggaggggcgtcgactccgtcgccctccggggtccccctgttcaccgcgggccgacccccgcggacgttcgaggaggcccttgccagaggggacgcggcctccagtcccgccccagccgcatctgtgggcagcagccagggcggcgccaggaagaggcaggtggacgccgacctgcagccggccgggtccctgccccacgcccccaggatcaaacggcctaggctgcaggtggtcaagaggctgaacttcagatcggaggagatggaggagccgccccctcccgactcctcgccgacggacatcaccccgccgccgagccctgaggacctcgcagagctttggggccacggagtctcagaagctgctgccgacgtgggtctcacacgggcctcaccagctgcccgcaatcccgtcctgaggcggccccccatcttggagga

SEQ ID NO: 4168 - DNA, 1110 bp, Homo sapiens
  source 1..1110: mol_type = unassigned DNA
agtgcgcgacggcggcggcggcgcgggaggttcggagcgggagctcgggctcgcggacggtatggaggactacgagcaggagctgtgcggcgtcgaggatgatttccacaaccagttcgcggccgagctggaggtgctggcagagctggaaggggcgtcgactccgtcgccctccggggtccccctgttcaccgcgggccgacccccgcggacgttcgaggaggcccttgccagaggggacgcggcctccagtcccgccccagccgcatctgtgggcagcagccagggcggcgccaggaagaggcaggtggacgccgacctgcagccggccgggtccctgccccacgcccccaggatcaaacggcctaggctgcaggtggtcaagaggctgaacttcagatcggaggagatggaggagccgccccctcccgactcctcgccgacggacatcaccccgccgccgagccctgaggacctcgcagagctttggggccacggagtctcagaagctgctgccgacgtgggtctcacacgggcctcaccagctgcccgcaatcccgtcctgaggcggccccccatcttggaggactacgtccacgtgacatccacggagggcgtccgggcttatctggtgctgcgtgctgaccccatggccccgggggtgcagggctctctcctccacgtcccatggcgaggcggtggccagctggacctgctgggtgtgtccttagcctccctgaagaagcaggtcgacggcgagcctgttgtttgcacagcggcgggagcggctgcttcaggaggcccagaagctttcagacaccctgcacagtctcaggtcgggggaggaggaggcagcccagcccttgggggcccctgaggaggagccgactgacggtcaagacgcctccagtcactgcctctgggtggatgagtttgcaccccgccactacacggagctgctcagtgatgacgtgaggtcttgttctcactcaagtgtggctggcttcctctgttcccaagatggaagaacctgggcccagtgatttttgcacagccaatccactgggcctcggagacggagtgggctctggtttgcccttttgagttgta

SEQ ID NO: 4169 - DNA, 3172 bp, Homo sapiens
  source 1..3172: mol_type = unassigned DNA
agtgcgcgacggcggcggcggcgcgggaggttcggagcgggagctcgggctcgcggacggtatggaggactacgagcaggagctgtgcggcgtcgaggatgatttccacaaccagttcgcggccgagctggaggtgctggcagagctggaaggggcgtcgactccgtcgccctccggggtccccctgttcaccgcgggccgacccccgcggacgttcgaggaggcccttgccagaggggacgcggcctccagtcccgccccagccgcatctgtgggcagcagccagggcggcgccaggaagaggcaggtggacgccgacctgcagccggccgggtccctgccccacggtaggttggcggcattgccccagggcctccggagtgggcgcgaggctgaggaggcctctggttccctgcatgtgtctcccccagcccccaggatcaaacggcctaggctgcaggtggtcaagaggctgaacttcagatcggaggagatggaggagccgccccctcccgactcctcgccgacggacatcaccccgccgccgagccctgaggacctcgcagagctttggggccacggagtctcagaagctgctgccgacgtgggtctcacacgggcctcaccagctgcccgcaatcccgtcctgaggcggccccccatcttggaggactacgtccacgtgacatccacggagggcgtccgggcttatctggtgctgcgtgctgaccccatggccccgggggtgcagggctctctcctccacgtcccatggcgaggcggtggccagctggacctgctgggtgtgtccttagcctccctgaagaagcaggtcgacggcgagcggcgggagcggctgcttcaggaggcccagaagctttcagacaccctgcacagtctcaggtcgggggaggaggaggcagcccagcccttgggggcccctgaggaggagccgactgacggtcaagacgcctccagtcactgcctctgggtggatgagtttgcaccccgccactacacggagctgctcagtgatgacttcaccaaccgctgcctgctcaagtggctgaagttgtgggacctggtggtgtttggccacgagaggccttcccggaagcccaggcccagtgttgagccggcccgggtcagcaaggaggccacagccccaggcaagtggaagagccacgaacaggtgctggaggagatgctggaggctgggctggacccgagccagcgaccgaagcagaaggtggcactgctctgtgggcccccggggctggggaagaccaccctggcacacgtgattgcgcgtcacgcggggtactctgtggtggagatgaacgccagtgacgaccgtagcccggaggtcttccgcacacgcatcgaggcggccacccagatggagtcggtgctgggtgctggcgggaagcccaactgcctggtcatcgatgagatcgacggggcccccgtggccgccatcaacgtcctcctgagcatcctgaaccgcaaggggccacaggaggtggggccacagggcccggctgtgccttcgggaggcggccgacggcgccgggcagagggggggctcctcatgaggcccattatctgcatttgcaatgaccagttcgcaccgtccctgcggcagctgaagcagcaggccttcctgctccacttcccgccgactctgccctcgaggctggtgcagcggctccaggaggtctccctgcggcagggcatgagggccgacccaggggtgctggccgccctctgtgagaaaactgacaatgacatccgggcctgcatcaacaccctgcagttcctgtacagccggggccagcgggagctgagcgtgcgggacgtgcaggccacacgcgtgggcctcaaggaccagcgcagagggctcttctcggtgtggcaggaggtcttccagctgcctcgagcccagaggcgccgtgtgggccaggaccccgccctgcctgctgacacactcctgctgggtgacggggacgcgggctccctcacctccgcctcacagcgattctaccgtgtcctgcatgccgctgcctctgcgggcgagcacgagaaggtggtccagggcttgtttgacaacttcctgcgtctgcggctgcgagactccagcctgggtgctgtgtgtgtggccctcgactggctggccttcgatgacctgctggcgggggctgctcatcacagccagagcttccagctgctgcgctacccacccttcctgcccgtggccttccatgtgctgtttgcttccagccacacacccaggatcaccttccccagcagccagcaggaggcccagaaccggatgagccagatgaggaacctgatccagacgctggtgtccggcatcgcgccagccacgcgcagccgggccacgccccaggccctgctcctcgatgccctctgcctgctcctggacattcttgcacccaagctccgccccgtgagcacacagctgtacagcacccgtgaaaagcaacagctggccagcctggtgggcacgatgctcgcttacagcctgacctaccgccaggagcgcacgcccgatggccagtacatctacaggctggagccgaacgtggaggaactctgccgcttccctgagctgcctgcccgcaagcccctcacctaccagacgaagcagctcatcgcccgcgagatcgaggtggagaagatgcggcgggcggaggcttctgcccgggtagagaacagcccccaggtggatgggagccccccagggctcgagggtctgctggggggcattggggagaaaggggtgcaccgacctgccccacgcaaccatgagcagcggctggagcacatcatgaggcgagcggcccgggaggaacagcctgagaaggacttctttggacgtgtggtcgtcaggagcacagcagtcccgagtgcaggggacacggccccggagcaggactcagtggagcggcgcatgggcacagcggtgggcaggagcgaggtctggttccgcttcaacgagggtgtctccaacgccgtgcggcgcagcctgtacatcagggacttgctctagttctctgagccgcggacatgccctcgcattgcttcccgcagagtgcagagacaggaagctggagatgtctttataaagtcacacctttacagactgtaa

SEQ ID NO: 4170 - DNA, 1801 bp, Homo sapiens
  source 1..1801: mol_type = unassigned DNA
gtgcgcgacggcggcggcggcgcgggaggttcggagcgggagctcgggctcgcggacggtatggaggactacgagcaggagctgtgcggcgtcgaggatgatttccacaaccagttcgcggccgagctggaggtgctggcagagctggaagcaggggcgtcgactccgtcgccctccggggtccccctgttcaccgcgggccgacccccgcggacgttcgaggaggcccttgccagaggggacgcggcctccagtcccgccccagccgcatctgtgggcagcagccagggcggcgccaggaagaggcaggtggacgccgacctgcagccggccgggtccctgccccacgcccccaggatcaaacggcctaggctgcaggtggtcaagaggctgaacttcagatcggaggagatggaggagccgccccctcccgactcctcgccgacggacatcaccccgccgccgagccctgaggacctcgcagagctttggggccacggagtctcagaagctgctgccgacgtgggtctcacacgggcctcaccagctgcccgcaatcccgtcctgaggcggccccccatcttggaggactacgtccacgtgacatccacggagggcgtccgggcttatctggtgctgcgtgctgaccccatggccccgggggtgcagggctctctcctccacgtcccatggcgaggcggtggccagctggacctgctgggtgtgtccttagcctccctgaagaagcaggtcgacggcgagcggcgggagcggctgcttcaggaggcccagaagctttcagacaccctgcacagtctcaggtcgggggaggaggaggcagcccagcccttgggggcccctgaggaggagccgactgacggtcaagacgcctccagtcactgcctctgggtggatgagtttgcaccccgccactacacggagctgctcagtgatgacttcaccaaccgctgcctgctcaagtggctgaagttgtgggacctggtggtgtttggccacgagaggccttcccggaagcccaggcccagtgttgagccggcccgggtcagcaaggaggccacagccccaggcaagtggaagagccacgaacaggtgctggaggagatgctggaggctgggctggacccgagccagcgaccgaagcagaaggtggcactgctctgtgggcccccggggctggggaagaccaccctggcacacgtgattgcgcgtcacgcggggtactctgtggtggagatgaacgccagtgacgaccgtagcccggaggtcttccgcacacgcatcgaggcggccacccagatggagtcggtgctgggtgctggcgggaagcccaactgcctggtcatcgatgagatcgacggggcccccgtggtgggctccttgatgcctgggccgccatcaacgtcctcctgagcatcctgaaccgcaaggggccacaggaggtggggccacagggcccggctgtgccttcgggaggcggccgacggcgccgggcagagggggggctcctcatgaggcccattatctgcatttgcaatgaccagttcgcaccgtccctgcggcagctgaagcagcaggccttcctgctccacttcccgccgactctgccctcgaggctggtgcagcggctccaggaggtctccctgcggcagggcatgagggccgacccaggggtgctggccgccctctgtgagaaaactgacaatgacatccgggcctgcatcaacaccctgcagttcctgtacagccggggccagcgggagctgagcgtgcgggacgtgca

SEQ ID NO: 4171 - DNA, 4494 bp, Homo sapiens
  source 1..4494: mol_type = unassigned DNA
gcggcggcggcgcgggaggttcggagcgggagctcgggctcgcggacggtatggaggactacgagcaggagctgtgcggcgtcgaggatgatttccacaaccagttcgcggccgagctggaggtgctggcagagctggaaggggcgtcgactccgtcgccctccggggtccccctgttcaccgcgggccgacccccgcggacgttcgaggaggcccttgccagaggggacgcggcctccagtcccgccccagccgcatctgtgggcagcagccagggcggcgccaggaagaggcaggtggacgccgacctgcagccggccgggtccctgccccacgcccccaggatcaaacggcctaggctgcaggtggtcaagaggctgaacttcagatcggaggagatggaggagccgccccctcccgactcctcgccgacggacatcaccccgccgccgagccctgaggacctcgcagagctttggggccacggagtctcagaagctgctgccgacgtgggtctcacacgggcctcaccagctgcccgcaatcccgtcctgaggcggccccccatcttggaggactacgtccacgtgacatccacggagggcgtccgggcttatctggtgctgcgtgctgaccccatggccccgggggtgcagctgacccatctggatggcttcattcctttggcacccctgtccagtctcccacccctcactggccagcttactggggttgtcccacccgggtccctgagcactgatgggggctgacgtgaatcctgtgacctaggaggggcccagaggcaattgtcctcccttccccacagggctctctcctccacgtcccatggcgaggcggtggccagctggacctgctgggtgtgtccttagcctccctgaagaagcaggtcgacggcgagcggcgggagcggctgcttcaggaggcccagaagctttcagacaccctgcacagtctcaggtcgggggaggaggaggcagcccagcccttgggggcccctgaggaggagccgactgacggtcaagacgcctccagtcactgcctctgggtggatgagtttgcaccccgccactacacggagctgctcagtgatgacgtgaggtcttgttctcactcaagtgtggctggcttcctctgttcccaagatggaagaacctgggcccagtgatttttgcacagccaatccactgggcctcggagacggagtgggctctggtttgcccttttgagttgtaggtggtgaactgagcacagggctgtgtgctactggtcccctgtgacctgtgaggcaggctaggggtccagggtgtcacctgatccaagtctctgttccctttcctaccttcacagcagctgacactggagtgcccctggggagggcaggggcctcccagatgggttgtggccagagccgtgggggtggagcccctggtgtgagccttgcggtcactcgctggcaggaagacgggggtggccattcatcctgtggcttggcatcccatggggcatggggctcatggtggcaggtggactgtccgtgcctggaggcggtgccctcaggctgtgcttcccttcccgtccttcccgcagttcaccaaccgctgcctgctcaagtggctgaagttgtgggacctggtggtgtttggccacgagaggccttcccggaagcccaggcccagtgttgagccggcccgggtcagcaaggaggccacagccccaggcaagtggaagagccacgaacaggtgctggaggagatgctggaggctgggctggacccgagccagcgaccgaagcagaaggtgagccccgctggctgtgccgccgggaacaagcctgaggctttgcactcggcgccggcacccttgcagcctgttgactttctccaggagccgtgggtgtggtgacgtgtgggtcttggcgtgaagcgccattagcgtgagttagaactggagcgttgcagtaacaactcgggggaagtcgttgtccctgaagggctctgcggctggccaggatgatctgggtggacggtgggtggtttctgggggccagtcacactggtatcagctgtgttttgtctgcacgaactttgctttgtgtaggtttttttttccgttgccatcttggtgtgtgaaagtgctcaattttgttcttatttgatggctggagtggggtggagggagcgcccagcctgtgggacacatgtggcagtccctggctgctaggccgggagcgtcctgtaggtgcggtgcacactacgccttcatctacctgggctgcaggtggcactgctctgtgggcccccggggctggggaagaccaccctggcacacgtgattgcgcgtcacgcggggtactctgtggtggagatgaacgccaggtgagtgatgtgaggtccgtctctggctcgccttctgtcctgacgtgtttgagttctggtggcggacctgaaaccgggtgtggatgttcccgtcttgagggtggtgggggcctgggtgtgtgggccgggaaaacgtgtccttcctcggggttcacgggatcggcagcagccgcgtcatgtgacggtctccacgcaaatgcggcagccccggccttgggaggctgccctgccagggacgcccactgccctgacgacccctgacctccccattgcagtgacgaccgtagcccggaggtcttccgcacacgcatcgaggcggccacccagatggagtcggtgctgggtgctggcgggaagcccaactgcctggtcatcgatgagatcgacggggcccccgtggccgccatcaacgtcctcctgagcatcctgaaccgcaaggggccacaggaggtggggccacagggcccggctgtgccttcgggaggcggccgacggcgccgggcagagggggggctcctcatgaggcccattatctgcatttgcaatgaccagttcgcaccgtccctgcggcagctgaagcagcaggccttcctgctccacttcccgccgactctgccctcgaggctggtgcagcggctccaggaggtctccctgcggcagggcatgagggccgacccaggggtgctggccgccctctgtgagaaaactgacaatgacatccgggcctgcatcaacaccctgcagttcctgtacagccggggccagcgggagctgagcgtgcgggacgtgcaggccacacgcgtgggcctcaaggaccagcgcagagggctcttctcggtgtggcaggaggtcttccagctgcctcgagcccagaggcgccgtgtgggccaggaccccgccctgcctgctgacacactcctgctgggtgacggggacgcgggctccctcacctccgcctcacagcgattctaccgtgtcctgcatgccgctgcctctgcgggcgagcacgagaaggtggtccagggcttgtttgacaacttcctgcgtctgcggctgcgagactccagcctgggtgctgtgtgtgtggccctcgactggctggccttcgatgacctgctggcgggggctgctcatcacagccagagcttccagctgctgcgctacccacccttcctgcccgtggccttccatgtgctgtttgcttccagccacacacccaggatcaccttccccagcagccagcaggaggcccagaaccggatgagccagatgaggaacctgatccagacgctggtgtccggcatcgcgccagccacgcgcagccgggccacgccccaggccctgctcctcgatgccctctgcctgctcctggacattcttgcacccaagctccgccccgtgagcacacagctgtacagcacccgtgaaaagcaacagctggccagcctggtgggcacgatgctcgcttacagcctgacctaccgccaggagcgcacgcccgatggccagtacatctacaggctggagccgaacgtggaggaactctgccgcttccctgagctgcctgcccgcaagcccctcacctaccagacgaagcagctcatcgcccgcgagatcgaggtggagaagatgcggcgggcggaggcttctgcccgggtagagaacagcccccaggtggatgggagccccccagggctcgagggtctgctggggggcattggggagaaaggggtgcaccgacctgccccacgcaaccatgagcagcggctggagcacatcatgaggcgagcggcccgggaggaacagcctgagaaggacttctttggacgtgtggtcgtcaggagcacagcagtcccgagtgcaggggacacggccccggagcaggactcagtggagcggcgcatgggcacagcggtgggcaggagcgaggtctggttccgcttcaacgagggtgtctccaacgccgtgcggcgcagcctgtacatcagggacttgctctagttctctgagccgcggacatgccctcgcattgcttcccgcagagtgcagagacaggaagctggagatgtctttataaagtcacacctttacagactgt

SEQ ID NO: 4172 - DNA, 819 bp, Homo sapiens
  source 1..819: mol_type = unassigned DNA
caggatcaaacggcctaggctgcaggtggtcaagaggctgaacttcagatcggaggagatggaggagccgccccctcccgactcctcgccgacggacatcaccccgccgccgagccctgaggacctcgcagagctttggggccacggagtctcagaagctgctgccgacgtgggtctcacacgggcctcaccagctgcccgcaatcccgtcctgaggcggccccccatcttggaggactacgtccacgtgacatccacggagggcgtccgggcttatctggtgctgcgtgctgaccccatggccccgggggtgcagggctctctcctccacgtcccatggcgaggcggtggccagctggacctgctgggtgtgtccttagcctccctgaagaagcaggtcgacggcgagcggcgggagcggctgcttcaggaggcccagaagctttcagacaccctgcacagtctcaggtcgggggaggaggaggcagcccagcccttgggggcccctgaggaggagccgactgacggtcaagacgcctccagtcactgcctctgggtggatgagtttgcaccccgccactacacggagctgctcagtgatgacgtgagttcaccaaccgctgcctgctcaagtggctgaagttgtgggacctggtggtgtttggccacgagaggccttcccggaagcccaggcccagtgttgagccggcccgggtcagcaaggaggccacagccccaggcaagtggaagagccacgaacaggtgctggaggagatgctggaggctgggctggacccgagccagcgaccgaagcagaag

SEQ ID NO: 4173 - DNA, 790 bp, Homo sapiens
  source 1..790: mol_type = unassigned DNA
caccccgccgccgagccctgaggacctcgcagagctttggggccacggagtctcagaagctgctgccgacgtgggtctcacacgggcctcaccagctgcccgcaatcccgtcctgaggcggccccccatcttggaggactacgtccacgtgacatccacggagggcgtccgggcttatctggtgctgcgtgctgaccccatggccccgggggtgcagctgacccatctggatggcttcattcctttggcacccctgtccagtctcccacccctcactggccagcttactgggggctctctcctccacgtcccatggcgaggcggtggccagctggacctgctgggtgtgtccttagcctccctgaagaagcaggtcgacggcgagcggcgggagcggctgcttcaggaggcccagaagctttcagacaccctgcacagtctcaggtcgggggaggaggaggcagcccagcccttgggggcccctgaggaggagccgactgacggtcaagacgcctccagtcactgcctctgggtggatgagtttgcaccccgccactacacggagctgctcagtgatgacttcaccaaccgctgcctgctcaagtggctgaagttgtgggacctggtggtgtttggccacgagaggccttcccggaagcccaggcccagtgttgagccggcccgggtcagcaaggaggccacagccccaggcaagtggaagagccacgaacaggtgctggaggagatgctggaggctgggctggacccgagccagcgaccgaagcagaag

SEQ ID NO: 4174 - DNA, 568 bp, Homo sapiens
  source 1..568: mol_type = unassigned DNA
gccgccgagccctgaggacctcgcagagctttggggccacgggtgtgtggcttggacatgggcgtcccatcccatctgtccagtgggactcagatggagcccatcccgtgccctggatgaggcctggggggtggggagggttccatggctgagagcagtctcggacacccatatccaagggtgaccccacgcttgagtttctgccactgagccccggtctctctccagagtctcagaagctgctgccgacgtgggtctcacacgggcctcaccagctgcccgcaatcccgtcctgaggcggccccccatcttggaggactacgtccacgtgacatccacggagggcgtccgggcttatctggtgctgcgtgctgaccccatggccccgggggtgcagggctctctcctccacgtcccatggcgaggcggtggccagctggacctgctgggtgtgtccttagcctccctgaagaagcaggtcgacggcgagcggcgggagcggctgcttcaggaggcccagaagctttcagacaccctgcacagtctcaggtcgggggaggaggaggca

SEQ ID NO: 4175 - DNA, 711 bp, Homo sapiens
  source 1..711: mol_type = unassigned DNA
gaagcaggtcgacggcgagcggcgggagcggctgcttcaggaggcccagaagctttcagacaccctgcacagtctcaggtcgggggaggaggaggcagcccagcccttgggggcccctgaggaggagccgactgacggtcaagacgcctccagtcactgcctctgggtggatgagtttgcaccccgccactacacggagctgctcagtgatgacttcaccaaccgctgcctgctcaagtggctgaagttgtgggacctggtggtgtttggccacgagaggccttcccggaagcccaggcccagtgttgagccggcccgggtcagcaaggaggccacagccccaggcaagtggaagagccacgaacaggtgctggaggagatgctggaggctgggctggacccgagccagcgaccgaagcagaaggccgccatcaacgtcctcctgagcatcctgaaccgcaaggggccacaggaggtggggccacagggcccggctgtgccttcgggaggcggccgacggcgccgggcagagggggggctcctcatgaggcccattatctgcatttgcaatgaccagttcgcaccgtccctgcggcagctgaagcagcaggccttcctgctccacttcccgccgactctgccctcgaggctggtgcagcggctccaggaggtctccctgcggcagggcatgagggccgacccaggggtgct

SEQ ID NO: 4176 - DNA, 701 bp, Homo sapiens
  source 1..701: mol_type = unassigned DNA
cttcctctgttcccaagatggaagaacctgggcccagtgatttttgcacagccaatccactgggcctcggagacggagtgggctctggtttgcccttttgagttgtaggtggtgaactgagcacagggctgtgtgctactggtcccctgtgacctgtgaggcaggctaggggtccagggtgtcacctgatccaagtctctgttccctttcctaccttcacagcagctgacactggagtgcccctggggagggcaggggcctcccagatgggttgtggccagagccgtgggggtggagcccctggtgtgagccttgcggtcactcgctggcaggaagacgggggtggccattcatcctgtggcttggcatcccatggggcatggggctcatggtggcaggtggactgtccgtgcctggaggcggtgccctcaggctgtgcttcccttcccgtccttcccgcagttcaccaaccgctgcctgctcaagtggctgaagttgtgggacctggtggtgtttggccacgagaggccttcccggaagcccaggcccagtgttgagccggcccgggtcagcaaggaggccacagccccaggcaagtggaagagccacgaacaggtgctggaggagatgctggaggctgggctggacccgagccagcgaccgaagcagaaggtggcactgctctgtgggcccccggggct

SEQ ID NO: 4177 - DNA, 607 bp, Homo sapiens
  source 1..607: mol_type = unassigned DNA
cttcccttcccgtccttcccgcagttcaccaaccgctgcctgctcaagtggctgaagttgtgggacctggtggtgtttggccacgagaggccttcccggaagcccaggcccagtgttgagccggcccgggtcagcaaggaggccacagccccaggcaagtggaagagccacgaacaggtgctggaggagatgctggaggctgggctggacccgagccagcgaccgaagcagaagtgacgaccgtagcccggaggtcttccgcacacgcatcgaggcggccacccagatggagtcggtgctgggtgctggcgggaagcccaactgcctggtcatcgatgagatcgacggggcccccgtggccgccatcaacgtcctcctgagcatcctgaaccgcaaggggccacaggaggtggggccacagggcccggctgtgccttcgggaggcggccgacggcgccgggcagagggggggctcctcatgaggcccattatctgcatttgcaatgaccagttcgcaccgtccctgcggcagctgaagcagcaggccttcctgctccacttcccgccgactctgccctcgaggctggtgcagcggctccaggaggtc

SEQ ID NO: 4178 - DNA, 814 bp, Homo sapiens
  source 1..814: mol_type = unassigned DNA
gcggccgacggcgccgggcagagggggggctcctcatgaggcccattatctgcatttgcaatgaccagttcgcaccgtccctgcggcagctgaagcagcaggccttcctgctccacttcccgccgactctgccctcgaggctggtgcagcggctccaggaggtctccctgcggcagggcatgagggccgacccaggggtgctggccgccctctgtgagaaaactgacaatgacatccgggcctgcatcaacaccctgcagttcctgtacagccggggccagcgggagctgagcgtgcgggacgtgcaggccacacgcgtgggcctcaaggaccagcgcagagggctcttctcggtgtggcaggaggtcttccagctgcctcgagcccagagcaccccacctgcaggcgccgtgtgggccaggaccccgccctgcctgctgacacactcctgctgggtgacggggacgcgggctccctcacctccgcctcacagcgattctaccgtgtcctgcatgccgctgcctctgcgggcgagcacgagaaggtggtccagggcttgtttgacaacttcctgcgtctgcggctgcgagactccagcctgggtgctgtgtgtgtggccctcgactggctggccttcgatgacctgctggcgggggctgctcatcacagccagagcttccagctgctgcgctacccacccttcctgcccgtggccttccatgtgctgtttgcttccagccacacacccaggatcaccttccccagcagccagcaggaggcccagaaccggatgagccagatgaggaacctgatc

SEQ ID NO: 4179 - DNA, 691 bp, Homo sapiens
  source 1..691: mol_type = unassigned DNA
cgtggagcagcggcggggatagactcccccacggaacaggggtggggacgccacggcctggactctggtgggcggaacttcctcaggcagtctaaggaggggctgagtgaggctggatccctttggttcctggaggcctcctgggcttgtttgacaacttcctgcgtctgcggctgcgagactccagcctgggtgctgtgtgtgtggccctcgactggctggccttcgatgacctgctggcgggggctgctcatcacagccagagcttccagctgctgcgctacccacccttcctgcccgtggccttccatgtgctgtttgcttccagccacacacccaggatcaccttccccagcagccagcaggaggcccagaaccggatgagccagatgaggaacctgatccagacgctggtgtccggcatcgcgccagccacgcgcagccgggccacgccccaggccctgctcctcgatgccctctgcctgctcctggacattcttgcacccaagctccgccccgtgagcacacagctgtacagcacccgtgaaaagcaacagctggccagcctggtgggcacgatgctcgcttacagcctgacctaccgccaggagcgcacgcccgatggccagtacatctacaggctggagccgaacgtggaggaactctgccgcttccctgagctgcctgcccg

SEQ ID NO: 4180 - DNA, 673 bp, Homo sapiens
  source 1..673: mol_type = unassigned DNA
tggccttgtggcttttggggtttgcggttggagtgcccggcggctctctggccctgagcctggccccgctgacctgccctggtgtccccctgtgctgagcaggaacgtggaggaactctgccgcttccctgagctgcctgcccgcaagcccctcacctaccagacgaagcagctcatcgcccgcgagatcgaggtggagaagatgcggcgggcggaggcttctgcccgggtagagaacagcccccaggtggatgggagccccccagggctcgagggtctgctggggggcattggggagaaaggggtgcaccgacctgccccacgcaaccatgagcagcggctggagcacatcatgaggcgagcggcccgggaggaacagcctgagaaggacttctttggacgtgtggtcgtcaggagcacagcagtcccgagtgcaggggacacggccccggagcaggactcagtggagcggcgcatgggcacagcggtgggcaggagcgaggtctggttccgcttcaacgagggtgtctccaacgccgtgcggcgcagcctgtacatcagggacttgctctagttctctgagccgcggacatgccctcgcattgcttcccgcagagtgcagagacaggaagctggagatgtctttataaagtcacacctttacagactgtaa

SEQ ID NO: 4181 - DNA, 197 bp, Homo sapiens
  source 1..197: mol_type = unassigned DNA
tgtctttataaagtcacacctttacagactgtaatcacgtgcgagtggagtggggttcacaggatggtgggagtggggccgggcgtgggctcataggatggtgtgagtggggccaggagtggggctcacaggatggtgggagtgggggacaatgacaacggccaggcgaccgcgagtgagagcgagggccaagtgat

SEQ ID NO: 4182 - DNA, 3555 bp, Homo sapiens
  source 1..3555: mol_type = unassigned DNA
atgcacgtgaatgcctctgcccgacggtgggggcggggaggggctgcagcactaccaggcccggcagccagtccgcgcagacccgcgccccgcacaggcccggtgggcaggccgaccctggctccgagcccctcccgcgcccacgcccacgccaagaccaacctgctgccgggccgtgcagtccaggcccccgatgccgtgcccggcgccggctccagccgcgcgcccgcgcgctggcgacccagagaccctggaagctccgctccggacgcctggcagcgcttccgccctgcaccgctgcgcgcgcagccccgcccccccccccggcccgcccccggcccgcccccgccgcggaagggcggctgcggcggccaatggcgagctccccaggacaggacgcgggggctgcggagcaggaactcgccccgcccacccctcgcgcagccccgcctccgccacgccaaccaatggcgcgcgccgccgggcacgccggctgctgattggcggcgcccggcacgctcggggcgggcagtgcgcgacggcggcggcggcgcgggaggttcggagcgggagctcgggctcgcggacggtatggaggactacgagcaggagctgtgcggcgtcgaggatgatttccacaaccagttcgcggccgagctggaggtgctggcagagctggaaggggcgtcgactccgtcgccctccggggtccccctgttcaccgcgggccgacccccgcggacgttcgaggaggcccttgccagaggggacgcggcctccagtcccgccccagccgcatctgtgggcagcagccagggcggcgccaggaagaggcaggtggacgccgacctgcagccggccgggtccctgccccacgcccccaggatcaaacggcctaggctgcaggtggtcaagaggctgaacttcagatcggaggagatggaggagccgccccctcccgactcctcgccgacggacatcaccccgccgccgagccctgaggacctcgcagagctttggggccacgggttctcagaagctgctgccgacgtgggtctcacacgggcctcaccagctgcccgcaatcccgtcctgaggcggccccccatcttggaggactacgtccacgtgacatccacggagggcgtccgggcttatctggtgctgcgtgctgaccccatggccccgggggtgcagggctctctcctccacgtcccatggcgaggcggtggccagctggacctgctgggtgtgtccttagcctccctgaagaagcaggtcgacggcgagcggcgggagcggctgcttcaggaggcccagaagctttcagacaccctgcacaggtcgggggaggaggaggcagcccagcccttgggggcccctgaggaggagccgactgacggtcaagacgcctccagtcactgcctctgggtggatgagtttgcaccccgccactacacggagctgctcagtgatgacttcaccaaccgctgcctgctcaagtggctgaagttgtgggacctggtggtgtttggccacgagaggccttcccggaagcccaggcccagtgttgagccggcccgggtcagcaaggaggccacagccccaggcaagtggaagagccacgaacaggtgctggaggagatgctggaggctgggctggacccgagccagcgaccgaagcagaaggtggcactgctctgtgggcccccggggctggggaagaccaccctggcacacgtgattgcgcgtcacgcggggtactctgtggtggagatgaacgccagtgacgaccgtagcccggaggtcttccgcacacgcatcgaggcggccacccagatggagtcggtgctgggtgctggcgggaagcccaactgcctggtcatcgatgagatcgacggggcccccgtggccgccatcaacgtcctcctgagcatcctgaaccgcaaggggccacaggaggtggggccacagggcccggctgtgccttcgggaggcggccgacggcgccgggcagagggggggctcctcatgaggcccattatctgcatttgcaatgaccagttcgcaccgtccctgcggcagctgaagcagcaggccttcctgctccacttcccgccgactctgccctcgaggctggtgcagcggctccaggagggcatgagggccgacccaggggtgctggccgccctctgtgagaaaactgacaatgacatccgggcctgcatcaacaccctgcagttcctgtacagccggggccagcgggagctgagcgtgcgggacgtgcaggccacacgcgtgggcctcaaggaccagcgcagagggctcttctcggtgtggcaggaggtcttccagctgcctcgagcccagaggagcagccagcatgtctctgtcctgacgtgccatgggaccccaggggatgctggcctggtcgtgctgcaggatatgggagacgctggcctgggcctgtgggatgtgctgctcctggcctggacccggagggggactttccctgggcgattctaccgtgtcctgcatgccgctgcctctgcgggcgagcacgagaaggtggtccagggcttgtttgacaacttcctgcgtctgcggctgcgagactccagcctgggtgctgtgtgtgtggccctcgactggctggccttcgatgacctgctggcgggggctgctcatcacagccagagcttccagctgctgcgctacccacccttcctgcccgtggccttccatgtgctgtttgcttccagccacacacccaggatcaccttccccagcagccagcaggaggcccagaaccggatgagccagatgaggaacctgatccagacgctggtgtccggcatcgcgccagccacgcgcagccgggccacgccccaggccctgctcctcgatgccctctgcctgctcctggacattcttgcacccaagctccgccccgtgagcacacagctgtacagcacccgtgaaaagcaacagctggccagcctggtgggcacgatgctcgcttacagcctgacctaccgccaggagcgcacgcccgatggccagtacatctacaggctggagccgaacgtggaggaactctgccgcttccctgagctgcctgcccgcaagcccctcacctaccagacgaagcagctcatcgcccgcgagatcgaggtggagaagatgcggcgggcggaggcttctgcccgggtagagaacagcccccaggtggatgggagccccccagggctcgagggtctgctggggggcattggggagaaaggggtgcaccgacctgccccacgcaaccatgagcagcggctggagcacatcatgaggcgagcggcccgggaggaacagcctgagaaggacttctttggacgtgtggtcgtcaggagcacagcagtcccgagtgcaggggacacggccccggagcaggactcagtggagcggcgcatgggcacagcggtgggcaggagcgaggtctggttccgcttcaacgagggtgtctccaacgccgtgcggcgcagcctgtacatcagggacttgctctag

SEQ ID NO: 4183 - DNA, 2988 bp, Homo sapiens
  source 1..2988: mol_type = unassigned DNA
gtgcgcgacggcggcggcggcgcgggaggttcggagcgggagctcgggctcgcggacggtatggaggactacgagcaggagctgtgcggcgtcgaggatgatttccacaaccagttcgcggccgagctggaggtgctggcagagctggaaggggcgtcgactccgtcgccctccggggtccccctgttcaccgcgggccgacccccgcggacgttcgaggaggcccttgccagaggggacgcggcctccagtcccgccccagccgcatctgtgggcagcagccagggcggcgccaggaagaggcaggtggacgccgacctgcagccggccgggtccctgccccacgcccccaggatcaaacggcctaggctgcaggtggtcaagaggctgaacttcagatcggaggagatggaggagccgccccctcccgactcctcgccgacggacatcaccccgccgccgagccctgaggacctcgcagagctttggggccacgggttctcagaagctgctgccgacgtgggtctcacacgggcctcaccagctgcccgcaatcccgtcctgaggcggccccccatcttggaggactacgtccacgtgacatccacggagggcgtccgggcttatctggtgctgcgtgctgaccccatggccccgggggtgcagggctctctcctccacgtcccatggcgaggcggtggccagctggacctgctgggtgtgtccttagcctccctgaagaagcaggtcgacggcgagcggcgggagcggctgcttcaggaggcccagaagctttcagacaccctgcacagtctcaggtcgggggaggaggaggcagcccagcccttgggggcccctgaggaggagccgactgacggtcaagacgcctccagtcactgcctctgggtggatgagtttgcaccccgccactacacggagctgctcagtgatgacttcaccaaccgctgcctgctcaagtggctgaagttgtgggacctggtggtgtttggccacgagaggccttcccggaagcccaggcccagtgttgagccggcccgggtcagcaaggaggccacagccccaggcaagtggaagagccacgaacaggtgctggaggagatgctggaggctgggctggacccgagccagcgaccgaagcagaaggtggcactgctctgtgggcccccggggctggggaagaccaccctggcacacgtgattgcgcgtcacgcggggtactctgtggtggagatgaacgccagtgacgaccgtagcccggaggtcttccgcacacgcatcgaggcggccacccagatggagtcggtgctgggtgctggcgggaagcccaactgcctggtcatcgatgagatcgacggggcccccgtggccgccatcaacgtcctcctgagcatcctgaaccgcaaggggccacaggaggtggggccacagggcccggctgtgccttcgggaggcggccgacggcgccgggcagagggggggctcctcatgaggcccattatctgcatttgcaatgaccagttcgcaccgtccctgcggcagctgaagcagcaggccttcctgctccacttcccgccgactctgccctcgaggctggtgcagcggctccaggaggtctccctgcggcagggcatgagggccgacccaggggtgctggccgccctctgtgagaaaactgacaatgacatccgggcctgcatcaacaccctgcagttcctgtacagccggggccagcgggagctgagcgtgcgggacgtgcaggccacacgcgtgggcctcaaggaccagcgcagagggctcttctcggtgtggcaggaggtcttccagctgcctcgagcccagaggcgccgtgtgggccaggaccccgccctgcctgctgacacactcctgctgggtgacggggacgcgggctccctcacctccgcctcacagcgattctaccgtgtcctgcatgccgctgcctctgcgggcgagcacgagaaggtggtccagggcttgtttgacaacttcctgcgtctgcggctgcgagactccagcctgggtgctgtgtgtgtggccctcgactggctggccttcgatgacctgctggcgggggctgctcatcacagccagagcttccagctgctgcgctacccacccttcctgcccgtggccttccatgtgctgtttgcttccagccacacacccaggatcaccttccccagcagccagcaggaggcccagaaccggatgagccagatgaggaacctgatccagacgctggtgtccggcatcgcgccagccacgcgcagccgggccacgccccaggccctgctcctcgatgccctctgcctgctcctggacattcttgcacccaagctccgccccgtgagcacacagctgtacagcacccgtgaaaagcaacagctggccagcctggtgggcacgatgctcgcttacagcctgacctaccgccaggagcgcacgcccgatggccagtacatctacaggctggagccgaacgtggaggaactctgccgcttccctgagctgcctgcccgcaagcccctcacctaccagacgaagcagctcatcgcccgcgagatcgaggtggagaagatgcggcgggcggaggcttctgcccgggtagagaacagcccccaggtggatgggagccccccagggctcgagggtctgctggggggcattggggagaaaggggtgcaccgacctgccccacgcaaccatgagcagcggctggagcacatcatgaggcgagcggcccgggaggaacagcctgagaaggacttctttggacgtgtggtcgtcaggagcacagcagtcccgagtgcaggggacacggccccggagcaggactcagtggagcggcgcatgggcacagcggtgggcaggagcgaggtctggttccgcttcaacgagggtgtctccaacgccgtgcggcgcagcctgtacatcagggacttgctctag

SEQ ID NO: 4184 - DNA, 4486 bp, Homo sapiens
  source 1..4486: mol_type = unassigned DNA
cttccggcgggggcggggaaagggcgcatttccaagggcccttctaggagaacagcgtgcggtctccatggtgccgggtcatccgagtcgggtcacgtggctggcgaaagccgtcgcggaggcgtggggaggagaaatgggcgggaggctgtggggatagcgagacacccagcgacgacgaggttgtcatggtgccgcggggccgtgctcgcgcatgcgccacctgacccacaggccggtcgtggagctgcgaccccggccctagggcagtccagatgaaaagagtaccaatgaatctgcctccagctgaataaaccatggagaggaaaaacccatccagagagagccccagaagactctctgccaaagtaggcaaaggcacagagatgaagaaagtggctcgtcagcttgggatggctgctgctgagtcagacaaggactctggcttttcagatgggagctcggaatgtctgagctctgcagagcagatggagtccgaggacatgctgagcgccttaggctggagcagagaagacaggccgaggcagaactccaaaactgcaaagaatgccttccctaccctgtctcccatggtcgtcatgaagaatgtgcttgtcaaacagggcagcagctcatcccagctccagtcgtggactgtccagccctcctttgaagtgatctcagcacagccacagctcttattccttcatccacctgtaccatctcctgtcagtccatgtcacactggtgagaaaaagtccgactccaggaactacttgcccattctgaattcttacaccaaaatagccccacatccaggcaaaaggggcctttcccttggcccagaagaaaaaggaacaagtggagtgcagaagaaaatctgtactgagagacttgggcctagcttgtcttccagtgagccaaccaaggctggtgctgtcccatccagtccctcgacgccagcaccacccagcgccaaacttgccgaggactcagctctgcagggtgtgccctctctggtggcaggtggaagtccacagactcttcagccggtatccagcagtcacgtggctaaagctcccagtctgaccttcgcttcccccgccagtcctgtctgcgcatcagacagcactctccatgggttagagagcaactctcccctttcaccactgtccgctaattatagctcacctttatgggctgcagagcacctctgccgcagcccagatatcttttcagagcagcggcagagcaaacataggcgctttcagaataccctagtagtcctacataaatctggtttgctggagatcactttgaaaaccaaggagttgattcgtcagaatcaggcaactcaggtagaactagaccagctaaaggagcaaacccagctgtttatagaagccaccaagagcagggcccctcaggcttgggccaagctgcaggcatctttaacacctgggtccagtaatacaggcagtgacctagaagcattctctgatcacccagccatatagcacagaggcatattttcctgttacttgagtggttcttttagctcatttgctgttacctactcctgtttcccaaagcttatgtaagagcttttccttctaaacttaaactgtgttgtggttcacttaggaagccacgtgccaatacctggctgctgtcttaactcgtagtctgggcacaggatacatatgtccccgtcccactgaggacctcagtttgggagtgcccttgagccccttttccttagcctgcaggtgcttcaatggatcatggggcaaagcaggagatgattgtgtggggctcttcctgctgtcacctcccatcatcccactctctcaccaggatcaagggtacagtaacacgaatgagcatacagagcaacacctgttgagccagggagtaggtgacacaaggaaaccttcatggatcttcccttgcctgtcttagtcacagagagaaataagaggaggttgtttgcatcccacaaggcatcgtactagttgggcgagacctaaaattccctgggcacaggttgcacctgggtgtgagcacttaatcactcaacgctttgttttcttacacttgaaaatcaagggaaagagtagtaccatctgactcctacactttcattacaagtcagatttttcttaaactagcaggcaaaaacagtacttccaaattttaaggtatggaatgaatgcagtacatctggaattgtagtcgatgaattgcttttttgacttagaagctgaagaaaatagacatagccggcatatctcatggtcaggagctggacgattctggtaacttaggctttttttctctcttcttttgaaacagtgtaacctgttttatgtctaaaaatcttaaggatagtttcagtggttcctgggatgtagtataagttaactctgctgccatcttgttttttttttttttcctttattttgataagtgattattatgcttgataaactttgaattaaatacagttgtcttgagggtatgataagtccacaaaaaattggaaagcatcttacccattttcttcacatcccaaatttttatttgttccatgtcatagtgatgggaagcagttacagagcagcgtcttctgtgtttccttcatgtgttagatattggcaacaaagccagaggtgtaatgttggttatatgaagttcatctcaaaatggagaccatgaccagagtttccagatgatacacgttcttttcagcttcattaaataggcaactatgtttctaaatagtaaagtttcaaaatattctctcaatttaaaatttcatcctcttgaaaatctttgttctttacaaaattatcttaataagttctatatggtcagcttcatcttccttttttttttttttgagatggagtttcgctcttgttgcccaggcggagtacaatggtgggatctcggctcactgcaacctccgcctcctgggttcaagtgattctcctgccacagcctcccaagtagctgggattacaggtgcctgccaccatgcccagctaatttttgtatttttagtagaaatggggttttaccgtgttggccaggctggtctcgaactcctgacctcagttgatccgcctgcctcagcctcccaaagtgctgggcttacaggcctgagccaccacgctcagctcagcttcaccctgtctgcaaagaaaagttttaccaagaccagaagttaaatatgacatttcctaggtagttgtaactctaacatagtttaaaaagtatgtggcttcagattgcctatactttgttcacaaacgtgtgatttagatatgactgatgtagaagtgaacaacttggtaacatccctagactccactcatgaacgcagaattattacctgctgtttgctttctgaaagaatttcagaaatcagagcaaatgtgtctttaggcagattcagctccttttaatatttttctcttggcccactctctttgcttcccctgaatctgtgtggtactatagcagctctactctgtgcaccatgctaggaagcttcctttttggcagaatatgtttggcagcaaagctatagagacaggtgcattcagaacatcctgggcaccagtcatgagtcttactgtgtcaaaaatctgaaaacacttgctgagaaccaaatttattccattggaaaaaccctctgtggagctataagcctcttggactcttcttcctagattaaggcttgcatttccctccctgtttcagtaaaagatgatgaaagccactatcaatcctcactgctgagtggcagggagaagcagcaccactctcagctcttttctaatcttgtaacttagtgctagaagtctctccaggctattaccatgggcatttgttctctgttggagctgtaagcagatgaacccaagtagagaagatagatcttggaaggagagatccattgagtccagaagccagatcagcaaatggaggaacctcggaggtgaccagaaagatctccatcggttgcccaaggctgtaagtagtgatggttttagcgatgaataacgtaattggctatgaagtactgtggcagagctgctgttttctgaaggtgagaagccatttttagctcagagcaacccttaagagaacttttggcagattttgttggcattattgaaatatatatagaaaagttgctgattgcaatggttatgggaatggaatttaatgacatttgtaatttattacactcattggtttttattgattatagtattgtctgactttttattttctactatggttcctttagcagaaaagtaacttttgtgcatatattgaagtggtttttcagctatgaattctttagggtagaaatttatttagcaaatgtgaattcttttgagaaagtatgaagttttgcagaaattgactgtgaaatgtcagagaaaaataaaagtcacttacttgaaaccta

SEQ ID NO: 4185 - DNA, 566 bp, Homo sapiens
  source 1..566: mol_type = unassigned DNA; mol_type = unassigned DNA
ttccaagggcccttctaggagaacagcgtgcggtctccatggtgccgggtcatccgagtcgggtcacgtggctggcgaaagccgtcgcggaggcgtggggaggagaaatgggcgggaggctgtggggatagcgagacacccagcgacgacgaggttgtcatggtgccgcggggccgtgctcgcgcatgcgccacctgacccacaggccggtcgtggagctgcgaccccggccctagggcagtccagatgaaaagagtaccaatgaatctgcctccagctgaataaaccatggagaggaaaaacccatccagagagagccccagaagactctctgccaaagtaggcaaaggcacagagatgaagaaagtggctcgtcagcttgggatggctgctgctgagtcagacaaggactctggcttttcagggcagcagctcatcccagctccagtcgtggactgtccagccctcctttgaagtgatctcagcacagccacagctcttattccttcatccacctgtaccatctcctgtcagtccatgtcacactggtgagaaaaagtccgact

SEQ ID NO: 4186 - DNA, 538 bp, Homo sapiens
  source 1..538: mol_type = unassigned DNA; mol_type = unassigned DNA
gagacacccagcgacgacgaggttgtcatggtgccgcggggccgtgctcgcgcatgcgccacctgacccacaggccggtcgtggagctgcgaccccggccctagggcagtccagatgaaaagagtaccaatgaatctgcctccagctgaataaaccatggagaggaaaaacccatccagagagagccccagaagactctctgccaaagtaggcaaaggcacagagatgaagaaagtggctcgtcagcttgggatggctgctgctgagtcagacaaggactctggcttttcaggttaaaaatatcttatccttcctctgttttgtgagtgaatgctttgcgtgaaaaatttcctccccaaaactcatttatgtgataaggatgggatgctttcacacacaggataaatacttacctgctttaaaatggtaattctgatgccatatgtcagggtacccatcaaagtcaccacagggttagttctgaaagaattatttaacatcttttttcaacttagactctgaatcttacacttccaac

SEQ ID NO: 4187 - DNA, 599 bp, Homo sapiens
  source 1..599: mol_type = unassigned DNA; mol_type = unassigned DNA
gtcatggtgccgcggggccgtgctcgcgcatgcgccacctgacccacaggccggtcgtggagctgcgaccccggccctagggcagtccagatgaaaagagtaccaatgaatctgcctccagctgaataaaccatggagaggaaaaacccatccagagagagccccagaagactctctgccaaagtaggcaaaggcacagagatgaagaaagtggctcgtcagcttgggatggctgctgctgagtcagacaaggactctggcttttcagatgggagctcggaatgtctgagctctgcagagcagatggagtccgaggacatgctgagcgccttaggctggagcagagaagacaggccgaggcagaactccaaaactgcaaagaatgccttccctaccctgtctcccatggtcgtcatgaagaatgtgcttgtcaaacagcagtaatgagtagtgtgctgctctcctcctttgtcttcagggcagcagctcatcccagctccagtcgtggactgtccagccctcctttgaagtgatctcagcacagccacagctcttattccttcatccacctgtaccatctcctgtcagtccatgtcaca

SEQ ID NO: 4188 - DNA, 584 bp, Homo sapiens
  source 1..584: mol_type = unassigned DNA; mol_type = unassigned DNA
tgcgccacctgacccacaggccggtcgtggagctgcgaccccggccctaggggaccagacgtggaggttagatcttaaggtgaccgtggtgtttggaaatgcagaatcttgaccttcaagctgttcagggcagtccagatgaaaagagtaccaatgaatctgcctccagctgaataaaccatggagaggaaaaacccatccagagagagccccagaagactctctgccaaagtaggcaaaggcacagagatgaagaaagtggctcgtcagcttgggatggctgctgctgagtcagacaaggactctggcttttcagatgggagctcggaatgtctgagctctgcagagcagatggagtccgaggacatgctgagcgccttaggctggagcagagaagacaggccgaggcagaactccaaaactgcaaagaatgccttccctaccctgtctcccatggtcgtcatgaagaatgtgcttgtcaaacagggcagcagctcatcccagctccagtcgtggactgtccagccctcctttgaagtgatctcagcacagccacagctcttattccttcatccacctgtacc

SEQ ID NO: 4189 - DNA, 882 bp, Homo sapiens
  source 1..882: mol_type = unassigned DNA; mol_type = unassigned DNA
gaaagggagggctcggtccgggaggaggggagcagggatgacggcgggagagggattgggcgaggagcgtggggaaaggaggtggaagtaggggagagaggaagaggagcgagtaggcaagaggggcaaaccgggactttcggaggacggagagccaaatggtgggagcagggctttggtttgctgtgaggggcgtgggagagggaatcgcgggtgaggagggggctgcgtgtggggaggaggcttgtgtgaggggcaggtgggccctggtctagccctgggcgcaaccgccagccggctgggcggggagagagcttggagtccagcccggctgggagctgagggccaagcaatgggcagggcagtccagatgaaaagagtaccaatgaatctgcctccagctgaataaaccatggagaggaaaaacccatccagagagagccccagaagactctctgccaaagtaggcaaaggcacagagatgaagaaagtggctcgtcagcttgggatggctgctgctgagtcagacaaggactctggcttttcagatgggagctcggaatgtctgagctctgcagagcagatggagtccgaggacatgctgagcgccttaggctggagcagagaagacaggccgaggcagaactccaaaactgcaaagaatgccttccctaccctgtctcccatggtcgtcatgaagaatgtgcttgtcaaacagggcagcagctcatcccagctccagtcgtggactgtccagccctcctttgaagtgatctcagcacagccacagctcttattccttcatccacctgtaccatctcctgtcagtccatgtcacactggtgagaaaaagtccgactccaggaactacttgcccattct

SEQ ID NO: 4190 - DNA, 596 bp, Homo sapiens
  source 1..596: mol_type = unassigned DNA; mol_type = unassigned DNA
agttttgccctgctgagctggcaggctggtggatgcctggagggtgcacatgctgcctggcacagatgcaacgtgggctggtgcgaatggggcagtccagatgaaaagagtaccaatgaatctgcctccagctgaataaaccatggagaggaaaaacccatccagagagagccccagaagactctctgccaaagtaggcaaaggcacagagatgaagaaagtggctcgtcagcttgggatggctgctgctgagtcagacaaggactctggcttttcagatgggagctcggaatgtctgagctctgcagagcagatggagtccgaggacatgctgagcgccttaggctggagcagagaagacaggccgaggcagaactccaaaactgcaaagaatgccttccctaccctgtctcccatggtcgtcatgaagaatgtgcttgtcaaacagggcagcagctcatcccagctccagtcgtggactgtccagccctcctttgaagtgatctcagcacagccacagctcttattccttcatccacctgtaccatctcctgtcagtccatgtcacactggtgagaaaaagtccgactccagga

SEQ ID NO: 4191 - DNA, 581 bp, Homo sapiens
  source 1..581: mol_type = unassigned DNA; mol_type = unassigned DNA
agatgcaacgtgggctggtgcgaatgggggaccagacgtggaggttagatcttaaggtgaccgtggtgtttggaaatgcagaatcttgaccttcaagctgttcagggcagtccagatgaaaagagtaccaatgaatctgcctccagctgaataaaccatggagaggaaaaacccatccagagagagccccagaagactctctgccaaagtaggcaaaggcacagagatgaagaaagtggctcgtcagcttgggatggctgctgctgagtcagacaaggactctggcttttcagatgggagctcggaatgtctgagctctgcagagcagatggagtccgaggacatgctgagcgccttaggctggagcagagaagacaggccgaggcagaactccaaaactgcaaagaatgccttccctaccctgtctcccatggtcgtcatgaagaatgtgcttgtcaaacagggcagcagctcatcccagctccagtcgtggactgtccagccctcctttgaagtgatctcagcacagccacagctcttattccttcatccacctgtaccatctcctgtcagtccatgtc

SEQ ID NO: 4192 - DNA, 8708 bp, Homo sapiens
  source 1..8708: mol_type = unassigned DNA; mol_type = unassigned DNA
ggcgcggggcggaacagatcgcagacctgggggttcgcagagccgccagtggggagatgttgaagttcaaatatggagcgcggaatcctttggatgctggtgctgctgaacccattgccagccgggcctccaggctgaatctgttcttccaggggaaaccaccctttatgactcaacagcagatgtctcctctttcccgagaagggatattagatgccctctttgttctctttgaagaatgcagtcagcctgctctgatgaagattaagcacgtgagcaactttgtccggaagtattccgacaccatagctgagttacaggagctccagccttcggcaaaggacttcgaagtcagaagtcttgtaggttgtggtcactttgctgaagtgcaggtggtaagagagaaagcaaccggggacatctatgctatgaaagtgatgaagaagaaggctttattggcccaggagcaggtttcattttttgaggaagagcggaacatattatctcgaagcacaagcccgtggatcccccaattacagtatgcctttcaggacaaaaatcacctttatctggtcatggaatatcagcctggaggggacttgctgtcacttttgaatagatatgaggaccagttagatgaaaacctgatacagttttacctagctgagctgattttggctgttcacagcgttcatctgatgggatacgtgcatcgagacatcaagcctgagaacattctcgttgaccgcacaggacacatcaagctggtggattttggatctgccgcgaaaatgaattcaaacaagatggtgaatgccaaactcccgattgggaccccagattacatggctcctgaagtgctgactgtgatgaacggggatggaaaaggcacctacggcctggactgtgactggtggtcagtgggcgtgattgcctatgagatgatttatgggagatcccccttcgcagagggaacctctgccagaaccttcaataacattatgaatttccagcggtttttgaaatttccagatgaccccaaagtgagcagtgactttcttgatctgattcaaagcttgttgtgcggccagaaagagagactgaagtttgaaggtctttgctgccatcctttcttctctaaaattgactggaacaacattcgtaactctcctccccccttcgttcccaccctcaagtctgacgatgacacctccaattttgatgaaccagagaagaattcgtgggtttcatcctctccgtgccagctgagcccctcaggcttctcgggtgaagaactgccgtttgtggggttttcgtacagcaaggcactggggattcttggtagatctgagtctgttgtgtcgggtctggactcccctgccaagactagctccatggaaaagaaacttctcatcaaaagcaaagagctacaagactctcaggacaagtgtcacaagatggagcaggaaatgacccggttacatcggagagtgtcagaggtggaggctgtgcttagtcagaaggaggtggagctgaaggcctctgagactcagagatccctcctggagcaggaccttgctacctacatcacagaatgcagtagcttaaagcgaagtttggagcaagcacggatggaggtgtcccaggaggatgacaaagcactgcagcttctccatgatatcagagagcagagccggaagctccaagaaatcaaagagcaggagtaccaggctcaagtggaagaaatgaggttgatgatgaatcagttggaagaggatcttgtctcagcaagaagacggagtgatctctacgaatctgagctgagagagtctcggcttgctgctgaagaattcaagcggaaagcgacagaatgtcagcataaactgttgaaggctaaggatcaagggaagcctgaagtgggagaatatgcgaaactggagaagatcaatgctgagcagcagctcaaaattcaggagctccaagagaaactggagaaggctgtaaaagccagcacggaggccaccgagctgctgcagaatatccgccaggcaaaggagcgagccgagagggagctggagaagctgcagaaccgagaggattcttctgaaggcatcagaaagaagctggtggaagctgaggaacgccgccattctctggagaacaaggtaaagagactagagaccatggagcgtagagaaaacagactgaaggatgacatccagacaaaatcccaacagatccagcagatggctgataaaattctggagctcgaagagaaacatcgggaggcccaagtctcagcccagcacctagaagtgcacctgaaacagaaagagcagcactatgaggaaaagattaaagtgttggacaatcagataaagaaagacctggctgacaaggagacactggagaacatgatgcagagacacgaggaggaggcccatgagaagggcaaaattctcagcgaacagaaggcgatgatcaatgctatggattccaagatcagatccctggaacagaggattgtggaactgtctgaagccaataaacttgcagcaaatagcagtctttttacccaaaggaacatgaaggcccaagaagagatgatttctgaactcaggcaacagaaattttacctggagacacaggctgggaagttggaggcccagaaccgaaaactggaggagcagctggagaagatcagccaccaagaccacagtgacaagaatcggctgctggaactggagacaagattgcgggaggtcagtctagagcacgaggagcagaaactggagctcaagcgccagctcacagagctacagctctccctgcaggagcgcgagtcacagttgacagccctgcaggctgcacgggcggccctggagagccagcttcgccaggcgaagacagagctggaagagaccacagcagaagctgaagaggagatccaggcactcacggcacatagagatgaaatccagcgcaaatttgatgctcttcgtaacagctgtactgtaatcacagacctggaggagcagctaaaccagctgaccgaggacaacgctgaactcaacaaccaaaacttctacttgtccaaacaactcgatgaggcttctggcgccaacgacgagattgtacaactgcgaagtgaagtggaccatctccgccgggagatcacggaacgagagatgcagcttaccagccagaagcaaacgatggaggctctgaagaccacgtgcaccatgctggaggaacaggtcatggatttggaggccctaaacgatgagctgctagaaaaagagcggcagtgggaggcctggaggagcgtcctgggtgatgagaaatcccagtttgagtgtcgggttcgagagctgcagagaatgctggacaccgagaaacagagcagggcgagagccgatcagcggatcaccgagtctcgccaggtggtggagctggcagtgaaggagcacaaggctgagattctcgctctgcagcaggctctcaaagagcagaagctgaaggccgagagcctctctgacaagctcaatgacctggagaagaagcatgctatgcttgaaatgaatgcccgaagcttacagcagaagctggagactgaacgagagctcaaacagaggcttctggaagagcaagccaaattacagcagcagatggacctgcagaaaaatcacattttccgtctgactcaaggactgcaagaagctctagatcgggctgatctactgaagacagaaagaagtgacttggagtatcagctggaaaacattcaggttctctattctcatgaaaaggtgaaaatggaaggcactatttctcaacaaaccaaactcattgattttctgcaagccaaaatggaccaacctgctaaaaagaaaaagggtttatttagtcgacggaaagaggaccctgctttacccacacaggttcctctgcagtacaatgagctgaagctggccctggagaaggagaaagctcgctgtgcagagctagaggaagcccttcagaagacccgcatcgagctccggtccgcccgggaggaagctgcccaccgcaaagcaacggaccacccacacccatccacgccagccaccgcgaggcagcagatcgccatgtccgccatcgtgcggtcgccagagcaccagcccagtgccatgagcctgctggccccgccatccagccgcagaaaggagtcttcaactccagaggaatttagtcggcgtcttaaggaacgcatgcaccacaatattcctcaccgattcaacgtaggactgaacatgcgagccacaaagtgtgctgtgtgtctggataccgtgcactttggacgccaggcatccaaatgtctcgaatgtcaggtgatgtgtcaccccaagtgctccacgtgcttgccagccacctgcggcttgcctgctgaatatgccacacacttcaccgaggccttctgccgtgacaaaatgaactccccaggtctccagaccaaggagcccagcagcagcttgcacctggaagggtggatgaaggtgcccaggaataacaaacgaggacagcaaggctgggacaggaagtacattgtcctggagggatcaaaagtcctcatttatgacaatgaagccagagaagctggacagaggccggtggaagaatttgagctgtgccttcccgacggggatgtatctattcatggtgccgttggtgcttccgaactcgcaaatacagccaaagcagatgtcccatacatactgaagatggaatctcacccgcacaccacctgctggcccgggagaaccctctacttgctagctcccagcttccctgacaaacagcgctgggtcaccgccttagaatcagttgtcgcaggtgggagagtttctagggaaaaagcagaagctgatgctaaactgcttggaaactccctgctgaaactggaaggtgatgaccgtctagacatgaactgcacgctgcccttcagtgaccaggtggtgttggtgggcaccgaggaagggctctacgccctgaatgtcttgaaaaactccctaacccatgtcccaggaattggagcagtcttccaaatttatattatcaaggacctggagaagctactcatgatagcaggagaagagcgggcactgtgtcttgtggacgtgaagaaagtgaaacagtccctggcccagtcccacctgcctgcccagcccgacatctcacccaacatttttgaagctgtcaagggctgccacttgtttggggcaggcaagattgagaacgggctctgcatctgtgcagccatgcccagcaaagtcgtcattctccgctacaacgaaaacctcagcaaatactgcatccggaaagagatagagacctcagagccctgcagctgtatccacttcaccaattacagtatcctcattggaaccaataaattctacgaaatcgacatgaagcagtacacgctcgaggaattcctggataagaatgaccattccttggcacctgctgtgtttgccgcctcttccaacagcttccctgtctcaatcgtgcaggtgaacagcgcagggcagcgagaggagtacttgctgtgtttccacgaatttggagtgttcgtggattcttacggaagacgtagccgcacagacgatctcaagtggagtcgcttacctttggcctttgcctacagagaaccctatctgtttgtgacccacttcaactcactcgaagtaattgagatccaggcacgctcctcagcagggacccctgcccgagcgtacctggacatcccgaacccgcgctacctgggccctgccatttcctcaggagcgatttacttggcgtcctcataccaggataaattaagggtcatttgctgcaagggaaacctcgtgaaggagtccggcactgaacaccaccggggcccgtccacctcccgcagcagccccaacaagcgaggcccacccacgtacaacgagcacatcaccaagcgcgtggcctccagcccagcgccgcccgaaggccccagccacccgcgagagccaagcacaccccaccgctaccgcgaggggcggaccgagctgcgcagggacaagtctcctggccgccccctggagcgagagaagtcccccggccggatgctcagcacgcggagagagcggtcccccgggaggctgtttgaagacagcagcaggggccggctgcctgcgggagccgtgaggaccccgctgtcccaggtgaacaaggtctgggaccagtcttcagtataaatctcagccagaaaaaccaactcctcatcttgatctgcaggaaaacaccaaacacactatggaactctgctgatggggacccaagcgcccacgtgctcagccaccctctggctcagcggggcccagacccacctcggcacggacacccctgtctccaggaggggcaggtggctgaggctcttcggagctgtcagcgcccggtgcctgccctgggcacctccctgcagtcatctctttgcactttgttactctttcaaagcattcacaaacttttgtacctagctctagcctgtaccagttagttcatcaaaggaaaccaaccgggatgctaactacaacatggttagaatcctaattagctactttaagatcctaggattggttggtttttcttttttttttctctttgtttctttcctttttttttttttttttttaagacaacagaattcttaatagatttgaatagcgacgtatttcctgttgtagtcatttttagctcgaccacatcatcaggtctttgccaccgaggcatagtgtagaacagtcccggtcagttggccaacctcccgcagccaagtaggttcatccttgttcctgttcattctcatagatggccctgctttccccagggtgacatcgtagccaaatgtttactgttttcattgccttttatggccttgacgacttcccctcccaccagctgagaatgtatggaggtcatcggggcctcagctcggaggcagtgacttggggccaagggacctcgagacgctttccttccccaccccccagcgtcatctccccagcctgctgttcccgctttccatatagctttggccaggaaagcatgcaatagacttgctcggagcccagcactcctgggtctcggggtcggggaggggacgggggcacccacttccttgtctgtgacggcgtgttgttccccactctgggatggggaagaggcccgtcgggagttctgcatggcagttcactgcatgtgctgcccccttgggttgctctgccaatgtattaataccatcccatagctcctgccaaatcgagaccctctgacgacttgccgactaactggccaccacaagctgcagtctgtagcactgaacaaacaaaaaacaaaacgctcaagccttacgaccagagaaggatttcagcaaaccaccacctcccactcagtgtcccctccaaacttcacacttccctgcctgcagaggatgactctgttcacacccaatccagcgcggttctaccccacgaaactgtgactttccaaatgagcctttccctagggctagacctaagaccaggaagtttgagaaagcagccgcagctcaactcttccagctccgccagggttgggaagtccttaggtgcagtgcggctcccactgggtctgcggaccctcctattagagtacgaaattcctggcaactggtacagaaccaacctagaggctttgcagttggcaagctaactcgcggccttatttctgcctttaatctcccacaaggcatctgttgctttgggtcctccacgactcttaggcccgcctcaacaacccaggcacctcctaggtaggctcaaaggtagacccgtttccaccgcagcaggtgaacatgaccgtgttttcaactgtgtccacagttcagatccctttccagattgcaacctggcctgcatcccagctccttcctgctcgtgtcttaacctaagtgctttcttgtttgaaacgcctacaaacctccatgtggtagctcctttggcaaatgtcctgctgtggcgttttatgtgttgcttggagtctgtggggtcgtactccctcccctcccgtccccagggcagatttgattgaatgtttgctgaagttttgtctcttggtccacagtatttggaaaggtcactgaaaatgggtctttcagtcttggcatttcatttaggatctccatgagaaatgggcttcttgagccctgaaaatgtatattgtgtgtctcatctgtgaactgctttctgctatatagaactagctcaaaagactgtacatatttacaagaaactttatattcgtaaaaaaaaaaagaggaaattgaattggtttctacttttttattgtaaaaggtgcatttttcaacacttacttttggtttcaatggtggtagttgtggacagccatcttcactggagggtggggagctccgtgtgaccaccaagatgccagcaggatataccgtaacacgaaattgctgtcaaaagcttattagcatcaatcaagattctaggtctccaaaagtacaggctttttcttcattaccttttttattcagaacgaggaagagaacacaaggaatgattcaagatccaccttgagaggaatgaactttgttgttgaacaattagtgaaataaagcaatgatctaaactaat

SEQ ID NO: 4193 - DNA, 8578 bp, Homo sapiens
  source 1..8578: mol_type = unassigned DNA; mol_type = unassigned DNA
gcggggcggaacagatcgcagacctgggggttcgcagagccgccagtggggagatgttgaagttcaaatatggagcgcggaatcctttggatgctggtgctgctgaacccattgccagccgggcctccaggctgaatctgttcttccaggggaaaccaccctttatgactcaacagcagatgtctcctctttcccgagaagggatattagatgccctctttgttctctttgaagaatgcagtcagcctgctctgatgaagattaagcacgtgagcaactttgtccggaagtattccgacaccatagctgagttacaggagctccagccttcggcaaaggacttcgaagtcagaagtcttgtaggttgtggtcactttgctgaagtgcaggtggtaagagagaaagcaaccggggacatctatgctatgaaagtgatgaagaagaaggctttattggcccaggagcaggtttcattttttgaggaagagcggaacatattatctcgaagcacaagcccgtggatcccccaattacagtatgcctttcaggacaaaaatcacctttatctggtcatggaatatcagcctggaggggacttgctgtcacttttgaatagatatgaggaccagttagatgaaaacctgatacagttttacctagctgagctgattttggctgttcacagcgttcatctgatgggatacgtgcatcgagacatcaagcctgagaacattctcgttgaccgcacaggacacatcaagctggtggattttggatctgccgcgaaaatgaattcaaacaagatggtgaatgccaaactcccgattgggaccccagattacatggctcctgaagtgctgactgtgatgaacggggatggaaaaggcacctacggcctggactgtgactggtggtcagtgggcgtgattgcctatgagatgatttatgggagatcccccttcgcagagggaacctctgccagaaccttcaataacattatgaatttccagcggtttttgaaatttccagatgaccccaaagtgagcagtgactttcttgatctgattcaaagcttgttgtgcggccagaaagagagactgaagtttgaaggtctttgctgccatcctttcttctctaaaattgactggaacaacattcgtaactctcctccccccttcgttcccaccctcaagtctgacgatgacacctccaattttgatgaaccagagaagaattcgtgggtttcatcctctccgtgccagctgagcccctcaggcttctcgggtgaagaactgccgtttgtggggttttcgtacagcaaggcactggggattcttggtagatctgagtctgttgtgtcgggtctggactcccctgccaagactagctccatggaaaagaaacttctcatcaaaagcaaagagctacaagactctcaggacaagtgtcacaagatggagcaggaaatgacccggttacatcggagagtgtcagaggtggaggctgtgcttagtcagaaggaggtggagctgaaggcctctgagactcagagatccctcctggagcaggaccttgctacctacatcacagaatgcagtagcttaaagcgaagtttggagcaagcacggatggaggtgtcccaggaggatgacaaagcactgcagcttctccatgatatcagagagcagagccggaagctccaagaaatcaaagagcaggagtaccaggctcaagtggaagaaatgaggttgatgatgaatcagttggaagaggatcttgtctcagcaagaagacggagtgatctctacgaatctgagctgagagagtctcggcttgctgctgaagaattcaagcggaaagcgacagaatgtcagcataaactgttgaaggctaaggatcaagggaagcctgaagtgggagaatatgcgaaactggagaagatcaatgctgagcagcagctcaaaattcaggagctccaagagaaactggagaaggctgtaaaagccagcacggaggccaccgagctgctgcagaatatccgccaggcaaaggagcgagccgagagggagctggagaagctgcagaaccgagaggattcttctgaaggcatcagaaagaagctggtggaagctgaggagctcgaagagaaacatcgggaggcccaagtctcagcccagcacctagaagtgcacctgaaacagaaagagcagcactatgaggaaaagattaaagtgttggacaatcagataaagaaagacctggctgacaaggagacactggagaacatgatgcagagacacgaggaggaggcccatgagaagggcaaaattctcagcgaacagaaggcgatgatcaatgctatggattccaagatcagatccctggaacagaggattgtggaactgtctgaagccaataaacttgcagcaaatagcagtctttttacccaaaggaacatgaaggcccaagaagagatgatttctgaactcaggcaacagaaattttacctggagacacaggctgggaagttggaggcccagaaccgaaaactggaggagcagctggagaagatcagccaccaagaccacagtgacaagaatcggctgctggaactggagacaagattgcgggaggtcagtctagagcacgaggagcagaaactggagctcaagcgccagctcacagagctacagctctccctgcaggagcgcgagtcacagttgacagccctgcaggctgcacgggcggccctggagagccagcttcgccaggcgaagacagagctggaagagaccacagcagaagctgaagaggagatccaggcactcacggcacatagagatgaaatccagcgcaaatttgatgctcttcgtaacagctgtactgtaatcacagacctggaggagcagctaaaccagctgaccgaggacaacgctgaactcaacaaccaaaacttctacttgtccaaacaactcgatgaggcttctggcgccaacgacgagattgtacaactgcgaagtgaagtggaccatctccgccgggagatcacggaacgagagatgcagcttaccagccagaagcaaacgatggaggctctgaagaccacgtgcaccatgctggaggaacaggtcatggatttggaggccctaaacgatgagctgctagaaaaagagcggcagtgggaggcctggaggagcgtcctgggtgatgagaaatcccagtttgagtgtcgggttcgagagctgcagagaatgctggacaccgagaaacagagcagggcgagagccgatcagcggatcaccgagtctcgccaggtggtggagctggcagtgaaggagcacaaggctgagattctcgctctgcagcaggctctcaaagagcagaagctgaaggccgagagcctctctgacaagctcaatgacctggagaagaagcatgctatgcttgaaatgaatgcccgaagcttacagcagaagctggagactgaacgagagctcaaacagaggcttctggaagagcaagccaaattacagcagcagatggacctgcagaaaaatcacattttccgtctgactcaaggactgcaagaagctctagatcgggctgatctactgaagacagaaagaagtgacttggagtatcagctggaaaacattcaggttctctattctcatgaaaaggtgaaaatggaaggcactatttctcaacaaaccaaactcattgattttctgcaagccaaaatggaccaacctgctaaaaagaaaaagggtttatttagtcgacggaaagaggaccctgctttacccacacaggttcctctgcagtacaatgagctgaagctggccctggagaaggagaaagctcgctgtgcagagctagaggaagcccttcagaagacccgcatcgagctccggtccgcccgggaggaagctgcccaccgcaaagcaacggaccacccacacccatccacgccagccaccgcgaggcagcagatcgccatgtccgccatcgtgcggtcgccagagcaccagcccagtgccatgagcctgctggccccgccatccagccgcagaaaggagtcttcaactccagaggaatttagtcggcgtcttaaggaacgcatgcaccacaatattcctcaccgattcaacgtaggactgaacatgcgagccacaaagtgtgctgtgtgtctggataccgtgcactttggacgccaggcatccaaatgtctcgaatgtcaggtgatgtgtcaccccaagtgctccacgtgcttgccagccacctgcggcttgcctgctgaatatgccacacacttcaccgaggccttctgccgtgacaaaatgaactccccaggtctccagaccaaggagcccagcagcagcttgcacctggaagggtggatgaaggtgcccaggaataacaaacgaggacagcaaggctgggacaggaagtacattgtcctggagggatcaaaagtcctcatttatgacaatgaagccagagaagctggacagaggccggtggaagaatttgagctgtgccttcccgacggggatgtatctattcatggtgccgttggtgcttccgaactcgcaaatacagccaaagcagatgtcccatacatactgaagatggaatctcacccgcacaccacctgctggcccgggagaaccctctacttgctagctcccagcttccctgacaaacagcgctgggtcaccgccttagaatcagttgtcgcaggtgggagagtttctagggaaaaagcagaagctgatgctaaactgcttggaaactccctgctgaaactggaaggtgatgaccgtctagacatgaactgcacgctgcccttcagtgaccaggtggtgttggtgggcaccgaggaagggctctacgccctgaatgtcttgaaaaactccctaacccatgtcccaggaattggagcagtcttccaaatttatattatcaaggacctggagaagctactcatgatagcaggagaagagcgggcactgtgtcttgtggacgtgaagaaagtgaaacagtccctggcccagtcccacctgcctgcccagcccgacatctcacccaacatttttgaagctgtcaagggctgccacttgtttggggcaggcaagattgagaacgggctctgcatctgtgcagccatgcccagcaaagtcgtcattctccgctacaacgaaaacctcagcaaatactgcatccggaaagagatagagacctcagagccctgcagctgtatccacttcaccaattacagtatcctcattggaaccaataaattctacgaaatcgacatgaagcagtacacgctcgaggaattcctggataagaatgaccattccttggcacctgctgtgtttgccgcctcttccaacagcttccctgtctcaatcgtgcaggtgaacagcgcagggcagcgagaggagtacttgctgtgtttccacgaatttggagtgttcgtggattcttacggaagacgtagccgcacagacgatctcaagtggagtcgcttacctttggcctttgcctacagagaaccctatctgtttgtgacccacttcaactcactcgaagtaattgagatccaggcacgctcctcagcagggacccctgcccgagcgtacctggacatcccgaacccgcgctacctgggccctgccatttcctcaggagcgatttacttggcgtcctcataccaggataaattaagggtcatttgctgcaagggaaacctcgtgaaggagtccggcactgaacaccaccggggcccgtccacctcccgcagcagccccaacaagcgaggcccacccacgtacaacgagcacatcaccaagcgcgtggcctccagcccagcgccgcccgaaggccccagccacccgcgagagccaagcacaccccaccgctaccgcgaggggcggaccgagctgcgcagggacaagtctcctggccgccccctggagcgagagaagtcccccggccggatgctcagcacgcggagagagcggtcccccgggaggctgtttgaagacagcagcaggggccggctgcctgcgggagccgtgaggaccccgctgtcccaggtgaacaaggtctgggaccagtcttcagtataaatctcagccagaaaaaccaactcctcatcttgatctgcaggaaaacaccaaacacactatggaactctgctgatggggacccaagcgcccacgtgctcagccaccctctggctcagcggggcccagacccacctcggcacggacacccctgtctccaggaggggcaggtggctgaggctcttcggagctgtcagcgcccggtgcctgccctgggcacctccctgcagtcatctctttgcactttgttactctttcaaagcattcacaaacttttgtacctagctctagcctgtaccagttagttcatcaaaggaaaccaaccgggatgctaactacaacatggttagaatcctaattagctactttaagatcctaggattggttggtttttcttttttttttctctttgtttctttcctttttttttttttttttttaagacaacagaattcttaatagatttgaatagcgacgtatttcctgttgtagtcatttttagctcgaccacatcatcaggtctttgccaccgaggcatagtgtagaacagtcccggtcagttggccaacctcccgcagccaagtaggttcatccttgttcctgttcattctcatagatggccctgctttccccagggtgacatcgtagccaaatgtttactgttttcattgccttttatggccttgacgacttcccctcccaccagctgagaatgtatggaggtcatcggggcctcagctcggaggcagtgacttggggccaagggacctcgagacgctttccttccccaccccccagcgtcatctccccagcctgctgttcccgctttccatatagctttggccaggaaagcatgcaatagacttgctcggagcccagcactcctgggtctcggggtcggggaggggacgggggcacccacttccttgtctgtgacggcgtgttgttccccactctgggatggggaagaggcccgtcgggagttctgcatggcagttcactgcatgtgctgcccccttgggttgctctgccaatgtattaataccatcccatagctcctgccaaatcgagaccctctgacgacttgccgactaactggccaccacaagctgcagtctgtagcactgaacaaacaaaaaacaaaacgctcaagccttacgaccagagaaggatttcagcaaaccaccacctcccactcagtgtcccctccaaacttcacacttccctgcctgcagaggatgactctgttcacacccaatccagcgcggttctaccccacgaaactgtgactttccaaatgagcctttccctagggctagacctaagaccaggaagtttgagaaagcagccgcagctcaactcttccagctccgccagggttgggaagtccttaggtgcagtgcggctcccactgggtctgcggaccctcctattagagtacgaaattcctggcaactggtacagaaccaacctagaggctttgcagttggcaagctaactcgcggccttatttctgcctttaatctcccacaaggcatctgttgctttgggtcctccacgactcttaggcccgcctcaacaacccaggcacctcctaggtaggctcaaaggtagacccgtttccaccgcagcaggtgaacatgaccgtgttttcaactgtgtccacagttcagatccctttccagattgcaacctggcctgcatcccagctccttcctgctcgtgtcttaacctaagtgctttcttgtttgaaacgcctacaaacctccatgtggtagctcctttggcaaatgtcctgctgtggcgttttatgtgttgcttggagtctgtggggtcgtactccctcccctcccgtccccagggcagatttgattgaatgtttgctgaagttttgtctcttggtccacagtatttggaaaggtcactgaaaatgggtctttcagtcttggcatttcatttaggatctccatgagaaatgggcttcttgagccctgaaaatgtatattgtgtgtctcatctgtgaactgctttctgctatatagaactagctcaaaagactgtacatatttacaagaaactttatattcgtaaaaaaaaaaagaggaaattgaattggtttctacttttttattgtaaaaggtgcatttttcaacacttacttttggtttcaatggtggtagttgtggacagccatcttcactggagggtggggagctccgtgtgaccaccaagatgccagcaggatataccgtaacacgaaattgctgtcaaaagcttattagcatcaatcaagattctaggtctccaaaagtacaggctttttcttcattaccttttttattcagaacgaggaagagaacacaaggaatgattcaagatccaccttgagaggaatgaactttgttgttgaacaattagtgaaataaagcaatgatctaaactaa

SEQ ID NO: 4194 - DNA, 8520 bp, Homo sapiens
  source 1..8520: mol_type = unassigned DNA; mol_type = unassigned DNA
ctggcccctggcaggcaggcggcagccaggtggggttccagccagagcacgcacgcacggagccgggagcatgcagcctgcactgcgggggatgtgatgctcggctctaactcgcctggctggcccgccacggacgcctcagcttgcaaccatggtaacgtttctggcgggggacacccccgggagcccaccgcgatgggcagcctcctggtgactgatggacgagtgtccacctcccagaccgagagcgcttagtaggtcggaggaagtggagaggatgtaacacgcccccagccgggagtgaagccctgaggaggtaggagccgcatatgtccatccgtgcattcccaccgtcagcgcgcaggggtgctgtagatcaccgctcctccccccttcgttcccaccctcaagtctgacgatgacacctccaattttgatgaaccagagaagaattcgtgggtttcatcctctccgtgccagctgagcccctcaggcttctcgggtgaagaactgccgtttgtggggttttcgtacagcaaggcactggggattcttggtagatctgagtctgttgtgtcgggtctggactcccctgccaagactagctccatggaaaagaaacttctcatcaaaagcaaagagctacaagactctcaggacaagtgtcacaaggtatttatttccgcagccggcctccttccttgctccaggatcctcccgtccgtatatgccaagggatccgcccggggccgctgctggctctgagccgcctgatccgtagagagtgaggcgctcctgccttcgctgaagtcgcgcctccagcagctcagagggagatgaattcgggccttgctgttgctgtaaatcctttaaatctaaaccagaggaggccctggatttaaacagtccgtttctcagcatgacccagccagatgtctgcttcttccggcaggtggcctgggtcctcacctgtggctgagatacatcccatctgctttgagtgatgcgaagtctctcttcctagtcttttaaaactcctgcttatgtcactgcggccactgtgttgattacgctcaacgtctcttaacattcactgttcctgcccagaggcaacgctctggaaactaataagtcactgcttgcctgggactcctaagagtgcagacgaataaatatctccttgccctgtcctggatttgtcctctagatctttgcaaggagatggggggggatcaagatggatttgggataaaattaaagtgacgtctgcaaaaacaaaacaaaaacaaaagcaaacaggtgaaaaatgatgattgtggcttccttgctaactgggttagagaagtgatcaagtgtgaaccgggacttgaatgagaggagtgacttagcatttggtgactgtccttaacgaagaactgtgcgctcctgggcgaagaaacaatgatggagcaggaaatgacccggttacatcggagagtgtcagaggtggaggctgtgcttagtcagaaggaggtggagctgaaggcctctgagactcagagatccctcctggagcaggaccttgctacctacatcacagaatgcagtagcttaaagcgaagtttggagcaagcacggatggaggtgtcccaggaggatgacaaagcactgcagcttctccatgatatcagagagcagagccggaagctccaagaaatcaaagagcaggagtaccaggctcaagtggaagaaatgaggttgatgatgaatcagttggaagaggatcttgtctcagcaagaagacggagtgatctctacgaatctgagctgagagagtctcggcttgctgctgaagaattcaagcggaaagcgacagaatgtcagcataaactgttgaaggctaaggatcaagggaagcctgaagtgggagaatatgcgaaactggagaagatcaatgctgagcagcagctcaaaattcaggagctccaagagaaactggagaaggctgtaaaagccagcacggaggccaccgagctgctgcagaatatccgccaggcaaaggagcgagccgagagggagctggagaagctgcagaaccgagaggattcttctgaaggcatcagaaagaagctggtggaagctgaggagctcgaagagaaacatcgggaggcccaagtctcagcccagcacctagaagtgcacctgaaacagaaagagcagcactatgaggaaaagattaaagtgttggacaatcagataaagaaagacctggctgacaaggagacactggagaacatgatgcagagacacgaggaggaggcccatgagaagggcaaaattctcagcgaacagaaggcgatgatcaatgctatggattccaagatcagatccctggaacagaggattgtggaactgtctgaagccaataaacttgcagcaaatagcagtctttttacccaaaggaacatgaaggcccaagaagagatgatttctgaactcaggcaacagaaattttacctggagacacaggctgggaagttggaggcccagaaccgaaaactggaggagcagctggagaagatcagccaccaagaccacagtgacaagaatcggctgctggaactggagacaagattgcgggaggtcagtctagagcacgaggagcagaaactggagctcaagcgccagctcacagagctacagctctccctgcaggagcgcgagtcacagttgacagccctgcaggctgcacgggcggccctggagagccagcttcgccaggcgaagacagagctggaagagaccacagcagaagctgaagaggagatccaggcactcacggcacatagagatgaaatccagcgcaaatttgatgctcttcgtaacagctgtactgtaatcacagacctggaggagcagctaaaccagctgaccgaggacaacgctgaactcaacaaccaaaacttctacttgtccaaacaactcgatgaggcttctggcgccaacgacgagattgtacaactgcgaagtgaagtggaccatctccgccgggagatcacggaacgagagatgcagcttaccagccagaagcaaacgatggaggctctgaagaccacgtgcaccatgctggaggaacaggtcatggatttggaggccctaaacgatgagctgctagaaaaagagcggcagtgggaggcctggaggagcgtcctgggtgatgagaaatcccagtttgagtgtcgggttcgagagctgcagagaatgctggacaccgagaaacagagcagggcgagagccgatcagcggatcaccgagtctcgccaggtggtggagctggcagtgaaggagcacaaggctgagattctcgctctgcagcaggctctcaaagagcagaagctgaaggccgagagcctctctgacaagctcaatgacctggagaagaagcatgctatgcttgaaatgaatgcccgaagcttacagcagaagctggagactgaacgagagctcaaacagaggcttctggaagagcaagccaaattacagcagcagatggacctgcagaaaaatcacattttccgtctgactcaaggactgcaagaagctctagatcgggctgatctactgaagacagaaagaagtgacttggagtatcagctggaaaacattcaggttctctattctcatgaaaaggtgaaaatggaaggcactatttctcaacaaaccaaactcattgattttctgcaagccaaaatggaccaacctgctaaaaagaaaaaggttcctctgcagtacaatgagctgaagctggccctggagaaggagaaagctcgctgtgcagagctagaggaagcccttcagaagacccgcatcgagctccggtccgcccgggaggaagctgcccaccgcaaagcaacggaccacccacacccatccacgccagccaccgcgaggcagcagatcgccatgtccgccatcgtgcggtcgccagagcaccagcccagtgccatgagcctgctggccccgccatccagccgcagaaaggagtcttcaactccagaggaatttagtcggcgtcttaaggaacgcatgcaccacaatattcctcaccgattcaacgtaggactgaacatgcgagccacaaagtgtgctgtgtgtctggataccgtgcactttggacgccaggcatccaaatgtctcgaatgtcaggtgatgtgtcaccccaagtgctccacgtgcttgccagccacctgcggcttgcctgctgaatatgccacacacttcaccgaggccttctgccgtgacaaaatgaactccccaggtctccagaccaaggagcccagcagcagcttgcacctggaagggtggatgaaggtgcccaggaataacaaacgaggacagcaaggctgggacaggaagtacattgtcctggagggatcaaaagtcctcatttatgacaatgaagccagagaagctggacagaggccggtggaagaatttgagctgtgccttcccgacggggatgtatctattcatggtgccgttggtgcttccgaactcgcaaatacagccaaagcagatgtcccatacatactgaagatggaatctcacccgcacaccacctgctggcccgggagaaccctctacttgctagctcccagcttccctgacaaacagcgctgggtcaccgccttagaatcagttgtcgcaggtgggagagtttctagggaaaaagcagaagctgatgctaaactgcttggaaactccctgctgaaactggaaggtgatgaccgtctagacatgaactgcacgctgcccttcagtgaccaggtggtgttggtgggcaccgaggaagggctctacgccctgaatgtcttgaaaaactccctaacccatgtcccaggaattggagcagtcttccaaatttatattatcaaggacctggagaagctactcatgatagcaggagaagagcgggcactgtgtcttgtggacgtgaagaaagtgaaacagtccctggcccagtcccacctgcctgcccagcccgacatctcacccaacatttttgaagctgtcaagggctgccacttgtttggggcaggcaagattgagaacgggctctgcatctgtgcagccatgcccagcaaagtcgtcattctccgctacaacgaaaacctcagcaaatactgcatccggaaagagatagagacctcagagccctgcagctgtatccacttcaccaattacagtatcctcattggaaccaataaattctacgaaatcgacatgaagcagtacacgctcgaggaattcctggataagaatgaccattccttggcacctgctgtgtttgccgcctcttccaacagcttccctgtctcaatcgtgcaggtgaacagcgcagggcagcgagaggagtacttgctgtgtttccacgaatttggagtgttcgtggattcttacggaagacgtagccgcacagacgatctcaagtggagtcgcttacctttggcctttgcctacagagaaccctatctgtttgtgacccacttcaactcactcgaagtaattgagatccaggcacgctcctcagcagggacccctgcccgagcgtacctggacatcccgaacccgcgctacctgggccctgccatttcctcaggagcgatttacttggcgtcctcataccaggataaattaagggtcatttgctgcaagggaaacctcgtgaaggagtccggcactgaacaccaccggggcccgtccacctcccgcagcagccccaacaagcgaggcccacccacgtacaacgagcacatcaccaagcgcgtggcctccagcccagcgccgcccgaaggccccagccacccgcgagagccaagcacaccccaccgctaccgcgaggggcggaccgagctgcgcagggacaagtctcctggccgccccctggagcgagagaagtcccccggccggatgctcagcacgcggagagagcggtcccccgggaggctgtttgaagacagcagcaggggccggctgcctgcgggagccgtgaggaccccgctgtcccaggtgaacaaggtctgggaccagtcttcagtataaatctcagccagaaaaaccaactcctcatcttgatctgcaggaaaacaccaaacacactatggaactctgctgatggggacccaagcgcccacgtgctcagccaccctctggctcagcggggcccagacccacctcggcacggacacccctgtctccaggaggggcaggtggctgaggctcttcggagctgtcagcgcccggtgcctgccctgggcacctccctgcagtcatctctttgcactttgttactctttcaaagcattcacaaacttttgtacctagctctagcctgtaccagttagttcatcaaaggaaaccaaccgggatgctaactacaacatggttagaatcctaattagctactttaagatcctaggattggttggtttttcttttttttttctctttgtttctttcctttttttttttttttttttaagacaacagaattcttaatagatttgaatagcgacgtatttcctgttgtagtcatttttagctcgaccacatcatcaggtctttgccaccgaggcatagtgtagaacagtcccggtcagttggccaacctcccgcagccaagtaggttcatccttgttcctgttcattctcatagatggccctgctttccccagggtgacatcgtagccaaatgtttactgttttcattgccttttatggccttgacgacttcccctcccaccagctgagaatgtatggaggtcatcggggcctcagctcggaggcagtgacttggggccaagggacctcgagacgctttccttccccaccccccagcgtcatctccccagcctgctgttcccgctttccatatagctttggccaggaaagcatgcaatagacttgctcggagcccagcactcctgggtctcggggtcggggaggggacgggggcacccacttccttgtctgtgacggcgtgttgttccccactctgggatggggaagaggcccgtcgggagttctgcatggcagttcactgcatgtgctgcccccttgggttgctctgccaatgtattaataccatcccatagctcctgccaaatcgagaccctctgacgacttgccgactaactggccaccacaagctgcagtctgtagcactgaacaaacaaaaaacaaaacgctcaagccttacgaccagagaaggatttcagcaaaccaccacctcccactcagtgtcccctccaaacttcacacttccctgcctgcagaggatgactctgttcacacccaatccagcgcggttctaccccacgaaactgtgactttccaaatgagcctttccctagggctagacctaagaccaggaagtttgagaaagcagccgcagctcaactcttccagctccgccagggttgggaagtccttaggtgcagtgcggctcccactgggtctgcggaccctcctattagagtacgaaattcctggcaactggtacagaaccaacctagaggctttgcagttggcaagctaactcgcggccttatttctgcctttaatctcccacaaggcatctgttgctttgggtcctccacgactcttaggcccgcctcaacaacccaggcacctcctaggtaggctcaaaggtagacccgtttccaccgcagcaggtgaacatgaccgtgttttcaactgtgtccacagttcagatccctttccagattgcaacctggcctgcatcccagctccttcctgctcgtgtcttaacctaagtgctttcttgtttgaaacgcctacaaacctccatgtggtagctcctttggcaaatgtcctgctgtggcgttttatgtgttgcttggagtctgtggggtcgtactccctcccctcccgtccccagggcagatttgattgaatgtttgctgaagttttgtctcttggtccacagtatttggaaaggtcactgaaaatgggtctttcagtcttggcatttcatttaggatctccatgagaaatgggcttcttgagccctgaaaatgtatattgtgtgtctcatctgtgaactgctttctgctatatagaactagctcaaaagactgtacatatttacaagaaactttatattcgtaaaaaaaaaaagaggaaattgaattggtttctacttttttattgtaaaaggtgcatttttcaacacttacttttggtttcaatggtggtagttgtggacagccatcttcactggagggtggggagctccgtgtgaccaccaagatgccagcaggatataccgtaacacgaaattgctgtcaaaagcttattagcatcaatcaagattctaggtctccaaaagtacaggctttttcttcattaccttttttattcagaacgaggaagagaacacaaggaatgattcaagatccaccttgagaggaatgaactttgttgttgaacaattagtgaaataaagcaatgatctaaact

SEQ ID NO: 4195 - DNA, 5205 bp, Homo sapiens
  source 1..5205: mol_type = unassigned DNA; mol_type = unassigned DNA
cccccttcgttcccaccctcaagtctgacgatgacacctccaattttgatgaaccagagaagaattcgtgggtttcatcctctccgtgccagctgagcccctcaggcttctcgggtgaagaactgccgtttgtggggttttcgtacagcaaggcactggggattcttggtagatctgagtctgttgtgtcgggtctggactcccctgccaagactagctccatggaaaagaaacttctcatcaaaagcaaagagctacaagactctcaggacaagtgtcacaagatggagcaggaaatgacccggttacatcggagagtgtcagaggtggaggctgtgcttagtcagaaggaggtggagctgaaggcctctgagactcagagatccctcctggagcaggaccttgctacctacatcacagaatgcagtagcttaaagcgaagtttggagcaagcacggatggaggtgtcccaggaggatgacaaagcactgcagcttctccatgatatcagagagcagagccggaagctccaagaaatcaaagagcaggagtaccaggctcaagtggaagaaatgaggttgatgatgaatcagttggaagaggatcttgtctcagcaagaagacggagtgatctctacgaatctgagctgagagagtctcggcttgctgctgaagaattcaagcggaaagcgacagaatgtcagcataaactgttgaaggctaaggatcaagggaagcctgaagtgggagaatatgcgaaactggagaagatcaatgctgagcagcagctcaaaattcaggagctccaagagaaactggagaaggctgtaaaagccagcacggaggccaccgagctgctgcagaatatccgccaggcaaaggagcgagccgagagggagctggagaagctgcagaaccgagaggattcttctgaaggcatcagaaagaagctggtggaagctgaggagctcgaagagaaacatcgggaggcccaagtctcagcccagcacctagaagtgcacctgaaacagaaagagcagcactatgaggaaaagattaaagtgttggacaatcagataaagaaagacctggctgacaaggagacactggagaacatgatgcagagacacgaggaggaggcccatgagaagggcaaaattctcagcgaacagaaggcgatgatcaatgctatggattccaagatcagatccctggaacagaggattgtggaactgtctgaagccaataaacttgcagcaaatagcagtctttttacccaaaggaacatgaaggcccaagaagagatgatttctgaactcaggcaacagaaattttacctggagacacaggctgggaagttggaggcccagaaccgaaaactggaggagcagctggagaagatcagccaccaagaccacagtgacaagaatcggctgctggaactggagacaagattgcgggaggtcagtctagagcacgaggagcagaaactggagctcaagcgccagctcacagagctacagctctccctgcaggagcgcgagtcacagttgacagccctgcaggctgcacgggcggccctggagagccagcttcgccaggcgaagacagagctggaagagaccacagcagaagctgaagaggagatccaggcactcacggcacatagagatgaaatccagcgcaaatttgatgctcttcgtaacagctgtactgtaatcacagacctggaggagcagctaaaccagctgaccgaggacaacgctgaactcaacaaccaaaacttctacttgtccaaacaactcgatgaggcttctggcgccaacgacgagattgtacaactgcgaagtgaagtggaccatctccgccgggagatcacggaacgagagatgcagcttaccagccagaagcaaacgatggaggctctgaagaccacgtgcaccatgctggaggaacaggtcatggatttggaggccctaaacgatgagctgctagaaaaagagcggcagtgggaggcctggaggagcgtcctgggtgatgagaaatcccagtttgagtgtcgggttcgagagctgcagagaatgctggacaccgagaaacagagcagggcgagagccgatcagcggatcaccgagtctcgccaggtggtggagctggcagtgaaggagcacaaggctgagattctcgctctgcagcaggctctcaaagagcagaagctgaaggccgagagcctctctgacaagctcaatgacctggagaagaagcatgctatgcttgaaatgaatgcccgaagcttacagcagaagctggagactgaacgagagctcaaacagaggcttctggaagagcaagccaaattacagcagcagatggacctgcagaaaaatcacattttccgtctgactcaaggactgcaagaagctctagatcgggctgatctactgaagacagaaagaagtgacttggagtatcagctggaaaacattcaggttctctattctcatgaaaaggtgaaaatggaaggcactatttctcaacaaaccaaactcattgattttctgcaagccaaaatggaccaacctgctaaaaagaaaaaggttcctctgcagtacaatgagctgaagctggccctggagaaggagaaagctcgctgtgcagagctagaggaagcccttcagaagacccgcatcgagctccggtccgcccgggaggaagctgcccaccgcaaagcaacggaccacccacacccatccacgccagccaccgcgaggcagcagatcgccatgtccgccatcgtgcggtcgccagagcaccagcccagtgccatgagcctgctggccccgccatccagccgcagaaaggagtcttcaactccagaggaatttagtcggcgtcttaaggaacgcatgcaccacaatattcctcaccgattcaacgtaggactgaacatgcgagccacaaagtgtgctgtgtgtctggataccgtgcactttggacgccaggcatccaaatgtctcgaatgtcaggtgatgtgtcaccccaagtgctccacgtgcttgccagccacctgcggcttgcctgctgaatatgccacacacttcaccgaggccttctgccgtgacaaaatgaactccccaggtctccagaccaaggagcccagcagcagcttgcacctggaagggtggatgaaggtgcccaggaataacaaacgaggacagcaaggctgggacaggaagtacattgtcctggagggatcaaaagtcctcatttatgacaatgaagccagagaagctggacagaggccggtggaagaatttgagctgtgccttcccgacggggatgtatctattcatggtgccgttggtgcttccgaactcgcaaatacagccaaagcagatgtcccatacatactgaagatggaatctcacccgcacaccacctgctggcccgggagaaccctctacttgctagctcccagcttccctgacaaacagcgctgggtcaccgccttagaatcagttgtcgcaggtgggagagtttctagggaaaaagcagaagctgatgctaaactgcttggaaactccctgctgaaactggaaggtgatgaccgtctagacatgaactgcacgctgcccttcagtgaccaggtggtgttggtgggcaccgaggaagggctctacgccctgaatgtcttgaaaaactccctaacccatgtcccaggaattggagcagtcttccaaatttatattatcaaggacctggagaagctactcatgatagcaggagaagagcgggcactgtgtcttgtggacgtgaagaaagtgaaacagtccctggcccagtcccacctgcctgcccagcccgacatctcacccaacatttttgaagctgtcaagggctgccacttgtttggggcaggcaagattgagaacgggctctgcatctgtgcagccatgcccagcaaagtcgtcattctccgctacaacgaaaacctcagcaaatactgcatccggaaagagatagagacctcagagccctgcagctgtatccacttcaccaattacagtatcctcattggaaccaataaattctacgaaatcgacatgaagcagtacacgctcgaggaattcctggataagaatgaccattccttggcacctgctgtgtttgccgcctcttccaacagcttccctgtctcaatcgtgcaggtgaacagcgcagggcagcgagaggagtacttgctgtgtttccacgaatttggagtgttcgtggattcttacggaagacgtagccgcacagacgatctcaagtggagtcgcttacctttggcctttgcctacagagaaccctatctgtttgtgacccacttcaactcactcgaagtaattgagatccaggcacgctcctcagcagggacccctgcccgagcgtacctggacatcccgaacccgcgctacctgggccctgccatttcctcaggagcgatttacttggcgtcctcataccaggataaattaagggtcatttgctgcaagggaaacctcgtgaaggagtccggcactgaacaccaccggggcccgtccacctcccgcagcagccccaacaagcgaggcccacccacgtacaacgagcacatcaccaagcgcgtggcctccagcccagcgccgcccgaaggccccagccacccgcgagagccaagcacaccccaccgctaccgcgaggggcggaccgagctgcgcagggacaagtctcctggccgccccctggagcgagagaagtcccccggccggatgctcagcacgcggagagagcggtcccccgggaggctgtttgaagacagcagcaggggccggctgcctgcgggagccgtgaggaccccgctgtcccaggtgaacaaggtctgggaccagtcttcagtataaatctcagccagaaaaaccaactcctcatcttgatctgcaggaaaacaccaaacacactatggaactctgctgatggggacccaagcgcccacgtgctcagccaccctctggctcagcggggcccagacccacctcggcacggacacccctgtctccaggaggggcaggtggctgaggctcttcggagctgtcagcgcccggtgcctgccctgggcacctccctgcagtcatctctttgcactttgttactctttcaaagcattcacaaacttttgtacctagc

SEQ ID NO: 4196 - DNA, 4958 bp, Homo sapiens
  source 1..4958: mol_type = unassigned DNA; mol_type = unassigned DNA
aaaaacaaaacaaaaacaaaagcaaacaggtgaaaaatgatgattgtggcttccttgctaactgggttagagaagtgatcaagtgtgaaccgggacttgaatgagaggagtgacttagcatttggtgactgtccttaacgaagaactgtgcgctcctgggcgaagaaacaatgatggagcaggaaatgacccggttacatcggagagtgtcagaggtggaggctgtgcttagtcagaaggaggtggagctgaaggcctctgagactcagagatccctcctggagcaggaccttgctacctacatcacagaatgcagtagcttaaagcgaagtttggagcaagcacggatggaggtgtcccaggaggatgacaaagcactgcagcttctccatgatatcagagagcagagccggaagctccaagaaatcaaagagcaggagtaccaggctcaagtggaagaaatgaggttgatgatgaatcagttggaagaggatcttgtctcagcaagaagacggagtgatctctacgaatctgagctgagagagtctcggcttgctgctgaagaattcaagcggaaagcgacagaatgtcagcataaactgttgaaggctaaggatcaagggaagcctgaagtgggagaatatgcgaaactggagaagatcaatgctgagcagcagctcaaaattcaggagctccaagagaaactggagaaggctgtaaaagccagcacggaggccaccgagctgctgcagaatatccgccaggcaaaggagcgagccgagagggagctggagaagctgcagaaccgagaggattcttctgaaggcatcagaaagaagctggtggaagctgaggaacgccgccattctctggagaacaaggtaaagagactagagaccatggagcgtagagaaaacagactgaaggatgacatccagacaaaatcccaacagatccagcagatggctgataaaattctggagctcgaagagaaacatcgggaggcccaagtctcagcccagcacctagaagtgcacctgaaacagaaagagcagcactatgaggaaaagattaaagtgttggacaatcagataaagaaagacctggctgacaaggagacactggagaacatgatgcagagacacgaggaggaggcccatgagaagggcaaaattctcagcgaacagaaggcgatgatcaatgctatggattccaagatcagatccctggaacagaggattgtggaactgtctgaagccaataaacttgcagcaaatagcagtctttttacccaaaggaacatgaaggcccaagaagagatgatttctgaactcaggcaacagaaattttacctggagacacaggctgggaagttggaggcccagaaccgaaaactggaggagcagctggagaagatcagccaccaagaccacagtgacaagaatcggctgctggaactggagacaagattgcgggaggtcagtctagagcacgaggagcagaaactggagctcaagcgccagctcacagagctacagctctccctgcaggagcgcgagtcacagttgacagccctgcaggctgcacgggcggccctggagagccagcttcgccaggcgaagacagagctggaagagaccacagcagaagctgaagaggagatccaggcactcacggcacatagagatgaaatccagcgcaaatttgatgctcttcgtaacagctgtactgtaatcacagacctggaggagcagctaaaccagctgaccgaggacaacgctgaactcaacaaccaaaacttctacttgtccaaacaactcgatgaggcttctggcgccaacgacgagattgtacaactgcgaagtgaagtggaccatctccgccgggagatcacggaacgagagatgcagcttaccagccagaagcaaacgatggaggctctgaagaccacgtgcaccatgctggaggaacaggtcatggatttggaggccctaaacgatgagctgctagaaaaagagcggcagtgggaggcctggaggagcgtcctgggtgatgagaaatcccagtttgagtgtcgggttcgagagctgcagagaatgctggacaccgagaaacagagcagggcgagagccgatcagcggatcaccgagtctcgccaggtggtggagctggcagtgaaggagcacaaggctgagattctcgctctgcagcaggctctcaaagagcagaagctgaaggccgagagcctctctgacaagctcaatgacctggagaagaagcatgctatgcttgaaatgaatgcccgaagcttacagcagaagctggagactgaacgagagctcaaacagaggcttctggaagagcaagccaaattacagcagcagatggacctgcagaaaaatcacattttccgtctgactcaaggactgcaagaagctctagatcgggctgatctactgaagacagaaagaagtgacttggagtatcagctggaaaacattcaggttctctattctcatgaaaaggtgaaaatggaaggcactatttctcaacaaaccaaactcattgattttctgcaagccaaaatggaccaacctgctaaaaagaaaaaggttcctctgcagtacaatgagctgaagctggccctggagaaggagaaagctcgctgtgcagagctagaggaagcccttcagaagacccgcatcgagctccggtccgcccgggaggaagctgcccaccgcaaagcaacggaccacccacacccatccacgccagccaccgcgaggcagcagatcgccatgtccgccatcgtgcggtcgccagagcaccagcccagtgccatgagcctgctggccccgccatccagccgcagaaaggagtcttcaactccagaggaatttagtcggcgtcttaaggaacgcatgcaccacaatattcctcaccgattcaacgtaggactgaacatgcgagccacaaagtgtgctgtgtgtctggataccgtgcactttggacgccaggcatccaaatgtctcgaatgtcaggtgatgtgtcaccccaagtgctccacgtgcttgccagccacctgcggcttgcctgctgaatatgccacacacttcaccgaggccttctgccgtgacaaaatgaactccccaggtctccagaccaaggagcccagcagcagcttgcacctggaagggtggatgaaggtgcccaggaataacaaacgaggacagcaaggctgggacaggaagtacattgtcctggagggatcaaaagtcctcatttatgacaatgaagccagagaagctggacagaggccggtggaagaatttgagctgtgccttcccgacggggatgtatctattcatggtgccgttggtgcttccgaactcgcaaatacagccaaagcagatgtcccatacatactgaagatggaatctcacccgcacaccacctgctggcccgggagaaccctctacttgctagctcccagcttccctgacaaacagcgctgggtcaccgccttagaatcagttgtcgcaggtgggagagtttctagggaaaaagcagaagctgatgctaaactgcttggaaactccctgctgaaactggaaggtgatgaccgtctagacatgaactgcacgctgcccttcagtgaccaggtggtgttggtgggcaccgaggaagggctctacgccctgaatgtcttgaaaaactccctaacccatgtcccaggaattggagcagtcttccaaatttatattatcaaggacctggagaagctactcatgatagcaggagaagagcgggcactgtgtcttgtggacgtgaagaaagtgaaacagtccctggcccagtcccacctgcctgcccagcccgacatctcacccaacatttttgaagctgtcaagggctgccacttgtttggggcaggcaagattgagaacgggctctgcatctgtgcagccatgcccagcaaagtcgtcattctccgctacaacgaaaacctcagcaaatactgcatccggaaagagatagagacctcagagccctgcagctgtatccacttcaccaattacagtatcctcattggaaccaataaattctacgaaatcgacatgaagcagtacacgctcgaggaattcctggataagaatgaccattccttggcacctgctgtgtttgccgcctcttccaacagcttccctgtctcaatcgtgcaggtgaacagcgcagggcagcgagaggagtacttgctgtgtttccacgaatttggagtgttcgtggattcttacggaagacgtagccgcacagacgatctcaagtggagtcgcttacctttggcctttgcctacagagaaccctatctgtttgtgacccacttcaactcactcgaagtaattgagatccaggcacgctcctcagcagggacccctgcccgagcgtacctggacatcccgaacccgcgctacctgggccctgccatttcctcaggagcgatttacttggcgtcctcataccaggataaattaagggtcatttgctgcaagggaaacctcgtgaaggagtccggcactgaacaccaccggggcccgtccacctcccgcagcagccccaacaagcgaggcccacccacgtacaacgagcacatcaccaagcgcgtggcctccagcccagcgccgcccgaaggccccagccacccgcgagagccaagcacaccccaccgctaccgcgaggggcggaccgagctgcgcagggacaagtctcctggccgccccctggagcgagagaagtcccccggccggatgctcagcacgcggagagagcggtcccccgggaggctgtttgaagacagcagcaggggccggctgcctgcgggagccgtgaggaccccgctgtcccaggtgaacaaggtctgggaccagtcttcagtataaatctcagccagaaaaaccaac

SEQ ID NO: 4197 - DNA, 524 bp, Homo sapiens
  source 1..524: mol_type = unassigned DNA; mol_type = unassigned DNA
ttccctcttttcaccattctttggcccacactgtgcctgcatggtgatcacacagcctacagagaaccctatctgtttgtgacccacttcaactcactcgaagtaattgagatccaggcacgctcctcagcagggtaagcattgtcctcccatgcgtggaaaacttcagctattggggtaggtgttggggccggccgcatgttccttcctaacttgcctagcaatggaggtagcctgcaatgaaggtaactggaactctgggactctgcaggacccctgcccgagcgtacctggacatcccgaacccgcgctacctgggccctgccatttcctcaggagcgatttacttggcgtcctcataccaggataaattaagggtcatttgctgcaagggaaacctcgtgaaggagtccggcactgaacaccaccggggcccgtccacctcccgcagcagccccaacaagcgaggcccacccacgtacaacgagcacatcaccaagcgcgtggcctccagcccagcgccg

SEQ ID NO: 4198 - DNA, 441 bp, Homo sapiens
  source 1..441: mol_type = unassigned DNA; mol_type = unassigned DNA
agatatgtatttgttgggtgagttgctttacacaggattgctgggtcaaagaatgcattgcagtcagattttgattttccctcttttcaccattctttggcccacactgtgcctgcatggtgatcacacagcctacagagaaccctatctgtttgtgacccacttcaactcactcgaagtaattgagatccaggcacgctcctcagcagggacccctgcccgagcgtacctggacatcccgaacccgcgctacctgggccctgccatttcctcaggagcgatttacttggcgtcctcataccaggataaattaagggtcatttgctgcaagggaaacctcgtgaaggagtccggcactgaacaccaccggggcccgtccacctcccgcagccccaacaagcgaggcccacccacgtacaacgagcacatcaccaagcgcgt

SEQ ID NO: 4199 - DNA, 533 bp, Homo sapiens
  source 1..533: mol_type = unassigned DNA; mol_type = unassigned DNA
tttccaggaataacttggccttaaccttctcttggtttctctggatggtttggtcataaacagatcagcctcacgatgtcttctgtttttcttttctttcacctatgaaaagaaactgcttggaaactccctgctgaaactggaaggtgatgaccgtctagacatgaactgcacgctgcccttcagtgaccaggagaagagcgggcactgtgtcttgtggacgtgaagaaagtgaaacagtccctggcccagtcccacctgcctgcccagcccgacatctcacccaacatttttgaagctgtcaagggctgccacttgtttggggcaggcaagattgagaacgggctctgcatctgtgcagccatgcccagcaaagtcgtcattctccgctacaacgaaaacctcagcaaatactgcatccggaaagagatagagacctcagagccctgcagctgtatccacttcaccaattacagtatcctcattggaaccaataaattctacgaaatcgacatgaagcagtacacgctcga

SEQ ID NO: 4200 - DNA, 497 bp, Homo sapiens
  source 1..497: mol_type = unassigned DNA; mol_type = unassigned DNA
ggcccgcgactgtgtttcttacgagcttctgcctgcctgggttcagaaactgcttggaaactccctgctgaaactggaaggtgatgaccgtctagacatgaactgcacgctgcccttcagtgaccaggtggtgttggtgggcaccgaggaagggctctacgccctgaatgtcttgaaaaactccctaacccatgtcccaggaattggagcagtcttccaaatttatattatcaaggacctggagaagctactcatgatagcaggagaagagcgggcactgtgtcttgtggacgtgaagaaagtgaaacagtccctggcccagtcccacctgcctgcccagcccgacatctcacccaacatttttgaagctgtcaagggctgccacttgtttggggcaggcaagattgagaacgggctctgcatctgtgcagccatgcccagcaaagtcgtcattctccgctacaacgaaaacctcagcaaatactgcatccggaaag

SEQ ID NO: 4201 - DNA, 564 bp, Homo sapiens
  source 1..564: mol_type = unassigned DNA; mol_type = unassigned DNA
acggcgcctttgcacttctgctgcagccttatgggggaaggagtctttcatgtgtcttattaaccctgcgcaggtgaaatctccttagcttcagcttatttcttattacagaatagctttccatgtctactaccctcccttatttctgcatcccagccaaattataactcagatgctaattaacagctgccccagagataccaatagcactcgcattttgcatttggagctcagatcaaaatacgggctgagctaagagcatatgtgcgtttctgagcatttccaggaataacttggccttaaccttctcttggtttctctggatggtttggtcataaacagatcagcctcacgatgtcttctgtttttcttttctttcacctatgaaaagaaactgcttggaaactccctgctgaaactggaaggtgatgaccgtctagacatgaactgcacgctgcccttcagtgaccaggtggtgttggtgggcaccgaggaagggctctacgccctgaatgtcttgaaaaactccctaacccatgtcccaggaattggagcagtcttcca

SEQ ID NO: 4202 - DNA, 586 bp, Homo sapiens
  source 1..586: mol_type = unassigned DNA; mol_type = unassigned DNA
ctttctgcaggggcctggcaccaggggaagctcaggagactacctgcaagccagggccagactctctgggcccggctggggtagagaagcccaggcgttggctggcagaggaagggaagggtccagggtcagctgagcatgccctcaggttgctcactgttcttccctagaatgtcaggtgatgtgtcaccccaagtgctccacgtgcttgccagccacctgcggcttgcctgctgaatatgccacacacttcaccgaggccttctgccgtgacaaaatgaactccccaggtctccagaccaaggagcccagcagcagcttgcacctggaagggtggatgaaggtgcccaggaataacaaacgaggacagcaaggctgggacaggaagtacattgtcctggagggatcaaaagtcctcatttatgacaatgaagccagagaagctggacagaggccggtggaagaatttgagctgtgccttcccgacggggatgtatctattcatggtgccgttggtgcttccgaactcgcaaatacagccaaagcagatgtcccatacatactgaagatggaatctcacccgcac

SEQ ID NO: 4203 - DNA, 567 bp, Homo sapiens
  source 1..567: mol_type = unassigned DNA; mol_type = unassigned DNA
actctctgggcccggctggggtagagaagcccaggcgttggctggcagaggaagggaagggtccagggtcagctgagcatgccctcaggttgctcactgttcttccctagaatgtcaggtgatgtgtcaccccaagtgctccacgtgcttgccagccacctgcggcttgcctgctgaatatgccacacacttcaccgaggccttctgccgtgacaaaatgaactccccaggtctccagaccaaggagcccagcagcagcttgcacctggaagggtggatgaaggtgcccaggaataacaaacgaggacagcaaggctgggacaggaagtacattgtcctggagggatcaaaagtcctcatttatgacaatgaagccagagaaggtaaattaataattcagggggaaggtcattgcacgtggctaacccaggtctccccagtgctggcgcgaaggctttgttttttggactgccttgcaagccttctacgcttttccatttttgaaacttacaaaccaaatgacttctctaaaggttattggtgcgatactcacatctataggtctcc

SEQ ID NO: 4204 - DNA, 594 bp, Homo sapiens
  source 1..594: mol_type = unassigned DNA; mol_type = unassigned DNA
acatgccatttttactaaatacacttacagtgagtatgctcctggcttttgtggtttgctcctcccgagtcagatttcctttagctagtttcaagtgccagtttccaggagttaggagatatctctgtttccattgctagggtttatttagtcgacggaaagaggaccctgctttacccacacaggttcctctgcagtacaatgagctgaagctggccctggagaaggagaaagctcgctgtgcagagctagaggaagcccttcagaagacccgcatcgagctccggtccgcccgggaggaagctgcccaccgcaaagcaacggaccacccacacccatccacgccagccaccgcgaggcagcagatcgccatgtccgccatcgtgcggtcgccagagcaccagcccagtgccatgagcctgctggccccgccatccagccgcagaaaggagtcttcaactccagaggaatttagtcggcgtcttaaggaacgcatgcaccacaatattcctcaccgattcaacgtaggactgaacatgcgagccacaaagtgtgctgtgtgtctggataccgtgcactttggacgccaggcat

SEQ ID NO: 4205 - DNA, 329 bp, Homo sapiens
  source 1..329: mol_type = unassigned DNA; mol_type = unassigned DNA
atagctgagttacaggagctccagccttcggcaaaggacttcgaagtcagaagtcttgtaggttgtggtcactttgctgaagtgcaggtggtaagagagaaagcaaccggggacatctatgctatgaaagtgatgaagaagaaggctttattggcccaggagcaggtttcattttttgaggaagagcggaacatattatctcgaagcacaagcccgtggatcccccaattacagtatgcctttcaggacaaaaatcacctttatctggttctctattctcatgaaaaggtgaaaatggaaggcactatttctcaacaaaccaaactcat

SEQ ID NO: 4206 - DNA, 677 bp, Homo sapiens
  source 1..677: mol_type = unassigned DNA; mol_type = unassigned DNA
ggaagagaccacagcagaagctgaagaggagatccaggcactcacggcacatagagatgaaatccagcgcaaatttgatgctcttcgtaacagctgtactgtaatcacagacctggaggagcagctaaaccagctgaccgaggacaacgctgaactcaacaaccaaaacttctacttgtccaaacaactcgatgaggcttctggcgccaacgacgagattgtacaactgcgaagtgaagtggaccatctccgccgggagatcacggaacgagagatgcagcttaccagccagaagcaagaaatccttgtttaaagacaaggcacaaatcagtgctactgatttgcagacgatggaggctctgaagaccacgtgcaccatgctggaggaacaggtcatggatttggaggccctaaacgatgagctgctagaaaaagagcggcagtgggaggcctggaggagcgtcctgggtgatgagaaatcccagtttgagtgtcgggttcgagagctgcagagaatgctggacaccgagaaacagagcagggcgagagccgatcagcggatcaccgagtctcgccaggtggtggagctggcagtgaaggagcacaaggctgagattctcgctctgcagcaggctctcaaagagcagaagctgaaggccgagagcctctctgacaag

SEQ ID NO: 4207 - DNA, 590 bp, Homo sapiens
  source 1..590: mol_type = unassigned DNA; mol_type = unassigned DNA
agttggagggaagagggaaaatactcatcttttcagaatgggaataggacaaatgaaggagagtaaaacttcatcctttattgctttttttcccttttctcctaatagcctgtaggtgttaatataaatgttaaaaatatttgtacagggtgtgcatgtatggtctaaagaattaattgttattaacacagcattgtgtattcctgtaacttatttctggtgttggggatgatttgattaattagttcttagaaaaacagatgctggtgccgcattctcggctttccaggcaaattgctattctctatatttgacccgtagcatgtagaattgtattctaccctatgaaaaatttataatcaacttcttaccttttaggcacatagagatgaaatccagcgcaaatttgatgctcttcgtaacagctgtactgtaatcacagacctggaggagcagctaaaccagctgaccgaggacaacgctgaactcaacaaccaaaacttctacttgtccaaacaactcgatgaggcttctggcgccaacgacgagattgtacaactgcgaagtgaagtggaccatctccgccggga

SEQ ID NO: 4208 - DNA, 2283 bp, Homo sapiens
  source 1..2283: mol_type = unassigned DNA; mol_type = unassigned DNA
agcgccgaaggagtaagacgatcttctccgcaacagtgttgaatccggctgaaattttttttcctccccgcctcctttcttgtttttctttaaccagctcctccccccttcgttcccaccctcaagtctgacgatgacacctccaattttgatgaaccagagaagaattcgtgggtttcatcctctccgtgccagctgagcccctcaggcttctcgggtgaagaactgccgtttgtggggttttcgtacagcaaggcactggggattcttggtagatctgagtctgttgtgtcgggtctggactcccctgccaagactagctccatggaaaagaaacttctcatcaaaagcaaagagctacaagactctcaggacaagtgtcacaagatggagcaggaaatgacccggttacatcggagagtgtcagaggtggaggctgtgcttagtcagaaggaggtggagctgaaggcctctgagactcagagatccctcctggagcaggaccttgctacctacatcacagaatgcagtgtgagccttccctgaagcccccttcccttggaggtggcacttcctgttgtgtgtgtctcatcctgtttcatgatggctccatgaggcacatcacagccaatggcagagagtagagagagggagagcacaaaagcaagatctgtgttttgcagagtagtgagagccaggcgtaaggtccccaagaaatgagattggactcatttccagcagaaagtgcaggtagacggctggtaccatggagtctggagatgggagtaatccatctttgccgcaagttgcaaaagatcttaacatctcccatcccagcctctgtggtctgcgttgtgtctgacatgagcagccttgagaaccagactcccaactatgtacaagaaaacttactttcaatcttcctgacatcaaattttccattggccagaaccagtgtagtgacaagaaaatagccttgaaaacccagaccctctgtcattatttaccatgtgactttcattttttctttccttcacaagagtagactgtcttcttctccattgtcttgttaaatttttcattcaggtgttttttaatgtgcccaattaaacagtctcaagaagttgaatcacacatttctaaagtttttttcacaagggagaggaaatctatagaacgtggctgattaagaataactgctatgtttccattccagacttggctgcctttcagtggtgggtgaagttattcagctatgtatttcagatatagatttcagtgccattgaagcattaagggattcttatggatgaaaggtgtccaggaaaaataagccaggaggtagaaatagaccacttggagtcttaaatgacaactgggcagaggatatgaagtcattgctactttgaaagaggcatatgtactttagggcccacaaataactgtagaaaacactttgtagctatccacatggtggctgtaatagctactgggtcttaataggttttagtcctgaacatgcaagtaagtatctcctaggacaggtagatggtggcaggagacaggctgatgcagtttccggctggatccctaaggtcaccaggttgagatgatgtttcttgaaccaaggggttttacaggatggaaaccggagtcggcaaccaactggaagttgtgaactgtggtccgtcactcgaaactgtcctggtgtctgcgaagcagcttgcagctctcttaatgagtcttttcaaacaaagcaggatccacagggcatccctattaaaatttttgctttctgcagagcttaaagcgaagtttggagcaagcacggatggaggtgtcccaggaggatgacaaagcactgcagcttctccatgatatcagagagcagagccggaagctccaagaaatcaaagagcaggtaggcctgcttgcctgggagcacagcagcatctcggcttgcttggacctctaatttcaggagaggcgtgtttgagagagaaataggaagaaagggagagagagaaagggtgggggcagagtggaagagagacaggtatgtaggtcattcagaaacttcagatttctcataatttatatacatcatagaatgcttgttccagctccttttgaagctgataccccataatgtctgcttttaaaaataaagatgtaggtttagagcaagagtgggcagacttcagcctgtggggcaaagctggtccaacacctattttctatggcccacaagctaagaatggggttacgtttttaaacagttgg

SEQ ID NO: 4209 - DNA, 554 bp, Homo sapiens
  source 1..554: mol_type = unassigned DNA; mol_type = unassigned DNA
actgggatcagcactggcccctggcaggcaggcggcagccaggtggggttccagccagagcacgcacgcacggagccgggagcatgcagcctgcactgcgggggatgtgatgctcggctctaactcgcctggctggcccgccacggacgcctcagcttgcaaccatggtaacgtttctggcgggggacacccccgggagcccaccgcgatgggcagcctcctggtgactgatggacgagtgtccacctcccagaccgagagcgcttagtaggtcggaggaagtggagaggatgtaacacgcccccagccgggagtgaagccctgaggagctcctccccccttcgttcccaccctcaagtctgacgatgacacctccaattttgatgaaccagagaagaattcgtgggtttcatcctctccgtgccagctgagcccctcaggcttctcgggtgaagaactgccgtttgtggggttttcgtacagcaaggcactggggattcttggtagatctgagtctgttgtgtcgggtctggactcccctgccaagactagct

SEQ ID NO: 4210 - DNA, 1799 bp, Homo sapiens
  source 1..1799: mol_type = unassigned DNA; mol_type = unassigned DNA
gcggggcggaacagatcgcagacctgggggttcgcagagccgccagtggggagatgttgaagttcaaatatggagcgcggaatcctttggatgctggtgctgctgaacccattgccagccgggcctccaggctgaatctgttcttccaggggaaaccaccctttatgactcaacagcagatgtctcctctttcccgagaagggatattagatgccctctttgttctctttgaagaatgcagtcagcctgctctgatgaagattaagcacgtgagcaactttgtccggaagtattccgacaccatagctgagttacaggagctccagccttcggcaaaggacttcgaagtcagaagtcttgtaggttgtggtcactttgctgaagtgcaggtggtaagagagaaagcaaccggggacatctatgctatgaaagtgatgaagaagaaggctttattggcccaggagcaggtttcattttttgaggaagagcggaacatattatctcgaagcacaagcccgtggatcccccaattacagtatgcctttcaggacaaaaatcacctttatctggtcatggaatatcagcctggaggggacttgctgtcacttttgaatagatatgaggaccagttagatgaaaacctgatacagttttacctagctgagctgattttggctgttcacagcgttcatctgatgggatacgtgcatcgagacatcaagcctgagaacattctcgttgaccgcacaggacacatcaagctggtggattttggatctgccgcgaaaatgaattcaaacaagatggtgaatgccaaactcccgattgggaccccagattacatggctcctgaagtgctgactgtgatgaacggggatggaaaaggcacctacggcctggactgtgactggtggtcagtgggcgtgattgcctatgagatgatttatgggagatcccccttcgcagagggaacctctgccagaaccttcaataacattatgaatttccagcggtttttgaaatttccagatgaccccaaagtgagcagtgactttcttgatctgattcaaagcttgttgtgcggccagaaagagagactgaagtttgaaggtctttgctgccatcctttcttctctaaaattgactggaacaacattcgtaactctcctccccccttcgttcccaccctcaagtctgacgatgacacctccaattttgatgaaccagagaagaattcgtgggtttcatcctctccgtgccagctgagcccctcaggcttctcgggtgaagaactgccgtttgtggggttttcgtacagcaaggcactggggattcttggtagatctgagtctgttgtgtcgggtctggactcccctgccaagactagctccatggaaaagaaacttctcatcaaaagcaaagagctacaagactctcaggacaagtgtcacaagatggagcaggaaatgacccggttacatcggagagtgtcaggtggctgaggctcttcggagctgtcagcgcccggtgcctgccctgggcacctccctgcagtcatctctttgcactttgttactctttcaaagcattcacaaacttttgtacctagctctagcctgtaccagttagttcatcaaaggaaaccaaccgggatgctaactacaacatggttagaatcctaattagctactttaagatcctaggattggttggtttttcttttttttttctctttgtttctttcctttttttttttttttttttaagacaacagaattcttaatagatttgaatagcga

SEQ ID NO: 4211 - DNA, 1116 bp, Homo sapiens
  source 1..1116: mol_type = unassigned DNA; mol_type = unassigned DNA
cttcacctcactttaccttctcctccagcacaggaactaggaactacggagagagaagccaagggagaggaggaggaggaaactaacgattccctgcccacccccacacccagcaccaccaacaggtgggcaagcttgccgagaaaacgcagagggcatcctgtgagcagcaaacacatctgagcctggaaaagacgcagagaagtaaaagatcaaagtctgattggcaccggctcccattccggctccagcctccaatccgacccccatttcggctgcagcctcggacctagctccggccctcggtctatccggttgcatcctccctccctgttccggatcttatcttgcgccagcgcctactccaggatcccgtagccagacctcaagccatggctggtcccttctcccgtctgctgtccgcccgcccgggactcaggctcctggctttggccggagcggggtctctagccgctgggtttctgctccgaccggaacctgtacgagctgccagtgaacgacggaggctgtatcccccgagcgctgagtacccagacctccgaaagcacaacaactgcatggccagtcacctgaccccagcagtctatgcacggctctgcgacaagaccacacccactggttggacgctagatcagtgtatccagactggcgtggacaaccctggccaccccttcatcaagactgtgggcatggtggctggagatgaggagacctatgaggtatttgctgacctgtttgaccctgtgatccaagagcgacacaatggatatgacccccggacaatgaagcacaccacggatctagatgccagtaaaatccgttctggctactttgatgagaggtatgtattgtcctctagagtcagaactggccgaagcatccgaggactcagtctgcctccagcttgcactcgagcagagcgacgagaggtggaacgtgttgtggtggatgcactgagtggcctgaagggtgacctggctggacgttactataggctcagtgagatgacagaggctgaacagcagcagcttattgatgaccactttctgtttgataagcctgtgtccccgttgctgactgcagcaggaatggctc

SEQ ID NO: 4212 - DNA, 632 bp, Homo sapiens
  source 1..632: mol_type = unassigned DNA; mol_type = unassigned DNA
actttaccttctcctccagcacaggaactaggaactacggagagagaagccaagggagaggaggaggaggaaactaacgattccctgcccacccccacacccagcaccaccaacaggtgggcaagcttgccgagaaaacgcagagggcatcctgtgagcagcaaacacatctgagcctggaaaagacgcagagaagtaaaagatcaaagcgcctactccaggatcccgtagccagacctcaagccatggctggtcccttctcccgtctgctgtccgcccgcccgggactcaggctcctggctttggccggagcggggtctctagccgctgggtttctgctccgaccggaacctgtacgagctgccagtgaacgacggaggctgtatcccccgagcgctgagtacccagacctccgaaagcacaacaactgcatggccagtcacctgaccccagcagtctatgcacggctctgcgacaagaccacacccactggttggacgctagatcagtgtatccagactggcgtggacaaccctggccaccccttcatcaagactgtgggcatggtggctggagatgaggagacctatgaggtatttgctgacctgtttgaccctgtgatccaagagcga

SEQ ID NO: 4213 - DNA, 563 bp, Homo sapiens
  source 1..563: mol_type = unassigned DNA; mol_type = unassigned DNA
gaactaggaactacggagagagaagccaagggagaggaggaggaggaaactaacgattccctgcccacccccacacccagcaccaccaacaggtgggcaagcttgccgagaaaacgcagagggcatcctgtgagcagcaaacacatctgagcctggaaaagacgcagagaagtaaaagatcaaagtctgattggcaccggctcccattccggctccagcctccaatccgacccccatttcggctgcagcctcggacctagctccggccctcggtctatccggttgcatcctccctccctgttccggatcttatcttgcgccagcgcctactccaggatcccgtagccagacctcaagccatggctggtcccttctcccgtctgctgtccgcccgcccgggactcaggctcctggctttggccggagcggggtctctagccgctgggtttctgctccgaccggaacctgtacgagctgccagtgaacgacggaggctgtatcccccgaggtaacagtgcctgaggcgcgggaggaggcgggggcaggaggtgatgggaacgaag

SEQ ID NO: 4214 - DNA, 800 bp, Homo sapiens
  source 1..800: mol_type = unassigned DNA; mol_type = unassigned DNA
ggcatcctgtgagcagcaaacacatctgagcctggaaaagacgcagagaagtaaaagatcaaagtctgattggcaccggctcccattccggctccagcctccaatccgacccccatttcggctgcagcctcggacctagctccggccctcggtctatccggttgcatcctccctccctgttccggatcttatcttgcgccagcgcctactccaggatcccgtagccagacctcaagccatggctggtcccttctcccgtctgctgtccgcccgcccgggactcaggctcctggctttggccggagcggggtctctagccgctgggtttctgctccgaccggaacctgtacgagctgccagtgaacgacggaggctgtatcccccgaggcttttcccctcctccatccgtagtgttgtgtcatgggaggaaagaactgagcagatctgaagaaactgagctggccagccagaggcaactagaactattaggaaagcatagactctgaaagtccctaaagagattaccaaggtttaccctctttctaattccccctcctcccgcggagcaaagccagacatggccaactggacagctcccaggtaactgcactaggtctaggcgtctgtgccctccctccatggttactgggtaccccctccccagcgctgagtacccagacctccgaaagcacaacaactgcatggccagtcacctgaccccagcagtctatgcacggctctgcgacaagaccacacccactggttggacgctagatcagtgtatccagactggcgtggac

SEQ ID NO: 4215 - DNA, 542 bp, Homo sapiens
  source 1..542: mol_type = unassigned DNA; mol_type = unassigned DNA
gtgtttattccgcggtttccccgcggctgcccccgggagaccgaagaggtggctggggcaggccgaaagcagaggaaagtctgattggcaccggctcccattccggctccagcctccaatccgacccccatttcggctgcagcctcggacctagctccggccctcggtctatccggttgcatcctccctccctgttccggatcttatcttgcgccagcgcctactccaggatcccgtagccagacctcaagccatggctggtcccttctcccgtctgctgtccgcccgcccgggactcaggctcctggctttggccggagcggggtctctagccgctgggtttctgctccgaccggaacctgtacgagctgccagtgaacgacggaggctgtatcccccgagccagacatggccaactggacagctcccaggtaactgcactaggtctaggcgtctgtgccctccctccatggttactgggtaccccctccccagcgctgagtacccagacctccgaaagcacaacaactgcatggccagtc

SEQ ID NO: 4216 - DNA, 593 bp, Homo sapiens
  source 1..593: mol_type = unassigned DNA; mol_type = unassigned DNA
gtttattccgcggtttccccgcggctgcccccgggagaccgaagaggtggctggggcaggccgaaagcagaggaaaggttgggcagtgtcacccttgcacacccacaggtctgattggcaccggctcccattccggctccagcctccaatccgacccccatttcggctgcagcctcggacctagctccggccctcggtctatccggttgcatcctccctccctgttccggatcttatcttgcgccagcgcctactccaggatcccgtagccagacctcaagccatggctggtcccttctcccgtctgctgtccgcccgcccgggactcaggctcctggctttggccggagcggggtctctagccgctgggtttctgctccgaccggaacctgtacgagctgccagtgaacgacggaggctgtatcccccgagcgctgagtacccagacctccgaaagcacaacaactgcatggccagtcacctgaccccagcagtctatgcacggctctgcgacaagaccacacccactggttggacgctagatcagtgtatccagactggcgtggacaaccctggccaccccttcatcaaga

SEQ ID NO: 4217 - DNA, 1747 bp, Homo sapiens
  source 1..1747: mol_type = unassigned DNA; mol_type = unassigned DNA
agacgcgcgagtctcaggtcccgctaattacctggcgggtgctgcccacccctgccctcgcgcacctagcgcggtggcaggcgggaaggcggggcctgggggagccccacccctggagactgcggctggggcctccctctcctccgcccgcccgcctgccactagctcattgcgcctctcctgcagtctgattggcaccggctcccattccggctccagcctccaatccgacccccatttcggctgcagcctcggacctagctccggccctcggtctatccggttgcatcctccctccctgttccggatcttatcttgcgccagcgcctactccaggatcccgtagccagacctcaagccatggctggtcccttctcccgtctgctgtccgcccgcccgggactcaggctcctggctttggccggagcggggtctctagccgctgggtttctgctccgaccggaacctgtacgagctgccagtgaacgacggaggctgtatcccccgagcgctgagtacccagacctccgaaagcacaacaactgcatggccagtcacctgaccccagcagtctatgcacggctctgcgacaagaccacacccactggttggacgctagatcagtgtatccagactggcgtggacaaccctggccaccccttcatcaagactgtgggcatggtggctggagatgaggagacctatgaggtatttgctgacctgtttgaccctgtgatccaagagcgacacaatggatatgacccccggacaatgaagcacaccacggatctagatgccagtaaaatccgttctggctactttgatgagaggtatgtattgtcctctagagtcagaactggccgaagcatccgaggactcagtctgcctccagcttgcactcgagcagagcgacgagaggtggaacgtgttgtggtggatgcactgagtggcctgaagggtgacctggctggacgttactataggctcagtgagatgacagaggctgaacagcagcagcttattgatgaccactttctgtttgataagcctgtgtccccgttgctgactgcagcaggaatggctcgagactggccagatgctcgtggaatttggcacaacaatgagaagagcttcctgatctgggtgaatgaggaggatcatacacgggtgatctccatggagaagggtggtaacatgaagagagtgtttgaaagattctgccgaggcctcaaagaggtggagagacttatccaagaacgtggctgggagttcatgtggaatgagcgtttgggatacatcttgacctgtccatctaacctgggcactggacttcgggcaggagtgcacatcaaactgcccctgctaagcaaagatagccgcttcccaaagatcctggagaacctaagactccaaaaacgtggtactggaggagtggacactgctgctacaggcggtgtctttgatatttctaatttggaccgactaggcaaatcagaggtggagctggtgcaactggtcatcgatggagtaaactatttgattgattgtgaacggcgtctggagagaggccaggatatccgcatccccacacctgtcatccacaccaagcattaactccccatcgccagctgatgactcaagattcccaggagttctgctcattctaatgatggcccattctacttgctctggacctgcccccgcatcccctgcctccatcctagtaaagactccttgctatgctgca

SEQ ID NO: 4218 - DNA, 599 bp, Homo sapiens
  source 1..599: mol_type = unassigned DNA; mol_type = unassigned DNA
actagctcattgcgcctctcctgcagtctgattggcaccggctcccattccggctccagcctccaatccgacccccatttcggctgcagcctcggacctagctccggccctcggtctatccggttgcatcctccctccctgttccggatcttatcttgcgccagcgcctactccaggatcccgtagccagacctcaagccatggctggtcccttctcccgtctgctgtccgcccgcccgggactcaggctcctggctttggccggagcggggtctctagccgctgggtttctgctccgaccggaacctgtacgagctgccagtgaacgacggaggctgtatcccccgaggcttttcccctcctccatccgtagtgttgtgtcatgggaggaaagaactgagcagatctgaagaaactgagctggccagccagaggcaactagaactattaggaaagcatagactctgaaagtccctaaagagattaccaaggtttaccctctttctaattccccctcctcccgcggagcaaagccagacatggccaactggacagctcccaggtaactgcactaggtctaggcgtctgtgccctccctc

SEQ ID NO: 4219 - DNA, 670 bp, Homo sapiens
  source 1..670: mol_type = unassigned DNA; mol_type = unassigned DNA
actagctcattgcgcctctcctgcagtctgattggcaccggctcccattccggctccagcctccaatccgacccccatttcggctgcagcctcggacctagctccggccctcggtctatccggttgcatcctccctccctgttccggatcttatcttgcgccagcgcctactccaggatcccgtagccagacctcaagccatggctggtcccttctcccgtctgctgtccgcccgcccgggactcaggctcctggctttggccggagcggggtctctagccgctgggtttctgctccgaccggaacctgtacgagctgccagtgaacgacggaggctgtatcccccgagcgctgagtacccagacctccgaaagcacaacaactgcatggccagtcacctgaccccagcagtctatgcacggctctgcgacaagaccacacccactggttggacgctagatcagtgtatccagactggcgtggacaaccctggccaccccttcatcaagactgtgggcatggtggctggagatgaggagacctatgaggtatttgctgacctgtttgaccctgtgatccaagagcgacacaatggatatgacccccggacaatgaagcacaccacggatctagatgccagtaaaagtcagaactggccgaagcatccgag

SEQ ID NO: 4220 - DNA, 801 bp, Homo sapiens
  source 1..801: mol_type = unassigned DNA; mol_type = unassigned DNA
attgcgcctctcctgcagtctgattggcaccggctcccattccggctccagcctccaatccgacccccatttcggctgcagcctcggacctagctccggccctcggtctatccggttgcatcctccctccctgttccggatcttatcttgcgccagcgcctactccaggatcccgtagccagacctcaagccatggctggtcccttctcccgtctgctgtccgcccgcccgggactcaggctcctggctttggccggagcggggtctctagccgctgggtttctgctccgaccggaacctgtacgagctgccagtgaacgacggaggctgtatcccccgagccagacatggccaactggacagctcccaggtaactgcactaggtctaggcgtctgtgccctccctccatggttactgggtaccccctccccagcgctgagtacccagacctccgaaagcacaacaactgcatggccagtcacctgaccccagcagtctatgcacggctctgcgacaagaccacacccactggttggacgctagatcagtgtatccagactggcgtggacaaccctggccaccccttcatcaagactgtgggcatggtggctggagatgaggagacctatgaggtatttgctgacctgtttgaccctgtgatccaagagcgacacaatggatatgacccccggacaatgaagcacaccacggatctagatgccagtaaaatccgttctggctactttgatgagaggtatgtattgtcctctagagtcagaactggccgaagcatccgagga

SEQ ID NO: 4221 - DNA, 2396 bp, Homo sapiens
  source 1..2396: mol_type = unassigned DNA; mol_type = unassigned DNA
attgcgcctctcctgcagtctgattggcaccggctcccattccggctccagcctccaatccgacccccatttcggctgcagcctcggacctagctccggccctcggtctatccggttgcatcctccctccctgttccggatcttatcttgcgccagcgcctactccaggatcccgtagccagacctcaagccatggctggtcccttctcccgtctgctgtccgcccgcccgggactcaggctcctggctttggccggagcggggtctctagccgctgggtttctgctccgaccggaacctgtacgagctgccagtgaacgacggaggctgtatcccccgagcgctgagtacccagacctccgaaagcacaacaactgcatggccagtcacctgaccccagcagtctatgcacggctctgcgacaagaccacacccactggttggacgctagatcagtgtatccagactggcgtggacaaccctggccaccccttcatcaagactgtgggcatggtggctggagatgaggagacctatgaggtatttgctgacctgtttgaccctgtgatccaagagcgacacaatggatatgacccccggacaatgaagcacaccacggatctagatgccagtaaaatccgttctggctactttgatgagaggtatgtattgtcctctagagtcagaactggccgaagcatccgaggactcagtctgcctccagcttgcactcgagcagagcgacgagaggtggaacgtgttgtggtggatgcactgagtggcctgaagggtgacctggctggacgttactataggctcagtgagatgacagaggctgaacagcagcagcttattgatgaccactttctgtttgataagcctgtgtccccgttgctgactgcagcaggaatggctcgagactggccagatgctcgtggaatttggcacaacaatgagaagagcttcctgatctgggtgaatgaggaggatcatacacgggtgatctccatggagaagggtggtaacatgaagagagtgtttgaaagattctgccgaggcctcaaagaggttgttgtggggattaagtgaaatacaggtaaagtacttggtccacagtaagtgcttaataagtgttaaagtgttagctgcaatattattctggatggaagagtttccccccatgttcagcatgtaagatatcccctatggcatggttccttctgaactataaagaggatccctttactcatgttgggttgtggtctttgtgaccatcattctgctagatcccttgtctcttgaactctaatagtcatcttcatgactacatggttaagtgaagccaaacgccttccccccgccccctattcctatgaatctggcttttctgctctgttttcatctttctctgcattcacacaggtgctccgttcacagctaacagaatgttatcttacctcttcctggcaaagcttacaccttcatcttctgtctgaagggacccttctaagctctaggctcattagcaaagcaaagataatcgatgcatgcagacctcattgaataatcagtcatctctcagttcagtttaccacctctgttcatttccctagatcatccttaatacaccactccttcgagttttcttcttccacataagatattttttcacaatctcattattatgcacatcataattttgcatcatgcatgcatgaaaacaataacaaacctttttcatttaaaaaaagaccaatgtcattcattcacagccaagtttctgttctagacatatttctagtgttcttgtgggtctagctaagggagggtccagggttaatgaaatatccctgatttttcgttaacaaaacctttgtggactcaggtggagagacttatccaagaacgtggctgggagttcatgtggaatgagcgtttgggatacatcttgacctgtccatctaacctgggcactggacttcgggcaggagtgcacatcaaactgcccctgctaagcaaagatagccgcttcccaaagatcctggagaacctaagactccaaaaacgtggtactggaggagtggacactgctgctacaggcggtgtctttgatatttctaatttggaccgactaggcaaatcagaggtggagctggtgcaactggtcatcgatggagtaaactatttgattgattgtgaacggcgtctggagagaggccaggatatccgcatccccacacctgtcatccacaccaagcattaactccccatcgccagctgatgactcaagattcccaggagttctgctcattctaatgatggcccattctacttgctctggacctgcccccgcatcccctgcctccatcctagtaaagactccttgctatgctgca

SEQ ID NO: 4222 - DNA, 545 bp, Homo sapiens
  source 1..545: mol_type = unassigned DNA; mol_type = unassigned DNA
ttgcgcctctcctgcagtctgattggcaccggctcccattccggctccagcctccaatccgacccccatttcggctgcagcctcggacctagctccggccctcggtctatccggttgcatcctccctccctgttccggatcttatcttgcgccagcgcctactccaggatcccgtagccagacctcaagccatggctggtcccttctcccgtctgctgtccgcccgcccgggactcaggctcctggctttggccggagcggggtctctagccgctgggtttctgctccgaccggaacctgtacgagctgccagtgaacgacggaggctgtatcccccgaggtatttgctgacctgtttgaccctgtgatccaagagcgacacaatggatatgacccccggacaatgaagcacaccacggatctagatgccagtaaaagtcagaactggccgaagcatccgaggactcagtctgcctccagcttgcactcgagcagagcgacgagaggtggaacgtgttgtggtggatgcactgagtggcctgaag

SEQ ID NO: 4223 - DNA, 260 bp, Homo sapiens
  source 1..260: mol_type = unassigned DNA; mol_type = unassigned DNA
ccttgctatgctgcagctgtctgtgttacttctaatggtggggtgaggagggagcagccttcaggaaatgaaaagaggcagtgggattatttatgatggaaagagactccagatatggcaacccaggaacactgattctcaggaatccaaccaaagggcctaaggtctccagcacttcccctgagactggagtctcctttggagcctggagaagagcatcagaacttggacaatgcacttctgactcagaataccagaca

SEQ ID NO: 4224 - DNA, 1779 bp, Homo sapiens
  source 1..1779: mol_type = unassigned DNA; mol_type = unassigned DNA
cttcacctcactttaccttctcctccagcacaggaactaggaactacggagagagaagccaagggagaggaggaggaggaaactaacgattccctgcccacccccacacccagcaccaccaacaggtgggcaagcttgccgagaaaacgcagagggcatcctgtgagcagcaaacacatctgagcctggaaaagacgcagagaagtaaaagatcaaagtctgattggcaccggctcccattccggctccagcctccaatccgacccccatttcggctgcagcctcggacctagctccggccctcggtctatccggttgcatcctccctccctgttccggatcttatcttgcgccagcgcctactccaggatcccgtagccagacctcaagccatggctggtcccttctcccgtctgctgtccgcccgcccgggactcaggctcctggctttggccggagcggggtctctagccgctgggtttctgctccgaccggaacctgtacgagctgccagtgaacgacggaggctgtatcccccgagcgctgagtacccagacctccgaaagcacaacaactgcatggccagtcacctgaccccagcagtctatgcacggctctgcgacaagaccacacccactggttggacgctagatcagtgtatccagactggcgtggacaaccctggccaccccttcatcaagactgtgggcatggtggctggagatgaggagacctatgaggtatttgctgacctgtttgaccctgtgatccaagagcgacacaatggatatgacccccggacaatgaagcacaccacggatctagatgccagtaaaatccgttctggctactttgatgagaggtatgtattgtcctctagagtcagaactggccgaagcatccgaggactcagtctgcctccagcttgcactcgagcagagcgacgagaggtggaacgtgttgtggtggatgcactgagtggcctgaagggtgacctggctggacgttactataggctcagtgagatgacagaggctgaacagcagcagcttattgatgaccactttctgtttgataagcctgtgtccccgttgctgactgcagcaggaatggctcgagactggccagatgctcgtggaatttggcacaacaatgagaagagcttcctgatctgggtgaatgaggaggatcatacacgggtgatctccatggagaagggtggtaacatgaagagagtgtttgaaagattctgccgaggcctcaaagaggtggagagacttatccaagaacgtggctgggagttcatgtggaatgagcgtttgggatacatcttgacctgtccatctaacctgggcactggacttcgggcaggagtgcacatcaaactgcccctgctaagcaaagatagccgcttcccaaagatcctggagaacctaagactccaaaaacgtggtactggaggagtggacactgctgctacaggcggtgtctttgatatttctaatttggaccgactaggcaaatcagaggtggagctggtgcaactggtcatcgatggagtaaactatttgattgattgtgaacggcgtctggagagaggccaggatatccgcatccccacacctgtcatccacaccaagcattaactccccatcgccagctgatgactcaagattcccaggagttctgctcattctaatgatggcccattctacttgctctggacctgcccccgcatcccctgcctccatcctagtaaagactccttgctatgctgca

SEQ ID NO: 4225 - DNA, 1074 bp, Homo sapiens
  source 1..1074: mol_type = unassigned DNA; mol_type = unassigned DNA
cagtctgattggcaccggctcccattccggctccagcctccaatccgacccccatttcggctgcagcctcggacctagctccggccctcggtctatccggttgcatcctccctccctgttccggatcttatcttgcgccagcgcctactccaggatcccgtagccagacctcaagccatggctggtcccttctcccgtctgctgtccgcccgcccgggactcaggctcctggctttggccggagcggggtctctagccgctgggtttctgctccgaccggaacctgtacgagctgccagtgaacgacggaggctgtatcccccgagcgctgagtacccagacctccgaaagcacaacaactgcatggccagtcacctgaccccagcagtctatgcacggctctgcgacaagaccacacccactggttggacgctagatcagtgtatccagactggcgtggacaaccctggccaccccttcatcaagactgtgggcatggtggctggagatgaggagacctatgaggtatttgctgacctgtttgaccctgtgatccaagagcgacacaatggatatgacccccggacaatgaagcacaccacggatctagatgccagtaaaatccgttctggctactttgatgagaggtatgtattgtcctctagagtcagaactggccgaagcatccgaggactcagtctgcctccagcttgcactcgagcagagcgacgagaggtggaacgtgttgtggtggatgcactgagtggcctgaagggtgacctggctggacgttactataggctcagtgagatgacagaggctgaacagcagcagcttattgatgaccactttctgtttgataagcctgtgtccccgttgctgactgcagcaggaatggctcgagactggccagatgctcgtggaatttggcacaacaatgagaagagcttcctgatctgggtgaatgaggaggatcatacacgggtgatctccatggagaagggtggtaacatgaagagagtgtttgaaagattctgccgaggcctcaaagaggttgttgtggggattaagtga

SEQ ID NO: 4226 - DNA, 2234 bp, Homo sapiens
  source 1..2234: mol_type = unassigned DNA; mol_type = unassigned DNA
gcggcctttcatttccgcttccggtgcgggccgcgcgcgagcgcagcggtgggaggcggcgaccagccggttgaggccccaggcttggcctcaccacaatgtggcacgaggctcggaagcatgagcggaagcttcgaggcatgatggtcgactacaagaagagggcggagcggagacgggagtattatgaaaagatcaagaaggacccagcccagttcctgcaggtacatggccgagcttgcaaggtgcacctggattctgcagtcgccctggccgctgagagccctgttaatatgatgccctggcagggggacaccaacaacatgattgaccgattcgatgtccgtgcccacctggaccacatccccgactacaccccccctctgctcaccaccatctccccagaacaggagtcggacgaacggaagtgtaactacgagcgctacagaggcctggtgcagaacgactttgccggcatctcagaggagcagtgcctgtaccagatctacattgatgagttgtacggaggcctccagagacccagcgaagatgagaagaagaagctggcagagaagaaggcttccatcggttatacctacgaggacagcacggtggccgaggtagagaaggcggcagaaaagccagaggaggaggagtcagcggccgaggaggagagcaactcggacgaagatgaggtcatccccgacatcgacgtggaggtggacgtggatgaattgaaccaggagcaggtggcagatctcaacaaacaggccacgacttatggcatggccgacggtgacttcgtcaggatgctccggaaagacaaggaggaggcagaggccatcaagcatgccaaggctcttgaggaggagaaggccatgtactcgggacgccgctctcgacgccagcggagagagtttcgggagaagcggctgaggggtcgcaagatcagcccacccagctatgcccgccgagacagccccacctatgacccctataagcggtcaccctcggagtccagctcagagtcccgctcccgctcccgctccccgaccccgggccgcgaggagaagatcacgttcatcaccagttttgggggcagcgatgaggaggcagccgcagccgctgctgccgcagcagcatcaggagtcaccacagggaagccccccgcacctccccagcctggcggccccgccccgggacgtaatgccagcgcccgccgccgctcctcctcctcctcctcctcctcttctgcctcgaggacctccagctcccgctccagctctcgctccagctcccgctctcgccgtggtgggggctactaccgttccggccgccacgcccgctcccggtcccgctcctggtcccgctcccgctcccgctcccggcgctattcccggtcccgtagccgtggccggcggcactcaggtgggggctcccgagacggacaccggtactcccgctcgcccgcccggcgtggtggttacgggccccggcgcagaagcaggagccgctcccactcaggggaccgctacaggcggggcggccggggcctcaggcaccacagcagtagccgcagccgcagcagctggtccctcagcccgtcccgcagtcgcagcctgactcgcagccgcagccatagccccagccccagccagagccgcagccgcagccgcagccgcagccagagcccctcgccatcacccgcaagagagaagctgaccaggccggccgcgtcccctgctgtgggcgagaagctgaaaaagaccgaacctgccgctggtaaagagacaggagctgccaaacccaagctgacgcctcaggagaagctgaaactgaggatgcagaaggcgctgaacaggcagttcaaggcggataagaaggcggcacaagaaaagatgatccagcaggagcatgagcggcaggagcgggaagacgagcttcgagccatggcccgcaagatccgcatgaaggagcgggaacgccgagagaaggagagagaagagtgggaacgccagtacagccggcagagccgctcaccctccccccgatacagtcgagaatacagctcttctcgaaggcgctcaaggtcccgatcccgaagcccccattaccgacattaggcagaagagtggggggtggggaggacaagggggtgggtaaggggctcaagctgtgatgctgctggttttatctctagtgaaataaagtcaaaagttatttaattcccgtca

SEQ ID NO: 4227 - DNA, 1941 bp, Homo sapiens
  source 1..1941: mol_type = unassigned DNA; mol_type = unassigned DNA
tttcatttccgcttccggtgcgggccgcgcgcgagcgcagcggtgggaggcggcgaccagccggttgaggccccaggcttggcctcaccacaatgtggcacgaggctcggaagcatgagcggaagcttcgaggcatgatggtcgactacaagaagagggcggagcggagacgggagtattatgaaaagatcaagaaggacccagcccagttcctgcaggagtcggacgaacggaagtgtaactacgagcgctacagaggcctggtgcagaacgactttgccggcatctcagaggagcagtgcctgtaccagatctacattgatgagttgtacggaggcctccagagacccagcgaagatgagaagaagaagctggcagagaagaaggcttccatcggttatacctacgaggacagcacggtggccgaggtagagaaggcggcagaaaagccagaggaggaggagtcagcggccgaggaggagagcaactcggacgaagatgaggtcatccccgacatcgacgtggaggtggacgtggatgaattgaaccaggagcaggtggcagatctcaacaaacaggccacgacttatggcatggccgacggtgacttcgtcaggatgctccggaaagacaaggaggaggcagaggccatcaagcatgccaaggctcttgaggaggagaaggccatgtactcgggacgccgctctcgacgccagcggagagagtttcgggagaagcggctgaggggtcgcaagatcagcccacccagctatgcccgccgagacagccccacctatgacccctataagcggtcaccctcggagtccagctcagagtcccgctcccgctcccgctccccgaccccgggccgcgaggagaagatcacgttcatcaccagttttgggggcagcgatgaggaggcagccgcagccgctgctgccgcagcagcatcaggagtcaccacagggaagccccccgcacctccccagcctggcggccccgccccgggacgtaatgccagcgcccgccgccgctcctcctcctcctcctcctcctcttctgcctcgaggacctccagctcccgctccagctctcgctccagctcccgctctcgccgtggtgggggctactaccgttccggccgccacgcccgctcccggtcccgctcctggtcccgctcccgctcccgctcccggcgctattcccggtcccgtagccgtggccggcggcactcaggtgggggctcccgagacggacaccggtactcccgctcgcccgcccggcgtggtggttacgggccccggcgcagaagcaggagccgctcccactcaggggaccgctacaggcggggcggccggggcctcaggcaccacagcagtagccgcagccgcagcagctggtccctcagcccgtcccgcagtcgcagcctgactcgcagccgcagccatagccccagccccagccagagccgcagccgcagccgcagccgcagccagagcccctcgccatcacccgcaagagagaagctgaccaggccggccgcgtcccctgctgtgggcgagaagctgaaaaagaccgaacctgccgctggtaaagagacaggagctgccaaacccaagctgacgcctcaggagaagctgaaactgaggatgcagaaggcgctgaacaggcagttcaaggcggataagaaggcggcacaagaaaagatgatccagcaggagcatgagcggcaggagcgggaagacgagcttcgagccatggcccgcaagatccgcatgaaggagcgggaacgccgagagaaggagagagaagagtgggaacgccagtacagccggcagagccgctcaccctccccccgatacagtcgagaatacagctcttctcgaaggcgctcaaggtcccgatcccgaagcccccattaccgacattaggcagaagagt

SEQ ID NO: 4228 - DNA, 582 bp, Homo sapiens
  source 1..582: mol_type = unassigned DNA; mol_type = unassigned DNA
atttccgcttccggtgcgggccgcgcgcgagcgcagcggtgggaggcggcgaccagccggttgaggccccaggcttggcctcaccacaatgtggcacgaggctcggaagcatgagcggaagcttcgaggcatgatggtcgactacaagaagagggcggagcggagacgggagtattatgaaaagatcaagaaggacccagcccagttcctgcaggtacatggccgagcttgcaaggtgcacctggattctgcagtcgccctggccgctgagagccctgttaatatgatgccctggcagggggacaccaacaacatgattgaccgattcgatgtccgtgcccacctggaccacatccccgactacaccccccctctgctcaccaccatgtaagccacctcccagggggttgccaggcacagcgtcatacccaggagcccctgttcttttcccagcctacctgtcaccttcctaggagccgttcctatttggtaccgccctgagcctgagggggatgcctcatttcccttcctgctggcttggggggggatccactccttctctctgatttcaaggtctcgccc

SEQ ID NO: 4229 - DNA, 572 bp, Homo sapiens
  source 1..572: mol_type = unassigned DNA; mol_type = unassigned DNA
atttccgcttccggtgcgggccgcgcgcgagcgcagcggtgggaggcggcgaccagccggttgaggccccaggcttggcctcaccacaatgtggcacgaggctcggaagcatgagcggaagcttcgaggcatgatggtcgactacaagaagagggcggagcggagacgggagtattatgaaaagatctctcagaggagcagtgcctgtaccagatctacattgatgagttgtacggaggcctccagagacccagcgaagatgagaagaagaagctggcagagaagaaggcttccatcggttatacctacgaggacagcacggtggccgaggtagagaaggcggcagaaaagccagaggaggaggagtcagcggccgaggaggagagcaactcggacgaagatgaggtcatccccgacatcgacgtggaggtggacgtggatgaattgaaccaggagcaggtggcagatctcaacaaacaggccacgacttatggcatggccgacggtgacttcgtcaggatgctccggaaagacaaggaggaggcagaggccatcaagcatgccaaggctct

SEQ ID NO: 4230 - DNA, 2213 bp, Homo sapiens
  source 1..2213: mol_type = unassigned DNA; mol_type = unassigned DNA
gcgggccgcgcgcgagcgcagcggtgggaggcggcgaccagccggttgaggccccaggcttggcctcaccacaatgtggcacgaggctcggaagcatgagcggaagcttcgaggcatgatggtcgactacaagaagagggcggagcggagacgggagtattatgaaaagatcaagaaggacccagcccagttcctgcaggtacatggccgagcttgcaaggtgcacctggattctgcagtcgccctggccgctgagagccctgttaatatgatgccctggcagggggacaccaacaacatgattgaccgattcgatgtccgtgcccacctggaccacatccccgactacaccccccctctgctcaccaccatctccccagaacaggagtcggacgaacggaagtgtaactacgagcgctacagaggcctggtgcagaacgactttgccggcatctcagaggagcagtgcctgtaccagatctacattgatgagttgtacggaggcctccagagacccagcgaagatgagaagaagaagctggcagagaagaaggcttccatcggttatacctacgaggacagcacggtggccgaggtagagaaggcggcagaaaagccagaggaggaggagtcagcggccgaggaggagagcaactcggacgaagatgaggtcatccccgacatcgacgtggaggtggacgtggatgaattgaaccaggagcaggtggcagatctcaacaaacaggccacgacttatggcatggccgacggtgacttcgtcaggatgctccggaaagacaaggaggaggcagaggccatcaagcatgccaaggctcttgaggaggagaaggccatgtactcgggacgccgctctcgacgccagcggagagagtttcgggagaagcggctgaggggtcgcaagatcagcccacccagctatgcccgccgagacagccccacctatgacccctataagcggtcaccctcggagtccagctcagagtcccgctcccgctcccgctccccgaccccgggccgcgaggagaagatcacgttcatcaccagttttgggggcagcgatgaggaggcagccgcagccgctgctgccgcagcagcatcaggagtcaccacagggaagccccccgcacctccccagcctggcggccccgccccgggacgtaatgccagcgcccgccgccgctcctcctcctcctcctcctcctcttctgcctcgaggacctccagctcccgctccagctctcgctccagctcccgctctcgccgtggtgggggctactaccgttccggccgccacgcccgctcccggtcccgctcctggtcccgctcccgctcccgctcccggcgctattcccggtcccgtagccgtggccggcggcactcaggtgggggctcccgagacggacaccggtactcccgctcgcccgcccggcgtggtggttacgggccccggcgcagaagcaggagccgctcccactcaggggaccgctacaggcggggcggccggggcctcaggcaccacagcagtagccgcagccgcagcagctggtccctcagcccgtcccgcagtcgcagcctgactcgcagccgcagccatagccccagccccagccagagccgcagccgcagccgcagccgcagccagagcccctcgccatcacccgcaagagagaagctgaccaggccggccgcgtcccctgctgtgggcgagaagctgaaaaagaccgaacctgccgctggtaaagagacaggagctgccaaagtcacccaagctgacgcctcaggagaagctgaaactgaggatgcagaaggcgctgaacaggcagttcaaggcggataagaaggcggcacaagaaaagatgatccagcaggagcatgagcggcaggagcgggaagacgagcttcgagccatggcccgcaagatccgcatgaaggagcgggaacgccgagagaaggagagagaagagtgggaacgccagtacagccggcagagccgctcaccctccccccgatacagtcgagaatacagctcttctcgaaggcgctcaaggtcccgatcccgaagcccccattaccgacattaggcagaagagtggggggtggggaggacaagggggtgggtaaggggctcaagctgtgatgctgctggttttatctctagtgaaataaagtcaaaagttatttaattcccgtca

SEQ ID NO: 4231 - DNA, 599 bp, Homo sapiens
  source 1..599: mol_type = unassigned DNA; mol_type = unassigned DNA
gcgcgagcgcagcggtgggaggcggcgaccagccggttgaggccccaggcttggcctcaccacaatgtggcacgaggctcggaagcatgagcggaagcttcgaggcatgatggtcgactacaagaagagggcggagcggagacgggagtattatgaaaagatcgtgagtaactggccttttgtctggggtgagggaccctgggttggggggcacagctggtcatcctggtaaaatctgggcttggaagtatgtcaagacaagaggctcatttcctcaggagtatattcattaatcttttcttgaggataatcattggtgggatcccaagggcttctgtttgttgtagcatactgtgtcgtttggtgtggcctcccagtgccgatccggtgttagcaagaaaaagggaagtctctgtaaccctcagagcagtcctgacgttagactggccacctccagaatgtctgtttcgcttattgctgtgttccccattcccagaagagctcagccactcttgagatttggcttggcacacaataggagtgagtattaagttggcctggcacagtggctcacgcctgtaatcccaagtggatcacct

SEQ ID NO: 4232 - DNA, 590 bp, Homo sapiens
  source 1..590: mol_type = unassigned DNA; mol_type = unassigned DNA
gcgcgagcgcagcggtgggaggcggcgaccagccgcgcgtggaatctaggacacccctttcccagtgatgctcacctcagaatcacctgagggtttttcagaatgcccaagcttctagatcgaagttgttagggatggacttgaacatctggcatactgttctgcagcttcacttctgctccctgaagctaagagatgtgttgtttgggatcgactctgccaccaacttgttagatgactttgattctgcccatacgggtttcacagaccatctgactttcctggtcccttcatccctcaggttgaggccccaggcttggcctcaccacaatgtggcacgaggctcggaagcatgagcggaagcttcgaggcatgatggtcgactacaagaagagggcggagcggagacgggagtattatgaaaagatcaagaaggacccagcccagttcctgcaggtacatggccgagcttgcaaggtgcacctggattctgcagtcgccctggccgctgagagccctgttaatatgatgccctggcagggggacaccaacaacatgattgaccgattcgatgtccgtgcccacctgga

SEQ ID NO: 4233 - DNA, 2769 bp, Homo sapiens
  source 1..2769: mol_type = unassigned DNA; mol_type = unassigned DNA
ctctttttctttggatgctctccccaccccgccatctagatcccatctttagacctcagcttcactctggtctccttgcaacactccctccccgtgttcccactccctctagcatcttcatcttccgccacgcccttcacctgtcctcgacctccaccttcatacaactgcactgttcccttaaaagctttctccgatttcctccacctgccttcatccttattctccttatccctctaccacccagactcatacccaaccccacgcatggcccctagtgggagccttttcagttcttctctttctcttgagctccagccttaagtgctcagggtttgccttctgaccctacttcaaacactgctgatgtttcaaaacctttcattcccgactccagcgcgtggaatctaggacacccctttcccagtgatgctcacctcagaatcacctgagggtttttcagaatgcccaagcttctagatcgaagttgttagggatggacttgaacatctggcatactgttctgcagcttcacttctgctccctgaagctaagagatgtgttgtttgggatcgactctgccaccaacttgttagatgactttgattctgcccatacgggtttcacagaccatctgactttcctggtcccttcatccctcaggttgaggccccaggcttggcctcaccacaatgtggcacgaggctcggaagcatgagcggaagcttcgaggcatgatggtcgactacaagaagagggcggagcggagacgggagtattatgaaaagatcaagaaggacccagcccagttcctgcaggtacatggccgagcttgcaaggtgcacctggattctgcagtcgccctggccgctgagagccctgttaatatgatgccctggcagggggacaccaacaacatgattgaccgattcgatgtccgtgcccacctggaccacatccccgactacaccccccctctgctcaccaccatctccccagaacaggagtcggacgaacggaagtgtaactacgagcgctacagaggcctggtgcagaacgactttgccggcatctcagaggagcagtgcctgtaccagatctacattgatgagttgtacggaggcctccagagacccagcgaagatgagaagaagaagctggcagagaagaaggcttccatcggttatacctacgaggacagcacggtggccgaggtagagaaggcggcagaaaagccagaggaggaggagtcagcggccgaggaggagagcaactcggacgaagatgaggtcatccccgacatcgacgtggaggtggacgtggatgaattgaaccaggagcaggtggcagatctcaacaaacaggccacgacttatggcatggccgacggtgacttcgtcaggatgctccggaaagacaaggaggaggcagaggccatcaagcatgccaaggctcttgaggaggagaaggccatgtactcgggacgccgctctcgacgccagcggagagagtttcgggagaagcggctgaggggtcgcaagatcagcccacccagctatgcccgccgagacagccccacctatgacccctataagcggtcaccctcggagtccagctcagagtcccgctcccgctcccgctccccgaccccgggccgcgaggagaagatcacgttcatcaccagttttgggggcagcgatgaggaggcagccgcagccgctgctgccgcagcagcatcaggagtcaccacagggaagccccccgcacctccccagcctggcggccccgccccgggacgtaatgccagcgcccgccgccgctcctcctcctcctcctcctcctcttctgcctcgaggacctccagctcccgctccagctctcgctccagctcccgctctcgccgtggtgggggctactaccgttccggccgccacgcccgctcccggtcccgctcctggtcccgctcccgctcccgctcccggcgctattcccggtcccgtagccgtggccggcggcactcaggtgggggctcccgagacggacaccggtactcccgctcgcccgcccggcgtggtggttacgggccccggcgcagaagcaggagccgctcccactcaggggaccgctacaggcggggcggccggggcctcaggcaccacagcagtagccgcagccgcagcagctggtccctcagcccgtcccgcagtcgcagcctgactcgcagccgcagccatagccccagccccagccagagccgcagccgcagccgcagccgcagccagagcccctcgccatcacccgcaagagagaagctgaccaggccggccgcgtcccctgctgtgggcgagaagctgaaaaagaccgaacctgccgctggtaaagagacaggagctgccaaagtcatcaaggcggataagaaggcggcacaagaaaagatgatccagcaggagcatgagcggcaggagcgggaagacgagcttcgagccatggcccgcaagatccgcatgaaggagcgggaacgccgagagaaggagagagaagagtgggaacgccagtacagccggcagagccgctcaccctccccccgatacagtcgagaatacagctcttctcgaaggcgctcaaggtcccgatcccgaagcccccattaccgacattaggcagaagagtggggggtggggaggacaagggggtgggtaaggggctcaagctgtgatgctgctggttttatctctagtgaaataaagtcaaaagttatttaattcccgt

SEQ ID NO: 4234 - DNA, 867 bp, Homo sapiens
  source 1..867: mol_type = unassigned DNA; mol_type = unassigned DNA
aagaagagggcggagcggagacgggagtattatgaaaagatcaagaaggacccagcccagttcctgcaggtacatggccgagcttgcaaggtgcacctggattctgcagtcgccctggccgctgagagccctgttaatatgatgccctggcagggggacaccaacaacatgattgaccgattcgatgtccgtgcccacctggaccacatccccgactacaccccccctctgctcaccaccatctccccagaacaggagtcggacgaacggaagtgtaactacgagcgctacagaggcctggtgcagaacgactttgccggcatctcagaggagcagtgcctgtaccagatctacattgatgagttgtacggaggcctccagagacccagcgaagatgagaagaagaagctggcagagaagaaggcttccatcggttatacctacgaggacagcacggtggccgaggtagagaaggcggcagaaaagccagaggaggaggagtcagcggccgaggaggagagcaactcggacgaagatgagacgtggaggtggacgtggatgaattgaaccaggagcaggtggcagatctcaacaaacaggccacgacttatggcatggccgacggtgacttcgtcaggatgctccggaaagacaaggaggaggcagaggccatcaagcatgccaaggctcttgaggaggagaaggccatgtactcgggacgccgctctcgacgccagcggagagagtttcgggagaagcggctgaggggtcgcaagatcagcccacccagctatgcccgccgagacagccccacctatgacccctataagcggtcaccctcggagtccagctcagagtcccgctccc

SEQ ID NO: 4235 - DNA, 967 bp, Homo sapiens
  source 1..967: mol_type = unassigned DNA; mol_type = unassigned DNA
gcagggggacaccaacaacatgattgaccgattcgatgtccgtgcccacctggaccacatccccgactacaccccccctctgctcaccaccatgtaagccacctcccagggggttgccaggcacagcgtcatacccaggagcccctgttcttttcccagcctacctgtcaccttcctaggagccgttcctatttggtaccgccctgagcctgagggggatgcctcatttcccttcctgctggcttggggggggatccactccttctctctgatttcaaggtctcgcccttccctaaagctccccagaacaggagtcggacgaacggaagtgtaactacgagcgctacagaggcctggtgcagaacgactttgccggcatctcagaggagcagtgcctgtaccagatctacattgatgagttgtacggaggcctccagagacccagcgaagatgagaagaagaagctggcagagaagaaggcttccatcggttatacctacgaggacagcacggtggccgaggtagagaaggcggcagaaaagccagaggaggaggagtcagcggccgaggaggagagcaactcggacgaagatgaggtcatccccgacatcggtggggtcccctctctgccctccccacctgcagtccctgggcatcgtttctgtgtctcgtccctcaccctctgtggggcaccccgtgcttacgaaccgtgtctctctccctaccccgccccagggcacaccagcctcctgctgcccctgtctcactcctgtcctcctccgttccggccttcctctgcctcactcatctctcatttctagggtgctatttctatgatcttttcccctcctaggtgttggctccattctcctccacttgggccggcctctctctgcctttgcccctctctcctgctctcttccctcctctggaaaacaagtgttcatcctcttacagagtcagcccc

SEQ ID NO: 4236 - DNA, 290 bp, Homo sapiens
  source 1..290: mol_type = unassigned DNA; mol_type = unassigned DNA
gccccagccccagccagagccgcagccgcagccgcagccgcagccagagcccctcgccatcacccgcaagagagaagctgaccaggccggccgcgtcccctgctgtgggcgagaagctgaaaaagaccgaacctgccgctggtaaagagacaggagctgccaaagtcagtaagaatttggaactcgcccgtctaattcccgtcagcagcagtgcccaagagctgggcccggtgggcctgcaggggggcccgggtgggctgggagatccagccccagggacagggagggga

SEQ ID NO: 4237 - DNA, 633 bp, Homo sapiens
  source 1..633: mol_type = unassigned DNA; mol_type = unassigned DNA
agaaccatgtccctctcccctcctcactgtacactggggctccacctgtcactgaacctctgggagcctcagggctgtccacagcctgcccctcctccccacgtcgttctcccccccccaccccccccccgcacaaagccccaggcttttggctgaggtgggttgtgggagctctgggacacccaccccctctcccgcctcttctcccccctccccagcccaagctgacgcctcaggagaagctgaaactgaggatgcagaaggcgctgaacaggcagttcaaggcggataagaaggcggcacaagaaaagatgatccagcaggagcatgagcggcaggagcgggaagacgagcttcgagccatggcccgcaagatccgcatgaaggagcgggaacgccgagagaaggagagagaagagtgggaacgccagtacagccggcagagccgctcaccctccccccgatacagtcgagaatacagctcttctcgaaggcgctcaaggtcccgatcccgaagcccccattaccgacattaggcagaagagtggggggtggggaggacaagggggtgggtaaggggctcaagctgtgatgctgctggttttatctctagtgaaataaagtcaaaagtta

SEQ ID NO: 4238 - DNA, 506 bp, Homo sapiens
  source 1..506: mol_type = unassigned DNA; mol_type = unassigned DNA
cccaagctgacgcctcaggagaagctgaaactgaggatgcagaaggcgctgaacaggcagttcaaggcggataagaaggcggcacaagaaaagatgatccagcaggagcatgagcggcaggagcgggaagacgagcttcgagccatggcccgcaagatccgcatgaaggtgttggaagcacctgccctccctgagttcagtgtgtccagtgttcccggccagatgctcatgccatgccttcgcagggagcgggaacgccgagagaaggagagagaagagtgggaacgccagtacagccggcagagccgctcaccctccccccgatacagtcgagaatacagctcttctcgaaggcgctcaaggtcccgatcccgaagcccccattaccgacattaggcagaagagtggggggtggggaggacaagggggtgggtaaggggctcaagctgtgatgctgctggttttatctctagtgaaataaagtcaaaagttatttaattcccgtc

SEQ ID NO: 4239 - DNA, 345 bp, Homo sapiens
  source 1..345: mol_type = unassigned DNA; mol_type = unassigned DNA
gcggcacaagaaaagatgatccagcaggagcatgagcggcaggtgaagtgggaaagggagggctggggtgacgggtgggtgctggcctggccacgtcctcatagccctgtctgctgcaggagcgggaagacgagcttcgagccatggcccgcaagatccgcatgaaggagcgggaacgccgagagaaggagagagaagagtgggaacgccagtacagccggcagagccgctcaccctccccccgatacagtcgagaatacagctcttctcgaaggcgctcaaggtcccgatcccgaagcccccattaccgacattaggcagaagagtggggggtggggaggacaa

SEQ ID NO: 4240 - DNA, 751 bp, Homo sapiens
  source 1..751: mol_type = unassigned DNA; mol_type = unassigned DNA
ggatttgacaagatcaaggccaggcacggaggaggcacccagtagacgtagccattgggttgccaagcctggccactgtgacggagaccatttcaacactcactgtgtgcaggtgccccagtgcggcaggaaatgatgggactatcctgcctccctctgttccccaggctttcctaggaaggggctgggattccagtcagccccgccagctggggtccctctgaacctggggctccctttccaagcggggattggtggcagtaccggcccccttggtttactgtcttcctcggagtagggtgttggaagcacctgccctccctgagttcagtgtgtccagtgttcccggccagatgctcatgccatgccttcgcagggagcgggaacgccgagagaaggagagagaagagtgggaacgccagtacagccggcagagccgctcaccctccccccgatacagtcgagaatacagctcttctcgaaggtaaggaagcccatgaccctccactttcttggaagtaacacttgtcctttgatgggaggtcctggctgtcattcctccagcctcaccctgtacccacctccagttggaggggctggtctcatcccttggggaacatccttccctccacagacaagtgccccgatcactgaagcatccacggccccaggtgtgttgatgtgtgtatgccccatcctcacggcccctccctttctctttccaggcgctcaaggtcccgatcccgaagcc

SEQ ID NO: 4241 - DNA, 445 bp, Homo sapiens
  source 1..445: mol_type = unassigned DNA; mol_type = unassigned DNA
cagtcagccccgccagctggggtccctctgaacctggggctccctttccaagcggggattggtggcagtaccggcccccttggtttactgtcttcctcggagtagggtgttggaagcacctgccctccctgagttcagtgtgtccagtgttcccggccagatgctcatgccatgccttcgcagggagcgggaacgccgagagaaggagagagaagagtgggaacgccagtacagccggcagagccgctcaccctccccccgatacagtcgagaatacagctcttctcgaaggcgctcaaggtcccgatcccgaagcccccattaccgacattaggcagaagagtggggggtggggaggacaagggggtgggtaaggggctcaagctgtgatgctgctggttttatctctagtgaaataaagtcaaaagttatttaattcccgtca

SEQ ID NO: 4242 - DNA, 3172 bp, Homo sapiens
  source 1..3172: mol_type = unassigned DNA; mol_type = unassigned DNA
agcaagagcagaggcttaaggagctacactgggggaaggacaggggcaagcaggccaaggcctggccggggctcggggggagggaatatggagcaatcccggtcacagcagcgtgggggtgaacaaagctggtggggtagtgacccccagtaccagtatatgccctttgaacactgcaccagctacggactgccctctgagaatgggggcctccagcacaggctccggaaggatgcaggcccccgccacaacgtccaccccacacagatttatggccatcacaaagaacaattctcagacagggagcaggacatagggatgcccaagaagacaggctccagttctaccgtggacagcaaggatgaggatcactattctaaatgtcaagattgtatccaccgcctgggacaggtggtgagaagaaaattaggggaagacgggatctttctggtgcttctgggactgctgatggctctggtcagctggagcatggactacgtcagtgccaaaagccttcaggcctacaagtggtcctacgcgcagatgcagcccagccttcctctgcagttcctggtctgggtcaccttcccactagtcctcatcctcttcagcgccctcttctgccacctcatctctccccaggctgttggctctggaatccccgaaatgaagacaatacttcgtggggttgtcctgaaggaatacctcacaatgaaagcctttgtggccaaggttgtcgccctgactgcgggcctgggcagtggcatccccgtggggaaagagggccccttcgtccacattgccagcatctgtgctgctgtcctcagcaaattcatgtctgtgttctgcggggtatatgagcagccatactactactctgatatcctgacggtgggctgtgctgtgggagtcggctgttgttttgggacaccacttggaggagtgctatttagcatcgaggtcacctccacctactttgctgttcggaactactggagaggattctttgcagccacgttcagcgcctttgtgtttcgagtgctggcagtgtggaacaaggatgctgtcaccatcactgctctgttcagaaccaatttccgaatggatttcccctttgacctgaaggaactaccagcttttgctgccatcgggatttgctgtgggctcctgggagctgtatttgtgtatctgcatcgccaagtcatgctcggtgtccgaaagcacaaggccctcagccagtttcttgctaagcaccgcctgctgtatcctggaattgttacctttgtcattgcctcattcaccttcccaccaggaatgggtcaattcatggctggagagttgatgccccgcgaagccatcagtactttgtttgacaacaatacatgggtgaaacacgcgggtgatcctgagagcctgggccagtcagctgtgtggattcacccccgggtcaacgttgtcatcatcatctttctcttcttcgtcatgaagttctggatgtccatcgtggccaccactatgcccataccctgcggaggcttcatgcctgtgtttgtgctaggagctgcatttggaaggctggtaggagaaatcatggccatgctctttcctgatggtattttgtttgatgacatcatctacaagatcctacctgggggctatgcagtaattggagcagcagcgctgactggtgccgtttcccacacagtctccacagctgtgatttgcttcgaattaacgggtcagattgctcacatcctgcccatgatggtggctgttatcttggccaacatggtggcccagagcctgcagccctctctctatgacagcatcatccaggtcaagaagctaccctacttgcctgaccttggctggaaccagctcagcaaatataccatctttgttgaggacatcatggtacgtgatgtgaagtttgtttcagcttcttacacatatggggagttgcgaaccctgctccagaccaccacagtcaagactttaccactggttgactcaaaagattcaatgatcctgctgggctcggtggagcggtcggaactgcaggccctcctgcagcgccacctgtgtcctgagcgcaggctgcgcgcagcccaagagatggcgcggaagttgtcggagctgccttacgacgggaaggcgcggctggctggggaggggctccccggcgcgcctccaggccggcccgagtccttcgcctttgtggatgaggatgaggacgaagacctctctggcaagagcgagcttcctccttcccttgctctccacccctctactactgcccctctgtccccagaagagcccaatgggcctctgcctggccacaaacagcagccggaagcaccagagcctgcaggtcaaagaccctccatcttccagtccctgcttcactgcttgctgggcagagctcgccccacaaagaagaaaacaacccaggattccacagatttagtggataacatgtcacctgaagagattgaggcctgggagcaggagcagctgagccagcctgtctgttttgattcctgctgtattgaccagtctcccttccagctggtggagcagacaaccctgcacaagactcataccctgttttcactccttggcctccacctcgcttacgtgaccagcatggggaagctcaggggcgtcctggccctggaggagctacagaaggccattgaggggcacaccaagtctggggtgcagctccgccctccccttgccagcttccggaacacgacttcaactcgaaagagtaccggggcacctccatcttctgcagagaactggaacctgcctgaggacaggcctggggccactggaacaggggatgtgattgctgcctccccagagacccctgtgccatctccttccccagagccccctctctccctggccccaggcaaggtagagggcgagttggaggagctggagctggtggagagtccagggctggaagaggagctggccgacatcttgcagggccccagcctgcgatccacagacgaggaggatgaggatgaactgatcctttgaccccctcccacgacctcctcataaagaccgtggagaggcccagcctgagggtgaacttgtgtggggcagggtgcgtcctgaatgtggcgaggtcatgccaatgtcgtggcctcttcca

SEQ ID NO: 4243 - DNA, 491 bp, Homo sapiens
  source 1..491: mol_type = unassigned DNA; mol_type = unassigned DNA
catctctccccaggctgttggctctggaatccccgaaatgaagacaatacttcgtggggttgtcctgaaggaatacctcacaatgaaagcctttgtggccaaggttgtcgccctgactgcgggcctgggcagtggcatccccgtggggaaagagcctgtgcctgtcctccaaatgtccacccctctttcacctgtggccccacatggagaccgtgcctgggcagcttgacctcctggtgtcggcctgtgcagtgggcgtgggatgctgctttgcagcccctgtcggagcagccatactactactctgatatcctgacggtgggctgtgctgtgggagtcggctgttgttttgggacaccacttggaggagtgctatttagcatcgaggtcacctccacctactttgctgttcggaactactggagaggattctttgcagccacgttcagcgcctttgtgtttcgagtgctggcagtgtggaacaaggatgc

SEQ ID NO: 4244 - DNA, 569 bp, Homo sapiens
  source 1..569: mol_type = unassigned DNA; mol_type = unassigned DNA
catctctccccaggctgttggctctggaatccccgaaatgaagacaatacttcgtggggttgtcctgaaggaatacctcacaatgaaagcctttgtggccaaggttgtcgccctgactgcgggcctgggcagtggcatccccgtggggaaagagggccccttcgtccacattgccagcatctgtgctgctgtcctcagcaaattcatgtctgtgttctgcggggtatatgagcctgtgcctgtcctccaaatgtccacccctctttcacctgtggccccacatggagaccgtgcctgggcagcttgacctcctggtgtcggcctgtgcagtgggcgtgggatgctgctttgcagcccctgtcggagcagccatactactactctgatatcctgacggtgggctgtgctgtgggagtcggctgttgttttgggacaccacttggaggagtgctatttagcatcgaggtcacctccacctactttgctgttcggaactactggagaggattctttgcagccacgttcagcgcctttgtgtttcgagtgctggcagtgtggaacaaggatgc

SEQ ID NO: 4245 - DNA, 278 bp, Homo sapiens
  source 1..278: mol_type = unassigned DNA; mol_type = unassigned DNA
catctctccccaggctgttggctctggaatccccgaaatgaagacaatacttcgtggggttgtcctgaaggaatacctcacaatgaaagcctttgtggccaaggttgtcgccctgactgcgggcctgggcagtggcatccccgtggggaaagaggagtgctatttagcatcgaggtcacctccacctactttgctgttcggaactactggagaggattctttgcagccacgttcagcgcctttgtgtttcgagtgctggcagtgtggaacaaggatgc

SEQ ID NO: 4246 - DNA, 582 bp, Homo sapiens
  source 1..582: mol_type = unassigned DNA; mol_type = unassigned DNA
agcgcgtggaaggcggcacgcagcggaggcggctgggaaggagcaataatcagacagctaaatggagtctgagcagctgttccatagaggctactatagaaacagctacaacagtataacaagtgcaagtagtgatgaggaacttttagatggagcaggtgttattatggactttcaaacatctgaagatgacaatttattagatggtgacactgcagttggaactcattatacaatgacaaatggaggcagcattaacagttctacacatttactggatcttttggatgaaccaattccaggtgttggtacatatgatgatttccatactattgattgggtgcgagaaaaatgtaaagacagagaaaggcatagacggatcaacagcaaaaagaaagaatcagcatgggaaatgacaaaaagtttgtatgatgcgtggtcaggatggctagtagtaacactaacaggattggcatcaggggcactggccggattaatagacattgctgccgattggatgactgacctaaaggagggcatttgccttagtgcgttgtggtacaaccacgaacagtgctgttg

SEQ ID NO: 4247 - DNA, 6692 bp, Homo sapiens
  source 1..6692: mol_type = unassigned DNA; mol_type = unassigned DNA
gtgacgtcacgcgtcgacgctggggcgtacctttcgggctcctgactcctgccgcttctcttccccttccgtgggtcagggccggtccggtccggaacctgcagcccctttcccagtgttctagttcgcccgtgacccggaataatgagcaaggagggtgtggtgggttgaaagccatcctactttactcccgagttagagcatggattcagttttagtcttaagggggaagtgagattggagatttttatttttaattttgggcagaagcaggttgactctagggatctccagagcgagaggatttaacttcatgttgctcccgtgtttgaaggaggacaataaaagtcccaccgggcaaaattttcgtaacctctgcggtagaaaacgtcaggtatcttttaaatcgcgatagttttcgctgtgtcaggctttcttcggtggagctccgagggtagctaggttctaggtttgaaacagatgcagaatccaaaggcagcgcaaaaaacagccaccgattttgctatgtctctgagctgcgagataatcagacagctaaatggagtctgagcagctgttccatagaggctactatagaaacagctacaacagtataacaagtgcaagtagtgatgaggaacttttagatggagcaggtgttattatggactttcaaacatctgaagatgacaatttattagatggtgacactgcagttggaactcattatacaatgacaaatggaggcagcattaacagttctacacatttactggatcttttggatgaaccaattccaggtgttggtacatatgatgatttccatactattgattgggtgcgagaaaaatgtaaagacagagaaaggcatagacggatcaacagcaaaaagaaagaatcagcatgggaaatgacaaaaagtttgtatgatgcgtggtcaggatggctagtagtaacactaacaggattggcatcaggggcactggccggattaatagacattgctgccgattggatgactgacctaaaggagggcatttgccttagtgcgttgtggtacaaccacgaacagtgctgttggggatctaatgaaacaacatttgaagagagggataaatgtccacagtggaaaacatgggcagaattaatcataggtcaagcagagggtcctggttcttatatcatgaactacataatgtacatcttctgggccttgagttttgcctttcttgcagtttccctggtaaaggtatttgctccatatgcctgtggctctggaattccagagattaaaactattttaagtggattcatcatcagaggttacttgggaaaatggactttaatgattaaaaccatcacattagtcctggctgtggcatcaggtttgagtttaggaaaagaaggtcccctggtacatgttgcctgttgctgcggaaatatcttttcctacctctttccaaagtatagcacaaacgaagctaaaaaaagggaggtgctatcagctgcctcagctgcaggggtttctgtagcttttggtgcaccaattggaggagttctttttagcctggaagaggttagctattattttcctctcaaaactttatggagatcattttttgctgctttagtggctgcatttgttttgaggtccatcaatccatttggtaacagccgtctggtccttttttatgtggagtatcatacaccatggtacctttttgaactgtttccttttattcttctaggggtatttggagggctttggggagcctttttcattagggcaaatattgcctggtgtcgtcgacgcaagtccacgaaatttggaaagtatcccgttctggaagtcattattgttgcagccattactgctgtgatagccttccctaatccatacactaggctaaacaccagtgaactgatcaaagagctttttacagactgtggtcccctggaatcctcttctctttgtgactacagaaatgacatgaatgccagtaaaattgtcgatgacattcctgatcgtccagcaggcattggagtatattcagctatatggcagttatgcctggcactcatatttaaaatcataatgacagtattcacttttggcatcaaggttccatcaggcttgttcatccccagcatggccattggagcgatcgcaggaaggattgtggggattgcggtggagcagcttgcctactatcaccacgactggtttatctttaaggagtggtgtgaggtcggggctgattgcattacacctggcctttatgccatggttggtgctgctgcatgcttaggtggtgtgacaagaatgactgtctccctggtggttattgtttttgagcttactggaggcttggaatatattgttccccttatggctgcagtcatgaccagtaaatgggttggagatgcctttggcagggaaggcatttatgaagcacacatccgattaaatggataccctttcttggatgcaaaagaagaattcactcataccaccctggctgctgacgttatgagacctcgaaggaatgatcctcccttagctgtcctgacacaggacaatatgacagtggatgatatagaaaacatgattaatgaaaccagctacaatggatttcctgtcataatgtcaaaagaatctcagagattagtgggatttgccctcagaagagacctgacaattgcaatagaaagtgccaggaaaaaacaagaaggtatcgttggcagttctcgggtgtgttttgcacagcacaccccatctcttccagcagaaagtcctcggccattgaagcttcgaagcattcttgacatgagcccttttacagtgacagaccacaccccaatggagatcgtggtggatattttccgaaagctgggactgaggcagtgccttgtaactcacaatgggcgcctccttggcattataacaaaaaaagatatcctccggcatatggcccagacggcaaaccaagaccccgcttcaataatgttcaactgaatctcacagatgaggagagagaagaaacggaagaggaagtttatttgttgaatagcacaactctttaacctgagggagtcatctacttttttttcctcctttacaaaaaaagaaaggaaatataaaagccgggtttttgcaacatggtttgcaaataatgctggtggaatggaggagttgtttggggagggaaaggagagagaaggaaaggagtgaggtatttcccgtctaacagaaagcagcgtatcaactcctattgttctgcactggatgcattcagctgaggatgtgcctgatagtgcaggcttgcgcctcaacagagatgacagcagagtcctcgagcacctggcctgttgctccaacattgcaaagacacattatcagtccctatttctagagggattactttgaattgagccatctataaaactgcaaggtcttgcccttttttttaatcaaaactgttctgtttaattcatgaattgtatagttaagcattacctttctacattccagaagagcctttatttctctctctctctctctctctctctctctctctactgagctgtaacaaagcctctttaaatcggtgtatccttttgaagcagtcctttctcatattgagatgtactgtgattttactgaggtttcatcacaagaagggagtgtttcttgtgccattaaccatgtagtttgtaccatcactaaatgcttggaacagtacacatgcaccacaacaaaggctcatcaaacaggtaaagtctcgaaggaagcgagaacgaaatctctcattgtgtgccgtgtggctcaaaaccgaaaacaatgaagcttggttttaaaggataaagttttcttttttgttttcctctcagactttatggataatgtgaccgggtcttatgcaaattttctatttctaaaactactactatgatatacaagtgctgttgagcataattaaataaaatgctgctgctttgacagtaaagagaaggaagtattctgattagctgtatctggtattaattgcatgttaaaacactggaatttttaaaattgaaattagatcagtcattcttttcttttctcaagatatctcatggctgacactgaagaagaaatgtaattcataacttgcactaaatgtatattttttttcttaaaaatttaccattcttatttatatttttatggattaaaatttataaaatacagatcagttaatattgcacttaagtaattttacctttttaatgtgatttttatagaataattcagacttacaaatacagagatatgaacaaagtttacagtgggaacaaaggtttaaaaaaaggttgtggttctctctctgtgatccagtgtgcacataaacctttctctgatctttcactgccatcctctggattatgtcttctgacctgtccattttgacccattaactggaaagttgaaaaactacattaactggaaagttgaaaaactacattactttggagaataaaaccgaaagttcgtgtataccttcttaaaaaaaaaatcaaaccaaaaatgtgaaaacaatagaattgcaaagatagcagttaaaattttaatctgaaaataacctttgaatctcgggctaggttacgtccatatttgaagtggtcagtgatggtttgaacattttttgcaggatgagtgaaaatgcactggattatatttgggatttttgtttttggaattgtctgttttaatcacagccttaattcacaattggcaaaggcagtttactcaaaggactgggctaaatattctgtaattatgcatttttgataggaaaatgaaatttttgcaaacagacattttctttttttttggctggagtgcagtggggcatggtcttggctcactgcagcgttgaccacctgggctcaagtgatactcccgcctcagccacccaagtagctggcactacgggcacacgccaccatgcccagctaatttttttgtatttttagtagagatggggttttgccatgctgcccaggctggtctcaactcctcagctcaagcaatctgcctgcgtgagcctcccaaagtggtggaattacaggcgtgggccactgcgcctggcccagacagacattttctgaaacacaactggcaatgagctgtttttacattttgaaagtgattcttcacttcctagttcttaattatagtatacctattaagatctgtaagatcctgaagacataagatcatgaagccatataagaatgaggattgaaagttgagcaaaattttcgggattttgggaaacattcttagctgtgctatctgcctaaaattattccttattacttctctcctttgacagacttcaagttttcttcatagccctttcaaagttttttgagccatccagagtaaaatcatttctaaatgatagttctgtatatctccaactcgtcttaagtgtatttgcctgtgtgcaacgtattgctagactatgaactcctcagcatggctgctggataacttaattgtcctgagttaatagccttcaaaggacaaatcggtttctttgcagatagcttcgtaaaacttcacatggagtttattttatcatatttcccttttttatttctgctcctcctttaattgcccatcttgcttcagagactgacatttcagggtggatattaattaaagcattaattttgttttttggtatatttctatccctagtatttctatcttactgctaaaatacaggaaaagtgccgtatttttaatgcatttagtggttttctttggtgttatctgttccatttttctttttcatacattgaagtgtgtctccttttcaaccaaaataatgaaatagtggagaccatgaaattgttgtgcctggctaattggcaaattaatttaccaatataataagtgtagcgccttgtttgaataccctttttgagaaggtatgatgagaatgggcaagggtgtcagcatctcttcttcttaataattaattgttttcagttttggttcacgaagaatgcttagttaatctgtaatgttgcctagagctgtatttatctgtttttatttatactagtgtagtaaagctgcatatcattacagtaaaaacgactactgtgatgagttaatcagaaaatctattaaaatctatatgacaatgtgtggtttggcctttaattatatctgtaacagtcctccctcttcactgctgccctacgcagtgtaggccgatatgcctggcacagggagccccaaaaaggtaataattataatgcttctctcaggttacaaagcatttctacactttgcaagcaaggagcaatagaagagtagatagatgctggattgacagcaggatgttcataccaccagcaatggtttagcgcccccatttgtcagtgaaagctgcaggtccacagaaaactgatttcatttcagctcactttcaaaagtgatttttttttttttcgcaagaaaaattacgctatttgcatgaaaagaggtaaaacgatttatttacatgtctttaaaaaatcaccttggacatttgctaatagaactgccaaaagagggtggtaagtaacaacctttgattaagatgtggtcttttactattaagcttttagtaaaaaggaacacactaaaa

SEQ ID NO: 4248 - DNA, 3635 bp, Homo sapiens
  source 1..3635: mol_type = unassigned DNA; mol_type = unassigned DNA
gtcacgcgtcgacgctggggcgtacctttcgggctcctgactcctgccgcttctcttccccttccgtgggtcagggccggtccggtccggaacctgcagcccctttcccagtgttctagttcgcccgtgacccggaataatgagcaaggagggtgtggtgggttgaaagccatcctactttactcccgagttagagcatggattcagttttagtcttaagggggaagtgagattggagatttttatttttaattttgggcagaagcaggttgactctagggatctccagagcgagaggatttaacttcatgttgctcccgtgtttgaaggaggacaataaaagtcccaccgggcaaaattttcgtaacctctgcggtagaaaacgtcaggtatcttttaaatcgcgatagttttcgctgtgtcaggctttcttcggtggagctccgagggtagctaggttctaggtttgaaacagatgcagaatccaaaggcagcgcaaaaaacagccaccgattttgctatgtctctgagctgcgagataatcagacagctaaatggagtctgagcagctgttccatagaggctactatagaaacagctacaacagtataacaagtgcaagtagtgatgaggaacttttagatggagcaggtgttattatggactttcaaacatctgaagatgacaatttattagatggtgacactgcagttggaactcattatacaatgacaaatggaggcagcattaacagttctacacatttactggatcttttggatgaaccaattccaggtgttggtacatatgatgatttccatactattgattgggtgcgagaaaaatgtaaagacagagaaaggcatagacggatcaacagcaaaaagaaagaatcagcatgggaaatgacaaaaagtttgtatgatgcgtggtcaggatggctagtagtaacactaacaggattggcatcaggggcactggccggattaatagacattgctgccgattggatgactgacctaaaggagggcatttgccttagtgcgttgtggtacaaccacgaacagtgctgttggggatctaatgaaacaacatttgaagagagggataaatgtccacagtggaaaacatgggcagaattaatcataggtcaagcagagggtcctggttcttatatcatgaactacataatgtacatcttctgggccttgagttttgcctttcttgcagtttccctggtaaaggtatttgctccatatgcctgtggctctggaattccagagattaaaactattttaagtggattcatcatcagaggttacttgggaaaatggactttaatgattaaaaccatcacattagtcctggctgtggcatcaggtttgagtttaggaaaagaaggtcccctggtacatgttgcctgttgctgcggaaatatcttttcctacctctttccaaagtatagcacaaacgaagctaaaaaaagggaggtgctatcagctgcctcagctgcaggggtttctgtagcttttggtgcaccaattggaggagttctttttagcctggaagaggttagctattattttcctctcaaaactttatggagatcattttttgctgctttagtggctgcatttgttttgaggtccatcaatccatttggtaacagccgtctggtccttttttatgtggagtatcatacaccatggtacctttttgaactgtttccttttattcttctaggggtatttggagggctttggggagcctttttcattagggcaaatattgcctggtgtcgtcgacgcaagtccacgaaatttggaaagtatcccgttctggaagtcattattgttgcagccattactgctgtgatagccttccctaatccatacactaggctaaacaccagtgaactgatcaaagagctttttacagactgtggtcccctggaatcctcttctctttgtgactacagaaatgacatgaatgccagtaaaattgtcgatgacattcctgatcgtccagcaggcattggagtatattcagctatatggcagttatgcctggcactcatatttaaaatcataatgacagtattcacttttggcatcaaggttccatcaggcttgttcatccccagcatggccattggagcgatcgcaggaaggattgtggggattgcggtggagcagcttgcctactatcaccacgactggtttatctttaaggagtggtgtgaggtcggggctgattgcattacacctggcctttatgccatggttggtgctgctgcatgcttaggtggtgtgacaagaatgactgtctccctggtggttattgtttttgagcttactggaggcttggaatatattgttccccttatggctgcagtcatgaccagtaaatgggttggagatgcctttggcagggaaggcatttatgaagcacacatccgattaaatggataccctttcttggatgcaaaagaagaattcactcataccaccctggctgctgacgttatgagacctcgaaggaatgatcctcccttagctgtcctgacacaggacaatatgacagtggatgatatagaaaacatgattaatgaaaccagctacaatggatttcctgtcataatgtcaaaagaatctcagagattagtgggatttgccctcagaagagacctgacaattgcaatagaaagtgccaggaaaaaacaagaaggtatcgttggcagttctcgggtgtgttttgcacagcacaccccatctcttccagcagaaagtcctcggccattgaagcttcgaagcattcttgacatgagcccttttacagtgacagaccacaccccaatggagatcgtggtggatattttccgaaagctgggactgaggcagtgccttgtaactcacaatgggattgtcttggggatcatcacaaagaagaacatattagagcatctcgagcaactaaagcagcacgtcgaacccttggcgcctccttggcattataacaaaaaaagatatcctccggcatatggcccagacggcaaaccaagaccccgcttcaataatgttcaactgaatctcacagatgaggagagagaagaaacggaagaggaagtttatttgttgaatagcacaactctttaacctgagggagtcatctacttttttttcctcctttacaaaaaaagaaaggaaatataaaagccgggtttttgcaacatggtttgcaaataatgctggtggaatggaggagttgtttggggagggaaaggagagagaaggaaaggagtgaggtatttcccgtctaacagaaagcagcgtatcaactcctattgttctgcactggatgcattcagctgaggatgtgcctgatagtgcaggcttgcgcctcaacagagatgacagcagagtcctcgagcacctggcctgttgctccaacattgcaaagacacattatcagtccctatttctagagggattactttgaattgagccatctataaaactgcaaggtcttgcccttttttttaatcaaaactgttctgtttaattcatgaattgtatagttaagcattacctttctacattccagaagagcctttatttctctctctctctctctct

SEQ ID NO: 4249 - DNA, 3208 bp, Homo sapiens
  source 1..3208: mol_type = unassigned DNA; mol_type = unassigned DNA
acgcgtcgacgctggggcgtacctttcgggctcctgactcctgccgcttctcttccccttccgtgggtcagggccggtccggtccggaacctgcagcccctttcccagtgttctagttcgcccgtgacccggaataatgagcaaggagggtgtggtgggttgaaagccatcctactttactcccgagttagagcatggattcagttttagtcttaagggggaagtgagattggagatttttatttttaattttgggcagaagcaggttgactctagggatctccagagcgagaggatttaacttcatgttgctcccgtgtttgaaggaggacaataaaagtcccaccgggcaaaattttcgtaacctctgcggtagaaaacgtcaggtatcttttaaatcgcgatagttttcgctgtgtcaggctttcttcggtggagctccgagggtagctaggttctaggtttgaaacagatgcagaatccaaaggcagcgcaaaaaacagccaccgattttgctatgtctctgagctgcgagataatcagacagctaaatggagtctgagcagctgttccatagaggctactatagaaacagctacaacagtataacaagtgcaagtagtgatgaggaacttttagatggagcaggtgttattatggactttcaaacatctgaagatgacaatttattagatggtgacactgcagttggaactcattatacaatgacaaatggaggcagcattaacagttctacacatttactggatcttttggatgaaccaattccaggtgttggtacatatgatgatttccatactattgattgggtgcgagaaaaatgtaaagacagagaaaggcatagacggatcaacagcaaaaagaaagaatcagcatgggaaatgacaaaaagtttgtatgatgcgtggtcaggatggctagtagtaacactaacaggattggcatcaggggcactggccggattaatagacattgctgccgattggatgactgacctaaaggagggcatttgccttagtgcgttgtggtacaaccacgaacagtgctgttggggatctaatgaaacaacatttgaagagagggataaatgtccacagtggaaaacatgggcagaattaatcataggtcaagcagagggtcctggttcttatatcatgaactacataatgtacatcttctgggccttgagttttgcctttcttgcagtttccctggtaaaggtatttgctccatatgcctgtggctctggaattccagagattaaaactattttaagtggattcatcatcagaggttacttgggaaaatggactttaatgattaaaaccatcacattagtcctggctgtggcatcaggtttgagtttaggaaaagaaggtcccctggtacatgttgcctgttgctgcggaaatatcttttcctacctctttccaaagtatagcacaaacgaagctaaaaaaagggaggttagctattattttcctctcaaaactttatggagatcattttttgctgctttagtggctgcatttgttttgaggtccatcaatccatttggtaacagccgtctggtccttttttatgtggagtatcatacaccatggtacctttttgaactgtttccttttattcttctaggggtatttggagggctttggggagcctttttcattagggcaaatattgcctggtgtcgtcgacgcaagtccacgaaatttggaaagtatcccgttctggaagtcattattgttgcagccattactgctgtgatagccttccctaatccatacactaggctaaacaccagtgaactgatcaaagagctttttacagactgtggtcccctggaatcctcttctctttgtgactacagaaatgacatgaatgccagtaaaattgtcgatgacattcctgatcgtccagcaggcattggagtatattcagctatatggcagttatgcctggcactcatatttaaaatcataatgacagtattcacttttggcatcaaggttccatcaggcttgttcatccccagcatggccattggagcgatcgcaggaaggattgtggggattgcggtggagcagcttgcctactatcaccacgactggtttatctttaaggagtggtgtgaggtcggggctgattgcattacacctggcctttatgccatggttggtgctgctgcatgcttaggtggtgtgacaagaatgactgtctccctggtggttattgtttttgagcttactggaggcttggaatatattgttccccttatggctgcagtcatgaccagtaaatgggttggagatgcctttggcagggaaggcatttatgaagcacacatccgattaaatggataccctttcttggatgcaaaagaagaattcactcataccaccctggctgctgacgttatgagacctcgaaggaatgatcctcccttagctgtcctgacacaggacaatatgacagtggatgatatagaaaacatgattaatgaaaccagctacaatggatttcctgtcataatgtcaaaagaatctcagagattagtgggatttgccctcagaagagacctgacaattgcaatagaaagtgccaggaaaaaacaagaaggtatcgttggcagttctcgggtgtgttttgcacagcacaccccatctcttccagcagaaagtcctcggccattgaagcttcgaagcattcttgacatgagcccttttacagtgacagaccacaccccaatggagatcgtggtggatattttccgaaagctgggactgaggcagtgccttgtaactcacaatgggcgcctccttggcattataacaaaaaaagatatcctccggcatatggcccagacggcaaaccaagaccccgcttcaataatgttcaactgaatctcacagatgaggagagagaagaaacggaagaggaagtttatttgttgaatagcacaactctttaacctgagggagtcatctacttttttttcctcctttacaaaaaaagaaaggaaatataaaagccgggtttttgcaacatggtttgcaaataatgctggtggaatggaggagttgtttggggagggaaaggagagagaaggaaaggagtgaggtatttcccgtctaacagaaagcagcgtatcaactcctattgttctgcactggatgcattcagc

SEQ ID NO: 4250 - DNA, 563 bp, Homo sapiens
  source 1..563: mol_type = unassigned DNA; mol_type = unassigned DNA
tttcgggctcctgactcctgccgcttctcttccccttccgtgggtcagggccggtccggtccggaacctgcagcccctttcccagtgttctagttcgcccgtgacccggaataatgagcaaggagggtgtgataatcagacagctaaatggagtctgagcagctgttccatagaggctactatagaaacagctacaacagtataacaagtgcaagtagtgatgaggaacttttagatggagcaggtgttattatggactttcaaacatctgaagatgacaatttattagatggtgacactgcagttggaactcattatacaatgacaaatggaggcagcattaacagttctacacatttactggatcttttggatgaaccaattccaggtgttggtacatatgatgatttccatactattgattgggtgcgagaaaaatgtaaagacagagaaaggcatagacggatcaacagcaaaaagaaagaatcagcatgggaaatgacaaaaagtttgtatgatgcgtggtcaggatggctagtagtaacactaacaggattggcatc

SEQ ID NO: 4251 - DNA, 567 bp, Homo sapiens
  source 1..567: mol_type = unassigned DNA; mol_type = unassigned DNA
ataacaagtgcaagtagtgatgaggaacttttagatggagcaggtgttattatggactttcaaacatctgaagatgacaatttattagatggtgacactgcagttgagacggggtttctccatgttgctcaggctggtctgcaactcctgggctcaagcaatctacctgccttggcctttcaaagtgctgggactacaggcgtaagccaccgtgcccgtcctcacagggcttttattattaacattcttcaatatctcctacttgaatcacaagattccacaatgacaccattattatatagtataaacattgattatttgtgatgttctggtaggattcataggtgtattttagactatcttcgaatagatggactgtatagagagtttcaggaggtcatcaatgtatattttttctgaggtttgatatatattaggtaacagtgattttagaattataacagagctatattataaaagagtatattatttacatttagctagtttttctttagcaacagaacacaacccagctgaatgtaagactgaatagaagccaccagaagt

SEQ ID NO: 4252 - DNA, 2485 bp, Homo sapiens
  source 1..2485: mol_type = unassigned DNA; mol_type = unassigned DNA
agttttgtgtgttgtacttggagcttagtcattgtcatacgtagcaggacctgattaagaaggctgtgccgcctctaagccttgctagattgtagccactagcaaccaggctgcaataatttccctttgatgacatcatccactgtggaagaacccagttgcttcagcgagtcgaactacagttttaacctcatcaaatatggcatctcccttgcttgctgcagcagggatggaagaaatgtcactttctttttaagctagcaagctttttctttttctttttcttcttctatttaaaaattctaatcatggatgcttcttccgacccttatttgccttatgacgggggaggagacagtattcccctgagggaattacataaaagaggaactcattatacaatgacaaatggaggcagcattaacagttctacacatttactggatcttttggatgaaccaattccaggtgttggtacatatgatgatttccatactattgattgggtgcgagaaaaatgtaaagacagagaaaggcatagacggatcaacagcaaaaagaaagaatcagcatgggaaatgacaaaaagtttgtatgatgcgtggtcaggatggctagtagtaacactaacaggattggcatcaggggcactggccggattaatagacattgctgccgattggatgactgacctaaaggagggcatttgccttagtgcgttgtggtacaaccacgaacagtgctgttggggatctaatgaaacaacatttgaagagagggataaatgtccacagtggaaaacatgggcagaattaatcataggtcaagcagagggtcctggttcttatatcatgaactacataatgtacatcttctgggccttgagttttgcctttcttgcagtttccctggtaaaggtatttgctccatatgcctgtggctctggaattccagagattaaaactattttaagtggattcatcatcagaggttacttgggaaaatggactttaatgattaaaaccatcacattagtcctggctgtggcatcaggtttgagtttaggaaaagaaggtcccctggtacatgttgcctgttgctgcggaaatatcttttcctacctctttccaaagtatagcacaaacgaagctaaaaaaagggaggtgctatcagctgcctcagctgcaggggtttctgtagcttttggtgcaccaattggaggagttctttttagcctggaagaggttagctattattttcctctcaaaactttatggagatcattttttgctgctttagtggctgcatttgttttgaggtccatcaatccatttggtaacagccgtctggtccttttttatgtggagtatcatacaccatggtacctttttgaactgtttccttttattcttctaggggtatttggagggctttggggagcctttttcattagggcaaatattgcctggtgtcgtcgacgcaagtccacgaaatttggaaagtatcccgttctggaagtcattattgttgcagccattactgctgtgatagccttccctaatccatacactaggctaaacaccagtgaactgatcaaagagctttttacagactgtggtcccctggaatcctcttctctttgtgactacagaaatgacatgaatgccagtaaaattgtcgatgacattcctgatcgtccagcaggcattggagtatattcagctatatggcagttatgcctggcactcatatttaaaatcataatgacagtattcacttttggcatcaaggttccatcaggcttgttcatccccagcatggccattggagcgatcgcaggaaggattgtggggattgcggtggagcagcttgcctactatcaccacgactggtttatctttaaggagtggtgtgaggtcggggctgattgcattacacctggcctttatgccatggttggtgctgctgcatgcttaggtggtgtgacaagaatgactgtctccctggtggttattgtttttgagcttactggaggcttggaatatattgttccccttatggctgcagtcatgaccagtaaatgggttggagatgcctttggcagggaaggcatttatgaagcacacatccgattaaatggataccctttcttggatgcaaaagaagaattcactcataccaccctggctgctgacgttatgagacctcgaaggaatgatcctcccttagctgtcctgacacaggacaatatgacagtggatgatatagaaaacatgattaatgaaaccagctacaatggatttcctgtcataatgtcaaaagaatctcagagattagtgggatttgccctcagaagagacctgacaattgcaatagaaagtgccaggaaaaaacaagaaggtatcgttggcagttctcgggtgtgttttgcacagcacaccccatctcttccagcagaaagtcctcggccattgaagcttcgaag

SEQ ID NO: 4253 - DNA, 493 bp, Homo sapiens
  source 1..493: mol_type = unassigned DNA; mol_type = unassigned DNA
caaatggaggcagcattaacagttctacacatttactggatcttttggatgaaccaattccaggtgttggtacatatgatgatttccatactattgattgggtgcgagaaaaatgtaaagacagagaaaggcatagacggtttacttataccctgtaactttccagaaaggatttcaggtagctaaaaaacaaagaaatacaataagaagacaaaataagaaggaaagggaaaaatacagcacaggagttggggggaagaacaagccaagttccagatatggaggtcagcatgattttgggctttgagcagcccaccagctaaggcaaaaaaggaaactcattgcatagctcttacctatggaaaaagaagaaatctactgggggcagatggtcttgtgggattttgctgttttcttttatctcctttcccagcatttgattctgagatatttctcaatttggctcccaaataaagcttattgagtgttgtaa

SEQ ID NO: 4254 - DNA, 735 bp, Homo sapiens
  source 1..735: mol_type = unassigned DNA; mol_type = unassigned DNA
ctgcaggggtttctgtagcttttggtgcaccaattggaggagttctttttagcctggaagaggttagctattattttcctctcaaaactttatggagatcattttttgctgctttagtggctgcatttgttttgaggtccatcaatccatttggggtatttggagggctttggggagcctttttcattagggcaaatattgcctggtgtcgtcgacgcaagtccacgaaatttggaaagtatcccgttctggaagtcattattgttgcagccattactgctgtgatagccttccctaatccatacactaggctaaacaccagtgaactgatcaaagagctttttacagactgtggtcccctggaatcctcttctctttgtgactacagaaatgacatgaatgccagtaaaattgtcgatgacattcctgatcgtccagcaggcattggagtatattcagctatatggcagttatgcctggcactcatatttaaaatcataatgacagtattcacttttggcatcaaggttccatcaggcttgttcatccccagcatggccattggagcgatcgcaggaaggattgtggggattgcggtggagcagcttgcctactatcaccacgactggtttatctttaaggagtggtgtgaggtcggggctgattgcattacacctggcctttatgccatggttggtgctgctgcatgcttaggtggtgtgacaagaatgactg

SEQ ID NO: 4255 - DNA, 5874 bp, Homo sapiens
  source 1..5874: mol_type = unassigned DNA; mol_type = unassigned DNA
agttttgtgtgttgtacttggagcttagtcattgtcatacgtagcaggacctgattaagaaggctgtgccgcctctaagccttgctagattgtagccactagcaaccaggctgcaataatttccctttgatgacatcatccactgtggaagaacccagttgcttcagcgagtcgaactacagttttaacctcatcaaatatggcatctcccttgcttgctgcagcagggatggaagaaatgtcactttctttttaagctagcaagctttttctttttctttttcttcttctatttaaaaattctaatcatggatgcttcttccgacccttatttgccttatgacgggggaggagacagtattcccctgagggaattacataaaagaggaactcattatacaatgacaaatggaggcagcattaacagttctacacatttactggatcttttggatgaaccaattccaggtgttggtacatatgatgatttccatactattgattgggtgcgagaaaaatgtaaagacagagaaaggcatagacggatcaacagcaaaaagaaagaatcagcatgggaaatgacaaaaagtttgtatgatgcgtggtcaggatggctagtagtaacactaacaggattggcatcaggggcactggccggattaatagacattgctgccgattggatgactgacctaaaggagggcatttgccttagtgcgttgtggtacaaccacgaacagtgctgttggggatctaatgaaacaacatttgaagagagggataaatgtccacagtggaaaacatgggcagaattaatcataggtcaagcagagggtcctggttcttatatcatgaactacataatgtacatcttctgggccttgagttttgcctttcttgcagtttccctggtaaaggtatttgctccatatgcctgtggctctggaattccagagattaaaactattttaagtggattcatcatcagaggttacttgggaaaatggactttaatgattaaaaccatcacattagtcctggctgtggcatcaggtttgagtttaggaaaagaaggtcccctggtacatgttgcctgttgctgcggaaatatcttttcctacctctttccaaagtatagcacaaacgaagctaaaaaaagggaggtgctatcagctgcctcagctgcaggggtttctgtagcttttggtgcaccaattggaggagttctttttagcctggaagaggttagctattattttcctctcaaaactttatggagatcattttttgctgctttagtggctgcatttgttttgaggtccatcaatccatttggtaacagccgtctggtccttttttatgtggagtatcatacaccatggtacctttttgaactgtttccttttattcttctaggggtatttggagggctttggggagcctttttcattagggcaaatattgcctggtgtcgtcgacgcaagtccacgaaatttggaaagtatcccgttctggaagtcattattgttgcagccattactgctgtgatagccttccctaatccatacactaggctaaacaccagtgaactgatcaaagagctttttacagactgtggtcccctggaatcctcttctctttgtgactacagaaatgacatgaatgccagtaaaattgtcgatgacattcctgatcgtccagcaggcattggagtatattcagctatatggcagttatgcctggcactcatatttaaaatcataatgacagtattcacttttggcatcaaggttccatcaggcttgttcatccccagcatggccattggagcgatcgcaggaaggattgtggggattgcggtggagcagcttgcctactatcaccacgactggtttatctttaaggagtggtgtgaggtcggggctgattgcattacacctggcctttatgccatggttggtgctgctgcatgcttaggtggtgtgacaagaatgactgtctccctggtggttattgtttttgagcttactggaggcttggaatatattgttccccttatggctgcagtcatgaccagtaaatgggttggagatgcctttggcagggaaggcatttatgaagcacacatccgattaaatggataccctttcttggatgcaaaagaagaattcactcataccaccctggctgctgacgttatgagacctcgaaggaatgatcctcccttagctgtcctgacacaggacaatatgacagtggatgatatagaaaacatgattaatgaaaccagctacaatggatttcctgtcataatgtcaaaagaatctcagagattagtgggatttgccctcagaagagacctgacaattgcaatagaaagtgccaggaaaaaacaagaaggtatcgttggcagttctcgggtgtgttttgcacagcacaccccatctcttccagcagaaagtcctcggccattgaagcttcgaagcattcttgacatgagcccttttacagtgacagaccacaccccaatggagatcgtggtggatattttccgaaagctgggactgaggcagtgccttgtaactcacaatgggcgcctccttggcattataacaaaaaaagatatcctccggcatatggcccagacggcaaaccaagaccccgcttcaataatgttcaactgaatctcacagatgaggagagagaagaaacggaagaggaagtttatttgttgaatagcacaactctttaacctgagggagtcatctacttttttttcctcctttacaaaaaaagaaaggaaatataaaagccgggtttttgcaacatggtttgcaaataatgctggtggaatggaggagttgtttggggagggaaaggagagagaaggaaaggagtgaggtatttcccgtctaacagaaagcagcgtatcaactcctattgttctgcactggatgcattcagctgaggatgtgcctgatagtgcaggcttgcgcctcaacagagatgacagcagagtcctcgagcacctggcctgttgctccaacattgcaaagacacattatcagtccctatttctagagggattactttgaattgagccatctataaaactgcaaggtcttgcccttttttttaatcaaaactgttctgtttaattcatgaattgtatagttaagcattacctttctacattccagaagagcctttatttctctctctctctctctctctctctctctctctactgagctgtaacaaagcctctttaaatcggtgtatccttttgaagcagtcctttctcatattgagatgtactgtgattttactgaggtttcatcacaagaagggagtgtttcttgtgccattaaccatgtagtttgtaccatcactaaatgcttggaacagtacacatgcaccacaacaaaggctcatcaaacaggtaaagtctcgaaggaagcgagaacgaaatctctcattgtgtgccgtgtggctcaaaaccgaaaacaatgaagcttggttttaaaggataaagttttcttttttgttttcctctcagactttatggataatgtgaccgggtcttatgcaaattttctatttctaaaactactactatgatatacaagtgctgttgagcataattaaataaaatgctgctgctttgacagtaaagagaaggaagtattctgattagctgtatctggtattaattgcatgttaaaacactggaatttttaaaattgaaattagatcagtcattcttttcttttctcaagatatctcatggctgacactgaagaagaaatgtaattcataacttgcactaaatgtatattttttttcttaaaaatttaccattcttatttatatttttatggattaaaatttataaaatacagatcagttaatattgcacttaagtaattttacctttttaatgtgatttttatagaataattcagacttacaaatacagagatatgaacaaagtttacagtgggaacaaaggtttaaaaaaaggttgtggttctctctctgtgatccagtgtgcacataaacctttctctgatctttcactgccatcctctggattatgtcttctgacctgtccattttgacccattaactggaaagttgaaaaactacattaactggaaagttgaaaaactacattactttggagaataaaaccgaaagttcgtgtataccttcttaaaaaaaaaatcaaaccaaaaatgtgaaaacaatagaattgcaaagatagcagttaaaattttaatctgaaaataacctttgaatctcgggctaggttacgtccatatttgaagtggtcagtgatggtttgaacattttttgcaggatgagtgaaaatgcactggattatatttgggatttttgtttttggaattgtctgttttaatcacagccttaattcacaattggcaaaggcagtttactcaaaggactgggctaaatattctgtaattatgcatttttgataggaaaatgaaatttttgcaaacagacattttctttttttttggctggagtgcagtggggcatggtcttggctcactgcagcgttgaccacctgggctcaagtgatactcccgcctcagccacccaagtagctggcactacgggcacacgccaccatgcccagctaatttttttgtatttttagtagagatggggttttgccatgctgcccaggctggtctcaactcctcagctcaagcaatctgcctgcgtgagcctcccaaagtggtggaattacaggcgtgggccactgcgcctggcccagacagacattttctgaaacacaactggcaatgagctgtttttacattttgaaagtgattcttcacttcctagttcttaattatagtatacctattaagatctgtaagatcctgaagacataagatcatgaagccatataagaatgaggattgaaagttgagcaaaattttcgggattttgggaaacattcttagctgtgctatctgcctaaaattattccttattacttctctcctttgacagacttcaagttttcttcatagccctttcaaagttttttgagccatccagagtaaaatcatttctaaatgatagttctgtatatctccaactcgtcttaagtgtatttgcctgtgtgcaacgtattgctagactatgaactcctcagcatggctgctggataacttaattgtcctgagttaatagccttcaaaggacaaatcggtttctttgcagatagcttcgtaaaacttcacatggagtttattttatcatatttcccttttttatttctgctcctcctttaattgcccatcttgcttcagagactgacatttcagggtggatattaattaaagcattaattttgttttttggtatatttctatccctagtatttctatcttactgctaaaatacaggaaaagtgccgtatttttaatgcatttagtggttttctttggtgttatctgttccatttttctttttcatacattgaagtgtgtctccttttcaaccaaaataatgaaatagtggagaccatgaaattgttgtgcctggctaattggcaaattaatttaccaatataataagtgtagcgccttgtttgaataccctttttgagaaggtatgatgagaatgggcaagggtgtcagcatctcttcttcttaataattaattgttttcagttttggttcacgaagaatgcttagttaatctgtaatgttgcctagagctgtatttatctgtttttatttatactagtgtagtaaagctgcatatcattacagtaaaaacgactactgtgatgagttaatcagaaaatctattaaaatctatatgacaatg

SEQ ID NO: 4256 - DNA, 5592 bp, Homo sapiens
  source 1..5592: mol_type = unassigned DNA; mol_type = unassigned DNA
atggtgaagcttcctataggagagtctcactatgttgtccaggctggtctccaactcctgggctcaagcaaccctcctgccttggcctcccaagtagctgagattacaggaactcattatacaatgacaaatggaggcagcattaacagttctacacatttactggatcttttggatgaaccaattccaggtgttggtacatatgatgatttccatactattgattgggtgcgagaaaaatgtaaagacagagaaaggcatagacggatcaacagcaaaaagaaagaatcagcatgggaaatgacaaaaagtttgtatgatgcgtggtcaggatggctagtagtaacactaacaggattggcatcaggggcactggccggattaatagacattgctgccgattggatgactgacctaaaggagggcatttgccttagtgcgttgtggtacaaccacgaacagtgctgttggggatctaatgaaacaacatttgaagagagggataaatgtccacagtggaaaacatgggcagaattaatcataggtcaagcagagggtcctggttcttatatcatgaactacataatgtacatcttctgggccttgagttttgcctttcttgcagtttccctggtaaaggtatttgctccatatgcctgtggctctggaattccagagattaaaactattttaagtggattcatcatcagaggttacttgggaaaatggactttaatgattaaaaccatcacattagtcctggctgtggcatcaggtttgagtttaggaaaagaaggtcccctggtacatgttgcctgttgctgcggaaatatcttttcctacctctttccaaagtatagcacaaacgaagctaaaaaaagggaggtgctatcagctgcctcagctgcaggggtttctgtagcttttggtgcaccaattggaggagttctttttagcctggaagaggttagctattattttcctctcaaaactttatggagatcattttttgctgctttagtggctgcatttgttttgaggtccatcaatccatttggtaacagccgtctggtccttttttatgtggagtatcatacaccatggtacctttttgaactgtttccttttattcttctaggggtatttggagggctttggggagcctttttcattagggcaaatattgcctggtgtcgtcgacgcaagtccacgaaatttggaaagtatcccgttctggaagtcattattgttgcagccattactgctgtgatagccttccctaatccatacactaggctaaacaccagtgaactgatcaaagagctttttacagactgtggtcccctggaatcctcttctctttgtgactacagaaatgacatgaatgccagtaaaattgtcgatgacattcctgatcgtccagcaggcattggagtatattcagctatatggcagttatgcctggcactcatatttaaaatcataatgacagtattcacttttggcatcaaggttccatcaggcttgttcatccccagcatggccattggagcgatcgcaggaaggattgtggggattgcggtggagcagcttgcctactatcaccacgactggtttatctttaaggagtggtgtgaggtcggggctgattgcattacacctggcctttatgccatggttggtgctgctgcatgcttaggtggtgtgacaagaatgactgtctccctggtggttattgtttttgagcttactggaggcttggaatatattgttccccttatggctgcagtcatgaccagtaaatgggttggagatgcctttggcagggaaggcatttatgaagcacacatccgattaaatggataccctttcttggatgcaaaagaagaattcactcataccaccctggctgctgacgttatgagacctcgaaggaatgatcctcccttagctgtcctgacacaggacaatatgacagtggatgatatagaaaacatgattaatgaaaccagctacaatggatttcctgtcataatgtcaaaagaatctcagagattagtgggatttgccctcagaagagacctgacaattgcaatagaaagtgccaggaaaaaacaagaaggtatcgttggcagttctcgggtgtgttttgcacagcacaccccatctcttccagcagaaagtcctcggccattgaagcttcgaagcattcttgacatgagcccttttacagtgacagaccacaccccaatggagatcgtggtggatattttccgaaagctgggactgaggcagtgccttgtaactcacaatgggcgcctccttggcattataacaaaaaaagatatcctccggcatatggcccagacggcaaaccaagaccccgcttcaataatgttcaactgaatctcacagatgaggagagagaagaaacggaagaggaagtttatttgttgaatagcacaactctttaacctgagggagtcatctacttttttttcctcctttacaaaaaaagaaaggaaatataaaagccgggtttttgcaacatggtttgcaaataatgctggtggaatggaggagttgtttggggagggaaaggagagagaaggaaaggagtgaggtatttcccgtctaacagaaagcagcgtatcaactcctattgttctgcactggatgcattcagctgaggatgtgcctgatagtgcaggcttgcgcctcaacagagatgacagcagagtcctcgagcacctggcctgttgctccaacattgcaaagacacattatcagtccctatttctagagggattactttgaattgagccatctataaaactgcaaggtcttgcccttttttttaatcaaaactgttctgtttaattcatgaattgtatagttaagcattacctttctacattccagaagagcctttatttctctctctctctctctctctctctctctctctactgagctgtaacaaagcctctttaaatcggtgtatccttttgaagcagtcctttctcatattgagatgtactgtgattttactgaggtttcatcacaagaagggagtgtttcttgtgccattaaccatgtagtttgtaccatcactaaatgcttggaacagtacacatgcaccacaacaaaggctcatcaaacaggtaaagtctcgaaggaagcgagaacgaaatctctcattgtgtgccgtgtggctcaaaaccgaaaacaatgaagcttggttttaaaggataaagttttcttttttgttttcctctcagactttatggataatgtgaccgggtcttatgcaaattttctatttctaaaactactactatgatatacaagtgctgttgagcataattaaataaaatgctgctgctttgacagtaaagagaaggaagtattctgattagctgtatctggtattaattgcatgttaaaacactggaatttttaaaattgaaattagatcagtcattcttttcttttctcaagatatctcatggctgacactgaagaagaaatgtaattcataacttgcactaaatgtatattttttttcttaaaaatttaccattcttatttatatttttatggattaaaatttataaaatacagatcagttaatattgcacttaagtaattttacctttttaatgtgatttttatagaataattcagacttacaaatacagagatatgaacaaagtttacagtgggaacaaaggtttaaaaaaaggttgtggttctctctctgtgatccagtgtgcacataaacctttctctgatctttcactgccatcctctggattatgtcttctgacctgtccattttgacccattaactggaaagttgaaaaactacattaactggaaagttgaaaaactacattactttggagaataaaaccgaaagttcgtgtataccttcttaaaaaaaaaatcaaaccaaaaatgtgaaaacaatagaattgcaaagatagcagttaaaattttaatctgaaaataacctttgaatctcgggctaggttacgtccatatttgaagtggtcagtgatggtttgaacattttttgcaggatgagtgaaaatgcactggattatatttgggatttttgtttttggaattgtctgttttaatcacagccttaattcacaattggcaaaggcagtttactcaaaggactgggctaaatattctgtaattatgcatttttgataggaaaatgaaatttttgcaaacagacattttctttttttttggctggagtgcagtggggcatggtcttggctcactgcagcgttgaccacctgggctcaagtgatactcccgcctcagccacccaagtagctggcactacgggcacacgccaccatgcccagctaatttttttgtatttttagtagagatggggttttgccatgctgcccaggctggtctcaactcctcagctcaagcaatctgcctgcgtgagcctcccaaagtggtggaattacaggcgtgggccactgcgcctggcccagacagacattttctgaaacacaactggcaatgagctgtttttacattttgaaagtgattcttcacttcctagttcttaattatagtatacctattaagatctgtaagatcctgaagacataagatcatgaagccatataagaatgaggattgaaagttgagcaaaattttcgggattttgggaaacattcttagctgtgctatctgcctaaaattattccttattacttctctcctttgacagacttcaagttttcttcatagccctttcaaagttttttgagccatccagagtaaaatcatttctaaatgatagttctgtatatctccaactcgtcttaagtgtatttgcctgtgtgcaacgtattgctagactatgaactcctcagcatggctgctggataacttaattgtcctgagttaatagccttcaaaggacaaatcggtttctttgcagatagcttcgtaaaacttcacatggagtttattttatcatatttcccttttttatttctgctcctcctttaattgcccatcttgcttcagagactgacatttcagggtggatattaattaaagcattaattttgttttttggtatatttctatccctagtatttctatcttactgctaaaatacaggaaaagtgccgtatttttaatgcatttagtggttttctttggtgttatctgttccatttttctttttcatacattgaagtgtgtctccttttcaaccaaaataatgaaatagtggagaccatgaaattgttgtgcctggctaattggcaaattaatttaccaatataataagtgtagcgccttgtttgaataccctttttgagaaggtatgatgagaatgggcaagggtgtcagcatctcttcttcttaataattaattgttttcagttttggttcacgaagaatgcttagttaatctgtaatgttgcctagagctgtatttatctgtttttatttatactagtgtagtaaagctgcatatcattacagtaaaaacgactactgtgatgagttaatcagaaaatctattaaaatctatatgac

SEQ ID NO: 4257 - DNA, 10108 bp, Homo sapiens
  source 1..10108: mol_type = unassigned DNA; mol_type = unassigned DNA
gtcacatgagccgcgcgcccgcttcgctccccctcctccccggctgggctgtgtgaatgaagctctgccggctacgtggggcgctcactcaacttggtgtcctggacgccagagccgaccgagcgcgctgcccaccggcggcggacacgggctccgccgctccggacctcggcgacagagcaaatcagttgcctggagttcccagtgaagttgtacctgtgcccgtgcgataacgtcagtggaagctgccccgagtaagtgagggaaatctagaagtttggagcataaaaaaccagcacgaatcaactttacataaacttcatacatttattagcaactgctcgggtttaacttcagggatgttaaatttcgcctagtcccacgggacgatgatcattacttcttaactgcacgcgaaataggagaagaaaaaaggcaaatcaaaacagactgtcccaggtctcagagaagtcatcggagcgctttttcctgctgaattcaccctaggagtttgtttggggctttagccccttggagaaaacagggccacatagctgcctttctatcaagtctccctacaaaactgagaggctctgggaaactcagcctgtgaccccagcgtgggtgaagataggatcaagatggccatgtggcagggtgccatggataacagaggctttcagcaggggagttttagtagcttccagaacagctccagtgatgaagacctgatggacattccagcaaccgctatggatttctccatgagagatgatgttcctcccttagaccgagaagtaggagaggacaagtcgtacaatggtggaggaataggttcttcaaataggatcatggacttcttggaggagccaatccctggtgtagggacctatgatgatttcaatacaattgattgggtgagagagaagtctcgagaccgggataggcaccgagagattaccaataaaagcaaagagtcaacatgggccttaattcacagtgtgagtgatgctttttccggctggttgttgatgctccttattgggcttttatcaggttcgttagctggtttgatagacatctctgctcattggatgacagacttaaaagaaggtatatgcacagggggattctggtttaaccatgaacattgttgctggaactctgagcatgtcacctttgaagagagagacaaatgtccagagtggaatagttggtcccagcttatcatcagcacagatgagggagcctttgcctacatagtcaattatttcatgtacgtcctctgggctctcctatttgccttccttgccgtatctcttgtcaaggtgtttgcgccttatgcctgtggctctggaatccctgagataaaaactatcttgagtggtttcattattaggggctatttgggtaagtggactctggttatcaaaaccatcaccttggtgctggcagtgtcatctggcttgagcctgggcaaagagggccctctagtgcacgtggcttgctgctgtgggaacatcctgtgccactgcttcaacaaatacaggaagaatgaagccaagcgcagagaggtcttgtcggctgcagcagcagctggtgtatctgtagcctttggagcacctataggtggagtattattcagccttgaagaggtcagctactattttcccctcaaaacattgtggcgttcattctttgctgccttggtggcagcattcactctacgctccatcaatccatttgggaacagccgcctggtactattttatgtggagtttcacaccccatggcatctctttgagctcgtgccattcattctgctgggcatatttggtggtctgtggggagcactgtttatccgcacaaacattgcctggtgtcggaagcgaaagaccacccagttgggcaagtatcctgttatagaggtactcgtcgtgacagccatcactgccatcctggctttccccaatgaatacactcggatgagcacaagtgagctcatttctgagctgtttaatgactgtggccttctggactcctccaagctctgtgattatgagaaccgtttcaacacaagcaaagggggtgaactgcctgacagaccggctggcgtgggagtctacagtgcaatgtggcagctggctttaacactcatactgaaaattgtcattactatattcacctttggcatgaagatcccttctggcctctttatccctagcatggctgttggtgctatagcaggtcgacttctaggagtaggaatggaacagctggcttattaccaccaggaatggaccgtcttcaatagctggtgtagtcagggagctgattgcatcacccccggcctttatgcaatggttggggctgcagcctgcttaggtggggtgactcggatgactgtttctcttgttgtcataatgtttgaactgactggtggcttagaatacatcgtgcctctgatggctgcagccatgacaagcaagtgggtggcagatgctcttgggcgggagggcatctatgatgcccacatccgtctcaatggatacccctttcttgaagccaaagaagagtttgctcataagaccctggcaatggatgtgatgaaaccccggagaaatgatcctttgttgactgtccttactcaggacagtatgactgtggaagatgtagagaccataatcagtgaaaccacttacagtggcttcccagtggtggtatcccgggagtcccaaagacttgtgggctttgtcctccgaagagatctcattatttcaattgaaaatgctcgaaagaaacaggatggggttgttagcacttccatcatttatttcacggagcattctcctccattgccaccatacactccacccactctaaagcttcggaacatcctcgatctcagccccttcactgtgactgaccttacacccatggagatcgtagtggatattttccgaaagctgggactgcggcagtgcctggttacacacaacgggcgattgcttggaatcattaccaaaaaggatgtgttaaagcatatagcacagatggcgaaccaagatcctgattccattctcttcaactagaatcatagagttctggatgtaaagcgggaaggacattacagaccatggatatgttgtattaactgggtacccaaaacacattttccatatttggatggtgaagtcacattagtgtgttgtctctttcctacaagttaaccagttgcactacataatctctggaaattaattttctctttaggagaaattatagttaggcttccatgatgttacattaggaagatatcatgaaagaataaataagattgctatggtttaattatatttgctttttaaaagatttttttaacttaaaaagtagttagccaatatgcaatcactgaaaactatgcaagagaaattccaaccgtcctgacctataacctgtaggaaaccgacgaaaaagtcactcttttgggatctaactgttgttactggaagacgaagtgtaaactaaggggctttgcttttcaaaccagagaaaggaaagccagaaggaaaagagtaatggtattttctagactgtgaagattcagttcaaatgttatccttgttcctgttacaatatttagcattattagtttgttatgtgtgtatgtttatgttaattttaatttctgattataagacaatgctgctttggttaatctcttctaaatgaatttagagagattgacttttatagcttgcttgttgctggtactcttttgaagtgcacaaagataagttatagagctttctccttgtctgcaaaaacggtaattttccaggtggcatttgttagctggtagacaaggactttgccgtgaatttgttagtagcaaggaatgatttcttccagcttccttgaaatgaataattagtaaacttctaagcaaagtcaatgactaggagtttcacatgtttgtgaggtcctaactaattctcttacccagatgccacctccatgaatgatggtgctttaggcttctggaatatgtaaaaacagcaaagggaaccaagtctagactgcatactggtaaaccagggaagactcagaactgcatatgcatcctcatgcattcctttgtaaagaccaccagtactaaaataactggacactcattgtacctcccagcgataagtatgtgtaacaggccagtgtgttgtccccatgatcatgaattaggcttgggatgcttccaaatatattcaaggtgttggaacaggataggcagctgtgactccctcaagagtccttagaattctaaataaaatgcagagccatcctaagacacaggggtatggacaaggcctggtgacaccaaaggtgcttgtatccaattgaaaaggtgcctgtctcaatttcataccacctttattgcagttaaaaaaaaatcacactctggggacacttggtggaattacagagccaccatcatcattccaaccactatttcattttctgtagttttacctgtgtgcaattactccccctccattctgttccacttcttactccttagtaccaaatcctctgtttgggattgagcgctgctcctggttaatcattcctactacaaaaaaaaataactcccagggctagttaaattgtaaaccaaggctcagcagtctcacaacacatggaccagaggtgacacacagccatttcctttgccatgtggcccagttgctgctgccatgcctccatttccacactggatgcctacggcagtgagatttcactgccggggtaagagttcagcctggatgattttatagctctgttcctagcacttctcatcatccttccagcccagaatcagcggtcattctgcatattcccaccaaccctctacccccaaacacttcagtgtacctcattttaagagttgctgatccctgattctaggacgtttttacccatagttcttgtctttccaaaatctgaaattcttttttttgctcagaactgggtagccaagggttattttatttttatctttaaaataatcaaggcagtcgctagagtttctccttgtgaatagatcactctagcattttaatgaaaaagaaaaaaatctttctggggtatgttgtatcatagtaatggctcagtaaccacatattttgtcctttccatgtcactgattccttcatatgagactatttggcttgactaccctgtatattgtgtagaaatcaaagttcttatctgtacatttctggtccaatacctgtcttattagttgtccttccccactaaagtttgcaaaacagaaaatgttactatttctggtatttaatgacaatgaaaggtttggtcatatttcatagtgcagtagcgataaggagggtgtctcaagtttgcttttgtgtttcttctaggctttgttcttgattttagacagatgagccagtgttaaggtgctacttcagagaataaattagagaaatcagataacactgtgccaaggtatactttgtagatgctaagcaccgattggccctccagagaatgacaatatccctttgatacctcactcctgatcaatctcattcattaacctcagcttctcaggaatccttgtagcttgtatgctagaagtagctatggtatatggtatccactatatgtccagtcctatggtttggctcaaaggttggctaattgcagctagagctctcaactgctagctcagcaccttgacatttgaagtttcttgtcttgaggagaaggaaaatgttctttctgccattgccactttaacagttggacatgcttaagcaacaaatacagccagtatagggaggactgtcagtagcatcaaatggccacatacctcaatggcaaaagactagatggtttgtgatttaaaaattaatgagtcgagatgagactattttggtattaaatgagaaaattgcctaacacaagggaagggtttacaaaagaatgccaattagtgtttcaacagagttaggattttccaagtaagagtagctggtagccatccagccataaaaggaacgagagtctatagatttgtaaaagtaaaactgctatattttgtatcttcaaatcttcaatataaagaatttaaagaacctgaaacagttaatgcatgattcgttatattggagggaaaaagcaggggactgataatacaaaataatggcaactttaaagatcatttctacgtggatgtttggttagaaacatattccaatgctctcctctttctctggccacagcatcctggctcagcccagctgtggagtagaggtggtaagatccacagaacagatatcctctggtagataagctgacattgatgatactttgaatttaccagctggtgaagcaaacgattaatttgtgattgaactgaaaagcagttgaattgttttgacaccagaggctgaatctaaaccctttacaggaagagcagagcatactatacatttcttagcagatcttcaattctgtttgaacatgatgaagtaaccagggtttagtgagatctaaggccgtgaagtaattcacaaccaagatcttatgaacgcattcagatgtgaggggggcaaatatgttttcaaaaacttagtgtgcaatagagtccattatagaaattaaccactgctatatgttttaagtagttcaatcacctgttgtggttcagtcttgattattgtttattttgttaggtgataagtaggaagatgcacttgttatcccacactatctcttgttttgttttgttttgtttttaaataatgaacagtgcaatctttgaacttgagtttttaataatgatagcaaagacaatggtgagaacttgaaacagccagcatattttatattgccaaagtacttactgatgactgaccacactgtcttgtgaggaactgggtcccctgcactggatcagagccaaatgcaagccacccatcagttcagaggaagcaggaaaacatcttttgggtggtgcatagaacattgagctcttaaaaacccggagaaaaattaggaatttagaaagtaagtgggaggtagaatattgagtccttttttaaaaaaaagaattgatgtctaaatatgtagtctgaacttaagtgtcctaaaaccttgttttttgtttttttgttttttgaggagtcgtcttgctctatcaccaggtgggagtgcagtggcacaatctcggctcactgtaacctctgcctcctgcctcccgggtccaagcaattcccctgcctcagtctcccaagtaggtgggactacaggcgcacaccaccatgcccagctaacttttgtatttttagtagagacggggtttcaccatgttggccaggatggtctcgatctcttgacctcgtgatccacccatctcggcctcccaaagtgctgggattataggtgtgagccaccgcacccagccaaaccttgatttttttagccacctctgggattgcctgggttccctttggagaagaaactaaaagttatggccatagaaaaagccctggtaagaaaatatttgaatggtgtaagatggtggaaggaaagccatcccacacccctacaacatatgttctggcatttataaactgcttgattgtgtgcctcaaggggagaaaaagtcaagcaatgcttcaaaggccaggctttctaagcaaatgagtggttcaaagcagtgtttggctcaagggcagtctggttttatggatagggccgacccaagacatctgctcatgaagaaatgtggcatctgttgccatttcctaaactataaggtttagatagattgtcttgaattttgatagcaaatttttttaaatttatatttctgcctcctcgtacatccttatatatggaaaaaaaagtaagagttcctcagatcagagctcagtagctgtgtcaatttgaagttcaatcagtgtagttgtcctggggtgatcgctgactctgctctgtttcatatttcagttgcttgctccaaggagagaatttctgagaacaatgggtgttagcaactttaagttactccccaaacgtttgctggccacattctcatttctaaacatctggatctgggtaaaggtttgaatagatgtagggaacaaaattggtttttccatggtgtagtctaattttgccaaatcacccaagaaagaaagtatatgacgtgtggagtttgcatttcttggatgggacctatcgggtcacccagcccagtcttacagtcataaattcctacctcttagttcctgccaaagggccttcagcctctgtgtgcacacttattgaatgaatgctttgcctaaagtttggccttttgaagaaaaacagcatgtgataatataaaaatatgagagtttaaaaaaaaaaaagatctctgcctctcttctctctgcctcgtcccaccttgctgtctgtctcattgtctttctctcccctcaccatgcgctgaattcagatttctctttcttttattataggcatgttgttttgaatgtggactttgtgggagggagaggattgttctgagaacagaaactggaagatacgtctgagttgatgggaccaacagggctttgctcctctgtgagggccaaagccattgatacttgtcgggggtgatgagggctttagcatctcaaggcagacatatgaagtatttactgctaaactatattacttactagtacaaatctgttggaattcaggggcagtctaagatttggtgagtgaaatgccatctggcaaaatcgagaagagagtgtggcctgagaggggaatgttcagcctcactgtcacattaagggtacctcaaaatacatggtccttccagtgtgttccttttccttcctccatttcactttgtcccctcttcttcctttctctcccattttcctggctttttagcactcagcttttttttataagtatgtatttactttttattatatatttggtcctttgggactttgtgatgattaagaatttattccattcaggattttaaaatgatgtgtttaatattttgttctcttaaactcttttgaagctatgctgctaaccaggtataggccagaaaggaggtggcccagtcagtaccttgctcacgtcagctaagggggacagtgatgtcatgtgggtgactcttcttcatttgaccaaggccagcctcctgttcttacctctgcccattcatttctggctatgggaaaactaccacctgttgagtgagccaatgaggccaggaagatcagaggggctgggttccggcccatgggccactatttgaatttctctgtagtaagctctttgtagggctggctccaactgcagtagccaaagaaaacctgtctgactcgacattttaatgcctgagagttggtgaaagttcagctgaagctaatgtctagacatcagcagtaactaggcatccagaaagtagcttcaaccaaagctaatagagcccaagtttccgcaggaagtttggtgctgagctgtccagagcagttgtttatctgagtgttgctagcccttagccatgctttcttagctttattctcgcctgttcctaggcatagcctgaaccagagctatggctcactgctcgctttattctactccctagtcatgcggaacaacatagtctaaaaaggaagatgtggactggggagttaggagacctgatttctattccctatgcttctactaactagcctcgagatcttaaccgctctgtgcctcagtgttcccatctgcaaaatggggatagtgttaattgccctacctacctcacagggttgttgtgaggataaactgagacaatgaattcaaagcaagttgacaagtaagtgctatgcaaattgtaagaaatggaaacaatcatgttaaaagcaatggaatggacattggcagaagggttaatggattgtccagccctttctctgtgtggcttaaacccaggtcgccattgctttatacattttcacttagcacagatttgtaattatgcatgtaataaagcacagccttatccaccctg

SEQ ID NO: 4258 - DNA, 3046 bp, Homo sapiens
  source 1..3046: mol_type = unassigned DNA; mol_type = unassigned DNA
gtgtgaatgaagctctgccggctacgtggggcgctcactcaacttggtgtcctggacgccagagccgaccgagcgcgctgcccaccggcggcggacacgggctccgccgctccggacctcggcgacagagcaaatcagttgcctggagttcccagtgaagttgtacctgtgcccgtgcgataacgtcagtggaagctgccccgagtttggggctttagccccttggagaaaacagggccacatagctgcctttctatcaagtctccctacaaaactgagaggctctgggaaactcagcctgtgaccccagcgtgggtgaagataggatcaagatggccatgtggcagggtgccatggataacagaggctttcagcaggggagttttagtagcttccagaacagctccagtgatgaagacctgatggacattccagcaaccgctatggatttctccatgagagatgatgttcctcccttagaccgagaagtaggagaggacaagtcgtacaatggtggaggaataggttcttcaaataggatcatggacttcttggaggagccaatccctggtgtagggacctatgatgatttcaatacaattgattgggtgagagagaagtctcgagaccgggataggcaccgagagattaccaataaaagcaaagagtcaacatgggccttaattcacagtgtgagtgatgctttttccggctggttgttgatgctccttattgggcttttatcaggttcgttagctggtttgatagacatctctgctcattggatgacagacttaaaagaaggtatatgcacagggggattctggtttaaccatgaacattgttgctggaactctgagcatgtcacctttgaagagagagacaaatgtccagagtggaatagttggtcccagcttatcatcagcacagatgagggagcctttgcctacatagtcaattatttcatgtacgtcctctgggctctcctatttgccttccttgccgtatctcttgtcaaggtgtttgcgccttatgcctgtggctctggaatccctgagataaaaactatcttgagtggtttcattattaggggctatttgggtaagtggactctggttatcaaaaccatcaccttggtgctggcagtgtcatctggcttgagcctgggcaaagagggccctctagtgcacgtggcttgctgctgtgggaacatcctgtgccactgcttcaacaaatacaggaagaatgaagccaagcgcagagaggtcttgtcggctgcagcagcagctggtgtatctgtagcctttggagcacctataggtggagtattattcagccttgaagaggtcagctactattttcccctcaaaacattgtggcgttcattctttgctgccttggtggcagcattcactctacgctccatcaatccatttgggaacagccgcctggtactattttatgtggagtttcacaccccatggcatctctttgagctcgtgccattcattctgctgggcatatttggtggtctgtggggagcactgtttatccgcacaaacattgcctggtgtcggaagcgaaagaccacccagttgggcaagtatcctgttatagaggtactcgtcgtgacagccatcactgccatcctggctttccccaatgaatacactcggatgagcacaagtgagctcatttctgagctgtttaatgactgtggccttctggactcctccaagctctgtgattatgagaaccgtttcaacacaagcaaagggggtgaactgcctgacagaccggctggcgtgggagtctacagtgcaatgtggcagctggctttaacactcatactgaaaattgtcattactatattcacctttggcatgaagatcccttctggcctctttatccctagcatggctgttggtgctatagcaggtcgacttctaggagtaggaatggaacagctggcttattaccaccaggaatggaccgtcttcaatagctggtgtagtcagggagctgattgcatcacccccggcctttatgcaatggttggggctgcagcctgcttaggtggggtgactcggatgactgtttctcttgttgtcataatgtttgaactgactggtggcttagaatacatcgtgcctctgatggctgcagccatgacaagcaagtgggtggcagatgctcttgggcgggagggcatctatgatgcccacatccgtctcaatggatacccctttcttgaagccaaagaagagtttgctcataagaccctggcaatggatgtgatgaaaccccggagaaatgatcctttgttgactgtccttactcaggacagtatgactgtggaagatgtagagaccataatcagtgaaaccacttacagtggcttcccagtggtggtatcccgggagtcccaaagacttgtgggctttgtcctccgaagagatctcattatttcaattgaaaatgctcgaaagaaacaggatggggttgttagcacttccatcatttatttcacggagcattctcctccattgccaccatacactccacccactctaaagcttcggaacatcctcgatctcagccccttcactgtgactgaccttacacccatggagatcgtagtggatattttccgaaagctgggactgcggcagtgcctggttacacacaacgggcgattgcttggaatcattaccaaaaaggatgtgttaaagcatatagcacagatggcgaaccaagatcctgattccattctcttcaactagaatcatagagttctggatgtaaagcgggaaggacattacagaccatggatatgttgtattaactgggtacccaaaacacattttccatatttggatggtgaagtcacattagtgtgttgtctctttcctacaagttaaccagttgcactacataatctctggaaattaattttctctttaggagaaattatagttaggcttccatgatgttacattaggaagatatcatgaaagaataaataagattgctatggtttaattat

SEQ ID NO: 4259 - DNA, 449 bp, Homo sapiens
  source 1..449: mol_type = unassigned DNA; mol_type = unassigned DNA
cagagcaaatcagttgcctggagttcccagtgaagttgtacctgtgcccgtgcgataacgtcagtggaagctgccccgagtttggggctttagccccttggagaaaacagggccacatagctgcctttctatcaagtctccctacaaaactgagaggctctgggaaactcagcctgtgaccccagcgtgggtgaagataggatcaagatggccatgtggcagggtgccatggataacagaggctttcagcaggggagttttagtagcttccagaacagctccagtgatgaagacctgatggacattccagcaaccgctatggatttctccatgagagatgatgttcctcccttagaccgagaagtaggaggtatcattattggtgatgataatttatcttaattttttaaaatttatgtacaataaaattttatttttttttaatttta

SEQ ID NO: 4260 - DNA, 2660 bp, Homo sapiens
  source 1..2660: mol_type = unassigned DNA; mol_type = unassigned DNA
gggaacactggtagttctttaggtggcgtttgttgctgtgaaaggcagagaatgcagcaagtgcccttctaaagcacttcagactggggcttcttttgtaaaagctccccaacctgaatgaccaaatgcgggctgccaaggttatttcttccttgaggcagaaaaaaagaaaactgtgattgaagaggacaagtcgtacaatggtggaggaataggttcttcaaataggatcatggacttcttggaggagccaatccctggtgtagggacctatgatgatttcaatacaattgattgggtgagagagaagtctcgagaccgggataggcaccgagagattaccaataaaagcaaagagtcaacatgggccttaattcacagtgtgagtgatgctttttccggctggttgttgatgctccttattgggcttttatcaggttcgttagctggtttgatagacatctctgctcattggatgacagacttaaaagaaggtatatgcacagggggattctggtttaaccatgaacattgttgctggaactctgagcatgtcacctttgaagagagagacaaatgtccagagtggaatagttggtcccagcttatcatcagcacagatgagggagcctttgcctacatagtcaattatttcatgtacgtcctctgggctctcctatttgccttccttgccgtatctcttgtcaaggtgtttgcgccttatgcctgtggctctggaatccctgagataaaaactatcttgagtggtttcattattaggggctatttgggtaagtggactctggttatcaaaaccatcaccttggtgctggcagtgtcatctggcttgagcctgggcaaagagggccctctagtgcacgtggcttgctgctgtgggaacatcctgtgccactgcttcaacaaatacaggaagaatgaagccaagcgcagagaggtcttgtcggctgcagcagcagctggtgtatctgtagcctttggagcacctataggtggagtattattcagccttgaagaggtcagctactattttcccctcaaaacattgtggcgttcattctttgctgccttggtggcagcattcactctacgctccatcaatccatttgggaacagccgcctggtactattttatgtggagtttcacaccccatggcatctctttgagctcgtgccattcattctgctgggcatatttggtggtctgtggggagcactgtttatccgcacaaacattgcctggtgtcggaagcgaaagaccacccagttgggcaagtatcctgttatagaggtactcgtcgtgacagccatcactgccatcctggctttccccaatgaatacactcggatgagcacaagtgagctcatttctgagctgtttaatgactgtggccttctggactcctccaagctctgtgattatgagaaccgtttcaacacaagcaaagggggtgaactgcctgacagaccggctggcgtgggagtctacagtgcaatgtggcagctggctttaacactcatactgaaaattgtcattactatattcacctttggcatgaagatcccttctggcctctttatccctagcatggctgttggtgctatagcaggtcgacttctaggagtaggaatggaacagctggcttattaccaccaggaatggaccgtcttcaatagctggtgtagtcagggagctgattgcatcacccccggcctttatgcaatggttggggctgcagcctgcttaggtggggtgactcggatgactgtttctcttgttgtcataatgtttgaactgactggtggcttagaatacatcgtgcctctgatggctgcagccatgacaagcaagtgggtggcagatgctcttgggcgggagggcatctatgatgcccacatccgtctcaatggatacccctttcttgaagccaaagaagagtttgctcataagaccctggcaatggatgtgatgaaaccccggagaaatgatcctttgttgactgtccttactcaggacagtatgactgtggaagatgtagagaccataatcagtgaaaccacttacagtggcttcccagtggtggtatcccgggagtcccaaagacttgtgggctttgtcctccgaagagatctcattatttcaattgaaaatgctcgaaagaaacaggatggggttgttagcacttccatcatttatttcacggagcattctcctccattgccaccatacactccacccactctaaagcttcggaacatcctcgatctcagccccttcactgtgactgaccttacacccatggagatcgtagtggatattttccgaaagctgggactgcggcagtgcctggttacacacaacgggcgattgcttggaatcattaccaaaaaggatgtgttaaagcatatagcacagatggcgaaccaagatcctgattccattctcttcaactagaatcatagagttctggatgtaaagcgggaaggacattacagaccatggatatgttgtattaactgggtacccaaaacacattttccatatttggatggtgaagtcacattagtgtgttgtctctttcctacaagttaaccagttgcactacataatctctggaaattaattttctctttaggagaaa

SEQ ID NO: 4261 - DNA, 3177 bp, Homo sapiens
  source 1..3177: mol_type = unassigned DNA; mol_type = unassigned DNA
tgatgtgatatggctgcaagtgcctttgacccttttgtctcccttccataaactgaaatacctaagctgctccaacctcctttttgtcttttgtttcataaatcctttcccattgcacatcaactcctgtctctctttgtactgtcactctcatctgttgctttccattcacactgcctttagccactcatcattttgtgcctacaccacagaaacctctgaatgtaatggatgttcctaccagaggacaagtcgtacaatggtggaggaataggttcttcaaataggatcatggacttcttggaggagccaatccctggtgtagggacctatgatgatttcaatacaattgattgggtgagagagaagtctcgagaccgggataggcaccgagagattaccaataaaagcaaagagtcaacatgggccttaattcacagtgtgagtgatgctttttccggctggttgttgatgctccttattgggcttttatcaggttcgttagctggtttgatagacatctctgctcattggatgacagacttaaaagaaggtatatgcacagggggattctggtttaaccatgaacattgttgctggaactctgagcatgtcacctttgaagagagagacaaatgtccagagtggaatagttggtcccagcttatcatcagcacagatgagggagcctttgcctacatagtcaattatttcatgtacgtcctctgggctctcctatttgccttccttgccgtatctcttgtcaaggtgtttgcgccttatgcctgtggctctggaatccctgagataaaaactatcttgagtggtttcattattaggggctatttgggtaagtggactctggttatcaaaaccatcaccttggtgctggcagtgtcatctggcttgagcctgggcaaagagggccctctagtgcacgtggcttgctgctgtgggaacatcctgtgccactgcttcaacaaatacaggaagaatgaagccaagcgcagagaggtcttgtcggctgcagcagcagctggtgtatctgtagcctttggagcacctataggtggagtattattcagccttgaagaggtcagctactattttcccctcaaaacattgtggcgttcattctttgctgccttggtggcagcattcactctacgctccatcaatccatttgggaacagccgcctggtactattttatgtggagtttcacaccccatggcatctctttgagctcgtgccattcattctgctgggcatatttggtggtctgtggggagcactgtttatccgcacaaacattgcctggtgtcggaagcgaaagaccacccagttgggcaagtatcctgttatagaggtactcgtcgtgacagccatcactgccatcctggctttccccaatgaatacactcggatgagcacaagtgagctcatttctgagctgtttaatgactgtggccttctggactcctccaagctctgtgattatgagaaccgtttcaacacaagcaaagggggtgaactgcctgacagaccggctggcgtgggagtctacagtgcaatgtggcagctggctttaacactcatactgaaaattgtcattactatattcacctttggcatgaagatcccttctggcctctttatccctagcatggctgttggtgctatagcaggtcgacttctaggagtaggaatggaacagctggcttattaccaccaggaatggaccgtcttcaatagctggtgtagtcagggagctgattgcatcacccccggcctttatgcaatggttggggctgcagcctgcttaggtggggtgactcggatgactgtttctcttgttgtcataatgtttgaactgactggtggcttagaatacatcgtgcctctgatggctgcagccatgacaagcaagtgggtggcagatgctcttgggcgggagggcatctatgatgcccacatccgtctcaatggatacccctttcttgaagccaaagaagagtttgctcataagaccctggcaatggatgtgatgaaaccccggagaaatgatcctttgttgactgtccttactcaggacagtatgactgtggaagatgtagagaccataatcagtgaaaccacttacagtggcttcccagtggtggtatcccgggagtcccaaagacttgtgggctttgtcctccgaagagatctcattatttcaattgaaaatgctcgaaagaaacaggatggggttgttagcacttccatcatttatttcacggagcattctcctccattgccaccatacactccacccactctaaagcttcggaacatcctcgatctcagccccttcactgtgactgaccttacacccatggagatcgtagtggatattttccgaaagctgggactgcggcagtgcctggttacacacaacgggcgattgcttggaatcattaccaaaaaggatgtgttaaagcatatagcacagatggcgaaccaagatcctgattccattctcttcaactagaatcatagagttctggatgtaaagcgggaaggacattacagaccatggatatgttgtattaactgggtacccaaaacacattttccatatttggatggtgaagtcacattagtgtgttgtctctttcctacaagttaaccagttgcactacataatctctggaaattaattttctctttaggagaaattatagttaggcttccatgatgttacattaggaagatatcatgaaagaataaataagattgctatggtttaattatatttgctttttaaaagatttttttaacttaaaaagtagttagccaatatgcaatcactgaaaactatgcaagagaaattccaaccgtcctgacctataacctgtaggaaaccgacgaaaaagtcactcttttgggatctaactgttgttactggaagacgaagtgtaaactaaggggctttgcttttcaaaccagagaaaggaaagccagaaggaaaagagtaatggtattttctagactgtgaagattcagttcaaatgttatccttgttcctgttacaatatttagcattattagtttgttatgtgtgtatgtttatgttaattttaatttctgattataagacaatgctgctttggttaatctcttctaaatgaattta

SEQ ID NO: 4262 - DNA, 3481 bp, Homo sapiens
  source 1..3481: mol_type = unassigned DNA; mol_type = unassigned DNA
ctttaaatcgcggcgcccagcggttctgcgtctcagttcccgagcctgggagcaaccgcagcttctagtatccagactccagcgccgccccgggcgcggaccccaaccccgacccagagcttctccagcggcggcgcagcgagcagggctccccgccttaacttcctccgcggggcccagccaccttcgggagtccgggttgcccacctgcaaactctccgccttctgcacctgccacccctgagccagcgcgggcgcccgagcgagtcatggccaacgcggggctgcagctgttgggcttcattctcgccttcctgggatggatcggcgccatcgtcagcactgccctgccccagtggaggatttactcctatgccggcgacaacatcgtgaccgcccaggccatgtacgaggggctgtggatgtcctgcgtgtcgcagagcaccgggcagatccagtgcaaagtctttgactccttgctgaatctgagcagcacattgcaagcaacccgtgccttgatggtggttggcatcctcctgggagtgatagcaatctttgtggccaccgttggcatgaagtgtatgaagtgcttggaagacgatgaggtgcagaagatgaggatggctgtcattgggggtgcgatatttcttcttgcaggtctggctattttagttgccacagcatggtatggcaatagaatcgttcaagaattctatgaccctatgaccccagtcaatgccaggtacgaatttggtcaggctctcttcactggctgggctgctgcttctctctgccttctgggaggtgccctactttgctgttcctgtccccgaaaaacaacctcttacccaacaccaaggccctatccaaaacctgcaccttccagcgggaaagactacgtgtgacacagaggcaaaaggagaaaatcatgttgaaacaaaccgaaaatggacattgagatactatcattaacattaggaccttagaattttgggtattgtaatctgaagtatggtattacaaaacaaacaaacaaacaaaaaacccatgtgttaaaatactcagtgctaaacatggcttaatcttattttatcttctttcctcaatataggagggaagatttttccatttgtattactgcttcccattgagtaatcatactcaactgggggaaggggtgctccttaaatatatatagatatgtatatatacatgtttttctattaaaaatagacagtaaaatactattctcattatgttgatactagcatacttaaaatatctctaaaataggtaaatgtatttaattccatattgatgaagatgtttattggtatattttctttttcgtctatatatacatatgtaacagtcaaatatcatttactcttcttcattagctttgggtgcctttgccacaagacctagcctaatttaccaaggatgaattctttcaattcttcatgcgtgcccttttcatatacttattttattttttaccataatcttatagcacttgcatcgttattaagcccttatttgttttgtgtttcattggtctctatctcctgaatctaacacatttcatagcctacattttagtttctaaagccaagaagaatttattacaaatcagaactttggaggcaaatctttctgcatgaccaaagtgataaattcctgttgaccttcccacacaatccctgtactctgacccatagcactcttgtttgctttgaaaatatttgtccaattgagtagctgcatgctgttcccccaggtgttgtaacacaactttattgattgaatttttaagctacttattcatagttttatatccccctaaactacctttttgttccccattccttaattgtattgttttcccaagtgtaattatcatgcgttttatatcttcctaataaggtgtggtctgtttgtctgaacaaagtgctagactttctggagtgataatctggtgacaaatattctctctgtagctgtaagcaagtcacttaatctttctacctcttttttctatctgccaaattgagataatgatacttaaccagttagaagaggtagtgtgaatattaattagtttatattactctcattctttgaacatgaactatgcctatgtagtgtctttatttgctcagctggctgagacactgaagaagtcactgaacaaaacctacacacgtaccttcatgtgattcactgccttcctctctctaccagtctatttccactgaacaaaacctacacacataccttcatgtggttcagtgccttcctctctctaccagtctatttccactgaacaaaacctacgcacataccttcatgtggctcagtgccttcctctctctaccagtctatttccattctttcagctgtgtctgacatgtttgtgctctgttccattttaacaactgctcttacttttccagtctgtacagaatgctatttcacttgagcaagatgatgtaatggaaagggtgttggcattggtgtctggagacctggatttgagtcttggtgctatcaatcaccgtctgtgtttgagcaaggcatttggctgctgtaagcttattgcttcatctgtaagcggtggtttgtaattcctgatcttcccacctcacagtgatgttgtggggatccagtgagatagaatacatgtaagtgtggttttgtaatttaaaaagtgctatactaagggaaagaattgaggaattaactgcatacgttttggtgttgcttttcaaatgtttgaaaacaaaaaaaatgttaagaaatgggtttcttgccttaaccagtctctcaagtgatgagacagtgaagtaaaattgagtgcactaaacaaataagattctgaggaagtcttatcttctgcagtgagtatggcccgatgctttctgtggctaaacagatgtaatgggaagaaataaaagcctacgtgttggtaaatccaacagcaagggagatttttgaatcataataactcataaggtgctatctgttcagtgatgccctcagagctcttgctgttagctggcagctgacgctgctaggatagttagtttggaaatggtacttcataataaactacacaaggaaagtcagccactgtgtcttatgaggaattggacctaataaattttagtgtgccttccaaacctgagaatatatgcttttggaagttaaaatttaaatggcttttgccacatacatagatcttcatgatgtgtgagtgtaattccatgtggatatcagttaccaaacattacaaaaaaattttatggcccaaaatgaccaacgaaattgttacaatagaatttatccaattttgatctttttatattcttctaccacacctggaaacagaccaatagacattttggggttttataataggaatttgtataaagcattactctttttcaataaattgttttttaatttaaaaaaaggatta

SEQ ID NO: 4263 - DNA, 432 bp, Homo sapiens
  source 1..432: mol_type = unassigned DNA; mol_type = unassigned DNA
gtttttctggagaagatactgtatattgggttaccagcggaaacatcagtatgactggggtctctagattcctagtccagttttctctcttccatacaacagtgacatatacttggtcttcttccatttttctcttgttggtccaagcatatttttacatgttttaaaatgttttctgccaggcacattgcaagcaacccgtgccttgatggtggttggcatcctcctgggagtgatagcaatctttgtggccaccgttggcatgaagtgtatgaagtgcttggaagacgatgaggtgcagaagatgaggatggctgtcattgggggtgcgatatttcttcttgcaggtctggctattttagttgccacagcatggtatggcaatagaatcgttcaagaattctatgaccctatgaccccagtcaatgccag

SEQ ID NO: 4264 - DNA, 2169 bp, Homo sapiens
  source 1..2169: mol_type = unassigned DNA; mol_type = unassigned DNA
agcagcgctgctgtccccgccgtgcgcccttcgccgctgagctcgcagcctccggcgcccacctccacctccagtgtcccgcctcgggccgtcgccctccagcggctcgcgagcgtgggagacgtacctgggcaggcactgtccagcccaggcccaggcacagccgtgaggggcgaggcacggggacatcctggcggccaccatggtggccacgtgcctgcaggtggtgggcttcgtcacgagcttcgtgggctggatcggggtcatcgtgaccacctccaccaatgactgggtggtgacctgcggctacaccatccccacctgccgcaagctggatgagctgggctccaaggggctgtgggccgactgcgtcatggccacggggctgtaccactgcaagcccctggtggacatcctcatcctgccgggctacgtgcaggcctgccgcgccctgatgattgctgcctcggtcctgggtctgccggccattttactgctgctgactgttcttccctgcatccggatgggccaggagcccggtgtggctaagtacaggcgggcccagctggctggtgttttgctcattctgctggctctctgcgcccttgttgccaccatctggttccctgtgtgcgcccaccgtgagaccaccatcgtgagctttggctactccctgtatgcaggctggattggtgctgtgctgtgcctcgtgggtggctgtgtcatcctctgctgcgctggagatgcccaggcctttggtgaaaaccgtttctactacactgcgggctctagctccccgactcatgcgaagagtgcccacgtataagagggctgcccggctgcccacagaggtgctgtagatgctgggcccagggccctaggtttgctcgtcacagtgtggggaagcccattcctctgccaggctctaaagccaaaggtctagaaaagcatcctgtctggcattttgtagtcttaacttctccccatttcccccatcttttggttgccttaaaagaaatctctagctcagataatgcccagacatttttttcccttggtgttgcccctattagctcttttcttgggcattcttttgctgtttattaaaaatatattatatatattttgtttctttaaatttcaaatgttttgcaaacatcactgagttaggtgggggtggggaagagaaatacaagatacttttttttttttttttttttttttttttttaaatagggcctcactctgttgctcaggctggagtgcggtggtgtgatctcggctcatgtagcctcaacctccccggctcaagtgatcctcctgcctcagcctcccaagtagctgggactacaggcgttcactactacacccagctaatttttaagttttttatagagatgagggctccctatgttgcccaggttggtctcgaactcctggactcaaagtatcctcccgcctcggcctcccaaagtgttgggattataggagtgagccaccacaccggccaagatgcttttcaaactgatacagatgacaatgggagcctcataaagatggcttttgtttcttcccttcaaggtcatttacttgtacgagacagaaaaagatagcattggggacatgggatgggggagggagggcaatagtggaacgaactttccatgggaaactttcccttttgtaagttgagggccaggggtagggatattttttagtttgtgattttacatttatctgtacatactttttcaagattgatcatttttataaccatggttttcctgaaatcctcaattcatcaatatgaaggaaatgaaccacatagactttatgcaataaataacagtgcaagtgagtataactctaactgatgttccacaaaacatttttgatttcaggtttgtatgatgtagtttttaatcgtacattttcatatgcttcaaactaacacatttttaaagctttcccccacttttctctctatttgtattgttagccatcttgaagtgatgttgtttaacataaattgtactgttgaatttggctttacgggtgtaaacactgatggtatatcagtatctgagaccccaaactctccaaatactgatggtgcattttattcttgaagtgaaatctgtgcaataaaataacagactgtctgcaaaa

SEQ ID NO: 4265 - DNA, 1139 bp, Homo sapiens
  source 1..1139: mol_type = unassigned DNA; mol_type = unassigned DNA
agcgctgctgtccccgccgtgcgcccttcgccgctgagctcgcagcctccggcgcccacctccacctccagtgtcccgcctcgggccgtcgccctccagcggctcgcgagcgtgggagacgtacctgggcaggcactgtccagcccaggcccaggcacagccgtgaggggcgaggcacggggacatcctggcggccaccatggtggccacgtgcctgcaggtggtgggcttcgtcacgagcttcgtgggctggatcggggtcatcgtgaccacctccaccaatgactgggtggtgacctgcggctacaccatccccacctgccgcaagctggatgagctgggctccaaggggctgtgggccgactgcgtcatggccacggggctgtaccactgcaagcccctggtggacatcctcatcctgccgggctacgtgcaggcctgccgcgccctgatgattgctgcctcggtcctgggtctgccggccattttactgctgctgactgttcttccctgcatccggatgggccaggagcccggtgtggctaagtacaggcgggcccagctggctggtgttttgctcattctgctgggctgtcagcttctttgggcaaagactgagtcatctctgcattctcagcacctggtgcaatttaagcagaaatatcttgaagatttttcgtatcttcagggagattaggaatgggaatggaatgggaacgccaatgcaggaaggatgagaagtctgcagatgcctccaaggagtccgaaaccaagtccgaagtcaacgacaagcaatgatggcgatggcgatcctagttaataaaaaggggggagatgtgggctgcaagccacccaggtgccgaggcaagagaccgaggacatgagctgttccagtataataaaatataaaacaagaatagttataccagatatagatcttagatatgattatatatgaatataattaatcattagtttgtggcaattactctttattccaatattataataatcctcgctctataatcataacctaggaaaaaccaggccatacagagataggagctgaggggacatagtgaggagtgaccagaagacaagagtgcgagccttctgttatgcccagacagggccaccag

SEQ ID NO: 4266 - DNA, 998 bp, Homo sapiens
  source 1..998: mol_type = unassigned DNA; mol_type = unassigned DNA
ctgtccccgccgtgcgcccttcgccgctgagctcgcagcctccggcgcccacctccacctccagtgtcccgcctcgggccgtcgccctccagcggctcgcgagcgtgggagacgtacctgggcaggcactgtccagcccaggcccaggcacagccgtgaggggcgaggcacggggacatcctggcggccaccatggtggccacgtgcctgcaggtggtgggcttcgtcacgagcttcgtgggctggatcggggtcatcgtgaccacctccaccaatgactgggtggtgacctgcggctacaccatccccacctgccgcaagctggatgagctgggctccaaggggctgtgggccgactgcgtcatggccacggggctgtaccactgcaagcccctggtggacatcctcatcctgccgggctacgtgcaggcctgccgcgccctgatgattgctgcctcggtcctgggtctgccggccattttactgctgctgactgttcttccctgcatccggatgggccaggagcccggtgtggctaagtacaggcgggcccagctggctggtgttttgctcattctgctgggtaagacagctttctcagtggtaccctacctatgagggagcctgatgaatctcagatcttgtggttgctgccttctcaagttcaagagaaatgtgaaaggaagccaagtgaagccagtgggggatggactcccacaatctgtatccctttgtattttatgggcagtttacacagagggctaagtaatgtctctgggagtcactgaccatgaagataagtttaaaaagagaaagaggattttgaaggtaggaaatacctaagggaaagacctgaaagatggaagccttctcagtcttcacagtggaatcctttttgaacacctatgcccaggtcccacagcagatcaattgaatcagaattttctgggcatcaggccaggcaaagatattttttgaaagcttcccaggtgatgctt

SEQ ID NO: 4267 - DNA, 1854 bp, Homo sapiens
  source 1..1854: mol_type = unassigned DNA; mol_type = unassigned DNA
gcaggaacagtcctctgtccctatcttttggtgtccggacatggccttggcactgtagcatgtggacagccagtgccatggatttcagaacctgcattgccagttgactgcctgctttgtgctacgtgcaggcctgccgcgccctgatgattgctgcctcggtcctgggtctgccggccattttactgctgctgactgttcttccctgcatccggatgggccaggagcccggtgtggctaagtacaggcgggcccagctggctggtgttttgctcattctgctggctctctgcgcccttgttgccaccatctggttccctgtgtgcgcccaccgtgagaccaccatcgtgagctttggctactccctgtatgcaggctggattggtgctgtgctgtgcctcgtgggtggctgtgtcatcctctgctgcgctggagatgcccaggcctttggtgaaaaccgtttctactacactgcgggctctagctccccgactcatgcgaagagtgcccacgtataagagggctgcccggctgcccacagaggtgctgtagatgctgggcccagggccctaggtttgctcgtcacagtgtggggaagcccattcctctgccaggctctaaagccaaaggtctagaaaagcatcctgtctggcattttgtagtcttaacttctccccatttcccccatcttttggttgccttaaaagaaatctctagctcagataatgcccagacatttttttcccttggtgttgcccctattagctcttttcttgggcattcttttgctgtttattaaaaatatattatatatattttgtttctttaaatttcaaatgttttgcaaacatcactgagttaggtgggggtggggaagagaaatacaagatacttttttttttttttttttttttttttttttaaatagggcctcactctgttgctcaggctggagtgcggtggtgtgatctcggctcatgtagcctcaacctccccggctcaagtgatcctcctgcctcagcctcccaagtagctgggactacaggcgttcactactacacccagctaatttttaagttttttatagagatgagggctccctatgttgcccaggttggtctcgaactcctggactcaaagtatcctcccgcctcggcctcccaaagtgttgggattataggagtgagccaccacaccggccaagatgcttttcaaactgatacagatgacaatgggagcctcataaagatggcttttgtttcttcccttcaaggtcatttacttgtacgagacagaaaaagatagcattggggacatgggatgggggagggagggcaatagtggaacgaactttccatgggaaactttcccttttgtaagttgagggccaggggtagggatattttttagtttgtgattttacatttatctgtacatactttttcaagattgatcatttttataaccatggttttcctgaaatcctcaattcatcaatatgaaggaaatgaaccacatagactttatgcaataaataacagtgcaagtgagtataactctaactgatgttccacaaaacatttttgatttcaggtttgtatgatgtagtttttaatcgtacattttcatatgcttcaaactaacacatttttaaagctttcccccacttttctctctatttgtattgttagccatcttgaagtgatgttgtttaacataaattgtactgttgaatttggctttacgggtgtaaacactgatggtatatcagtatctgagaccccaaactctccaaatactgatggtgcattttattcttgaagtgaaatctgtgcaataaaataacagactgtc

SEQ ID NO: 4268 - DNA, 593 bp, Homo sapiens
  source 1..593: mol_type = unassigned DNA; mol_type = unassigned DNA
atcttttggtgtccggacatggccttggcactgtagcatgtggacagccagtgccatggatttcagaacctgcattgccagttgactgcctgctttgtgctacgtgcaggcctgccgcgccctgatgattgctgcctcggtcctgggtctgccggccattttactgctgctgactgttcttccctgcatccggatgggccaggagcccggtgtggctaagtacaggcgggcccagctggctggtgttttgctcattctgctggctctctgcgcccttgttgccaccatctggttccctgtgtgcgcccaccgtgagaccaccatcgtgagctttggctactccctgtatgcaggctggagtgcggtggtgtgatctcggctcatgtagcctcaacctccccggctcaagtgatcctcctgcctcagcctcccaagtagctgggactacaggcgttcactactacacccagctaatttttaagttttttatagagatgagggctccctatgttgcccaggttggtctcgaactcctggactcaaagtatcctcccgcctcggcctcccaaagtgttgggattataggagtgagc

SEQ ID NO: 4269 - DNA, 571 bp, Homo sapiens
  source 1..571: mol_type = unassigned DNA; mol_type = unassigned DNA
ttggtgtccggacatggccttggcactgtagcatgtggacagccagtgccatggatttcagaacctgcattgccagttgactgcctgctttgtgctacgtgcaggcctgccgcgccctgatgattgctgcctcggtcctgggtctgccggccattttactgctgctgactgttcttccctgcatccggatgggccaggagcccggtgtggctaagtacaggcgggcccagctggctggtgttttgctcattctgctggtgagaaaagctagaatgtggagtcctgtcatcagatgatgtgactacatggaatgaggactatagctgctctcttaaaaacctgcagccccctctctcagcccagacagttgagctgcttcagttgtcaggatgtttacacggaagaagcactggaccagttatgctgggctcctgtttctactccatccctgtagattcagcatccttgtttctaaaataaaagtattacaccaaagactctcttacggatctcctaactctgaccctctaggattccatctgttatattgaactttgtagtattttttgct

SEQ ID NO: 4270 - DNA, 1065 bp, Homo sapiens
  source 1..1065: mol_type = unassigned DNA; mol_type = unassigned DNA
tggacagccagtgccatggatttcagaacctgcattgccagttgactgcctgctttgtgctacgtgcaggcctgccgcgccctgatgattgctgcctcggtcctgggtctgccggccattttactgctgctgactgttcttccctgcatccggatgggccaggagcccggtgtggctaagtacaggcgggcccagctggctggtgttttgctcattctgctggctctctgcgcccttgttgccaccatctggttccctgtgtgcgcccaccgtgagaccaccatcgtgagctttggctactccctgtatgcaggctggattggtgctgtgctgtgcctcgtgggtggctgtgtcatcctctgctgcgctggagatgcccaggcctttggtgaaaaccgtttctactacactgcgggctctagctccccgactcatgcgaagagtgcccacgtataagagggctgcccggctgcccacagagaagtctcggtctgttgcccaggctggagagcagtggtgcgatctcggctctctgcaacctccgccccttgggttcaagcgattcttgtgcctcagcctcccaagtagctgggactacaggacattcatgctcatgacatcacatgctgagaggacagggaggccagtgtggggctggcctcgaagagaggcggcatcagtgctaccattgagatgtccccacaaaagagtgtgtgacagccagatgtgcagcttaatggagactgaaccaggattgtgggtggaacattggcacatgctgcttatggcttgaatagcagctcttgaggaatctatatttctctacctcatgcagaatcttagagctctggctttgtggctccatggctgggggagggagtggagacggaggaacttgtcactgctccatgccccattgttgaaatggaaaatgtggaaatgttaagccgtttctagaggattgtggaaggtaagaattgcttccaaatataaaaatacaaatacaaaagatcacctgatcgtcacagttgggggctttcttgaataaaaatggttatatctcta

SEQ ID NO: 4271 - DNA, 600 bp, Homo sapiens
  source 1..600: mol_type = unassigned DNA; mol_type = unassigned DNA
atatttctctacctcatgcagaatcttagagctctggctttgtggctccatggctgggggagggagtggagacggaggaacttgtcactgctccatgccccattgttgaaatggaaaatgtggaaatgttaagccgtttctagaggattgtggaagggggagttaactgtgaaggcacttaacaatctccttattgaggaacgcgggactttgtttccaatggaggaatttctggcatcagagagcagatagggcagaggtgctttcttctgcggctcctcaaggctcacagcttgctatggaagcatccttggaggacatctccttccctgccctttccatcaacgttggttaatccaatctccaccttctcttaaaagattgacatgacgagtgaggaagccaaggacattgcatccgcatcttaaacttaatctcagtacatgaaaggggctgctttggaaatagagcttcatgaaacagggaaatcccgtggccaggaaacccctcgctcctccccaccccaccctgtgaggagtgtctccactaggaaggaaattaaatcagtcttccagccaccagaattgaattgggatggac

SEQ ID NO: 4272 - DNA, 1589 bp, Homo sapiens
  source 1..1589: mol_type = unassigned DNA; mol_type = unassigned DNA
cgtagcgttggtacgtgctttggtgcagggcctcttctcgagcgctgatttccagggtgctgttccagatgccatatccaaaataaatgagcagacctgtggggcgaggggaaagataagtaaactgaggcccaaagaagttaagtaaatttcccaaagtcacaagacaaaggaggggcagagctgtgatttgaagttggtgctgtttgactccaaaggctgtcagcttctttgggcaaagactgagtcatctctgcattctcagcacctggtgcaatttaagcagaaatatcttgaagatttttcgtatcttcagggagattaggaatgggaatggaatgggaacgccaatgcaggaaggatgagaagagagtgtctgcagatctgataataactgtaaaataacatggccacactgagatacagagggaaggttaagcctccttgaacttacttaaattggtggcagcacgagctttcagcatcatggccagcatgaccaagccatttccctggtgttcccctcagcatgaaacatctgtctacttatttctttgctgagcctgaatggaatattccatctctgaaaaataaactttgtgtttaaattgaaatctttattcctatctggcaaattggctatatatcctcaacaattggaaggaagtgatgtatctgctgccatcagctacaaagcactggacgcccactgtgctatttattagatttacatgaattccaggtgaatctgatccagtggctacaaaaaaagatctgaaacttctataagcccagcatctaaatcagtttttgactgaaatgagtacaggcaagctctgaggcagctctatccagggctatgacaagaatgaagtgaacacattttaccctacatggaaatgtccattccaacaagtgctaatttgacaatggtaatgattactatgggttgaattggattatcccaaaagatatgttaaagtcctaacccctggttcctgtaaatgtgattgtatttggaaataggatggatgcagatatcattagttaacatactggagtagggtggatctttaattaaataaaactgatgtctttgtaagaagagaagagacacagacacagagggaagatgaccatgtgaagatggaggcagagattgaaattatgctgccacaagccaaggaactcttggggctaccagaagctggacgagggcaagggagaattgcctgtagagcttcgaaggggacatagctcttctatcagcttgatttcagaattcctgcctccagaactgcgagacaaaaaagctctgttgttttaagccacctagtttgtgttactttgttatggcagcccttggaaattaacaatgattataatagtaatatgaataatagcaacagcatctcatttactgttttctatgtgttaataacaattccaagtgctttacacatattatgggctttagggtctcattttacagataaggaagcaagtagagaaagcaaaagaaagacattgaaacgtgcaatggggaaatttgtttccatacaaataaaacaaaccatctgaggagcctt

SEQ ID NO: 4273 - DNA, 1359 bp, Homo sapiens
  source 1..1359: mol_type = unassigned DNA; mol_type = unassigned DNA
gccgagtgcgcgtcgggctgggccccgcaccccggtgcaggagcgcgggcgcggcgcggcggagcgccccgcatggagccggcccgggagcccccctcgcgggcccggccgccgccgcccctcgccgcgcgccccgcgcccgcccccgccgcccccaggccgcgttcgcccgcagaggctgaggcccgcggccccgaggggctgctgcggcgatccgggtcgggctacgagggcagcaccagctggaaggcggccttggaggacaccaccacacgcctcctgctgggtgccatcgcggtccttctgttcgccatcttggtggtgatgagcatcttggcttccaagggctgcatcaagtgcgaagcgccctgcccggaggactggctgctctacggaaggaagtgctacttcttttccgaggaacccagagactggaacacaggcaggcagtactgccacacccacgaggcggtgctggctgtgattcagagccagaaggagctggaatttatgttcaagttcacgcggagggagccctggattggactacgcagagttggggacgaattccactgggtcaacggggacccgtttgatccggacacgttcaccatcgcaggtccaggggagtgtgtcttcgtggagcccaccaggctggtgtcgacggagtgtctgatgacccggccctgggtgtgcagcaagatggcctatacttgaggtgggtggggccagaggtggccccgcccctaggcctgtgggaggtgtctggtgtctgctcaagacctgcttccagcggagccgcctgccctctgcaaggcgaagcggtgggtgcgtggcctccgccccaggcccctctcccaggccctggcgctctgagtccctggttcctggcctcctttgtctgcaggcaggtcgtgtggctcagcagttaaatcccatatgctaggtagtgtaggcatctgcccacctacacacacacacatgcataggtacacgcacgcacagacgctgtcccttctgaagctcagtgtccatcctgagccaccccacagatctctctccggccccctagaagccctctcctcactgcagccctggtgctctggggaaggaggggcattgacaggtggtttgactgttcacccagcagccccgcttccccactggtttctctcctggctgccggcggaggtaggctgggaaagcttccccctcacctaggccgggccagccccgccccgggccccagaggtcccctgcatcccccttctttgccttgcctgggttctcaggcagggcccctgctgtgtccgtggtgctgttgtattggtcactaacggaataaagagttaatatctc

SEQ ID NO: 4274 - DNA, 324 bp, Homo sapiens
  source 1..324: mol_type = unassigned DNA; mol_type = unassigned DNA
acgagggcagcaccagctggaaggcggccttggaggcttccaagggctgcatcaagtgcgaagcgccctgcccggaggactggctgctctacggaaggaagtgctacttcttttccgaggaacccagagactggaacacaggcaggcagtactgccacacccacgaggcggtgctggctgtgattcagagccagaaggagctggaatttatgttcaagttcacgcggagggagccctggattggactacgcagagttggggacgaattccactgggtcaacggggacccgtttgatccggacacgttcaccatcgcaggtccag

SEQ ID NO: 4275 - DNA, 2190 bp, Homo sapiens
  source 1..2190: mol_type = unassigned DNA; mol_type = unassigned DNA
acaaaaagtatgcttatggaatttgcagctgacaaaatccaaaaacacaatcccatatgacagatgggtgaaagaaatcaagattaaaatgtatcttgaataactcaaatgatgagccaaagtgaatgacataaatgtggaagaaataaatataaggttctgcatttggatttaagaagttattttcacatgttctgacactgggggagacctggcttagaatcagatcatatgaaaacaatctaagattgtggattaattccttttggcaaggaggccctttgagaagctccgggcttccttcccagaaaagtccatgtatgcacatacccgccgatctgttcgtggaagcagtctgcagactggagatcccatgacgactggaagacagcatggtggtcactgttgctgctggtagagccacatctgatgtgtcccggtctgtcctggtggcagcgattcagtggtaacatggggacattgcagcgagcaggcaggatggagagcaacccttgtcaggaatcatgggagagatggcatctgtttcaacctggatgagggaggctggtgtgcttctttgagtagggggtagaagacagagcgggtgtctctgggtcactccagaggccttagaccagcaggtctaggtcacagggggacaggttgggactcaacatttaagaactttccatgcacactgacagcaagggggttaaaaaaataaaaatgaaaagaacttcccagcagttcagtggtggaatggcagccttggtagctaacatgggcatggttaatgacagcgggcagtctgtcctgctgttggtacctggcctagctggaaggagaggacacatagccgccagacctcttcccagtctgagtttctggcgttccatgcctctgggagtttggagacagaggagatcctaacccaggggctgccctgctgtcacttcccgtcgtgatgatgcccctgccaggcttcccacagtcccctttctcattcatttagtggccacccttttacctccaggcaccaggagaggacagccacatctgcagtgtccctgcaggacgccaaagctgaggcaggggagggagccacagaaagcagagtgggactcgggctgggggggcgggcagggccgagctggtctcttccctgcagcttccaagggctgcatcaagtgcgaagcgccctgcccggaggactggctgctctacggaaggaagtgctacttcttttccgaggaacccagagactggaacacaggcaggcagtactgccacacccacgaggcggtgctggctgtgattcagagccagaaggagctggaatttatgttcaagttcacgcggagggagccctggattggactacgcagagttggggacgaattccactgggtcaacggggacccgtttgatccggacacgttcaccatcgcaggtccaggggagtgtgtcttcgtggagcccaccaggctggtgtcgacggagtgtctgatgacccggccctgggtgtgcagcaagatggcctatacttgaggtgggtggggccagaggtggccccgcccctaggcctgtgggaggtgtctggtgtctgctcaagacctgcttccagcggagccgcctgccctctgcaaggcgaagcggtgggtgcgtggcctccgccccaggcccctctcccaggccctggcgctctgagtccctggttcctggcctcctttgtctgcaggcaggtcgtgtggctcagcagttaaatcccatatgctaggtagtgtaggcatctgcccacctacacacacacacatgcataggtacacgcacgcacagacgctgtcccttctgaagctcagtgtccatcctgagccaccccacagatctctctccggccccctagaagccctctcctcactgcagccctggtgctctggggaaggaggggcattgacaggtggtttgactgttcacccagcagccccgcttccccactggtttctctcctggctgccggcggaggtaggctgggaaagcttccccctcacctaggccgggccagccccgccccgggccccagaggtcccctgcatcccccttctttgccttgcctgggttctcaggcagggcccctgctgtgtccgtggtgctgttgtattggtcactaacggaataaagagttaatatctc

SEQ ID NO: 4276 - DNA, 2446 bp, Homo sapiens
  source 1..2446: mol_type = unassigned DNA; mol_type = unassigned DNA
atctggttgaactacttaagcttaatttgttaaactccggtaagtacctagcccacatgatttgactcagagattctcttttgtccacagacagtcatctcaggagcagaaagaaaagagctcccaaatgctatatctattcaggggctctcaagaacaatggaatatcatcctgatttagaaaatttggatgaagatggatatactcaattacacttcgactctcaaagcaataccaggatagctgttgtttcagagaaaggatcgtgtgctgcatctcctccttggcgcctcattgctgtaattttgggaatcctatgcttggtaatactggtgatagctgtggtcctgggtaccatgggggttctttccagcccttgtcctcctaattggattatatatgagaagagctgttatctattcagcatgtcactaaattcctgggatggaagtaaaagacaatgctggcaactgggctctaatctcctaaagatagacagctcaaatgaattgggatttatagtaaaacaagtgtcttcccaacctgataattcattttggataggcctttctcggccccagactgaggtaccatggctctgggaggatggatcaacattctcttctaacttatttcagatcagaaccacagctacccaagaaaacccatctccaaattgtgtatggattcacgtgtcagtcatttatgaccaactgtgtagtgtgccctcatatagtatttgtgagaagaagttttcaatgtaagaggaagggtggagaaggagagagaaatatgtgaggtagtaaggaggacagaaaacagaacagaaaagagtaacagctgaggtcaagataaatgcagaaaatgtttagagagcttggccaactgtaatcttaaccaagaaattgaagggagaggctgtgatttctgtatttgtcgacctacaggtaggctagtattatttttctagttagtagatccctagacatggaatcagggcagccaagcttgagtttttattttttatttatttatttttttgagatagggtctcactttgttacccaggctggagtgcagtggcacaatctcgactcactgcagctatctctcgcctcagcccctcaagtagctgggactacaggtgcatgccaccatgccaggctaatttttggtgttttttgtagagactgggttttgccatgttgaccaagctggtctctaactcctgggcttaagtgatctgcccgccttggcctcccaaagtgctgggattacagatgtgagccaccacacctggccccaagcttgaattttcattctgccattgacttggcatttaccttgggtaagccataagcgaatcttaatttctggctctatcagagttgtttcatgctcaacaatgccattgaagtgcacggtgtgttgccacgatttgaccctcaacttctagcagtatatcagttatgaactgagggtgaaatatatttctgaatagctaaatgaagaaatgggaaaaaatcttcaccacagtcagagcaattttattattttcatcagtatgatcataattatgattatcatcttagtaaaaagcaggaactcctactttttctttatcaattaaatagctcagagagtacatctgccatatctctaatagaatctttttttttttttttttttttgagacagagtttcgctcttgttgcccaggctggagtgcaacggcacgatctcggctcaccgcaacctccgccccctgggttcaagcaattctcctgcctcagcctcccaagtagctgggattacagtcaggcaccaccacacccggctaattttgtatttttttagtagagacagggtttctccatgtcggtcagggtagtcccgaactcctgacctcaagtgatctgcctgcctcggcctcccaagtgctgggattacaggcgtgagccactgcacccagcctagaatcttgtataatatgtaattgtagggaaactgctctcataggaaagttttctgctttttaaatacaaaaatacataaaaatacataaaatctgatgatgaatataaaaaagtaaccaacctcattggaacaagtattaacattttggaatatgttttattagttttgtgatgtactgttttacaatttttaccatttttttcagtaattactgtaaaatggtattattggaatgaaactatatttcctcatgtgctgatttgtcttatttttttcatactttcccactggtgctatttttatttccaatggatatttctgtattactagggaggcatttacagtcctctaatgttgattaatatgtgaaaagaaattgtaccaattttactaaattatgcagtttaaaatggatgattttatgttatgtggatttcatttcaataaaaaaaaactcttatcaaaaaa

SEQ ID NO: 4277 - DNA, 3725 bp, Homo sapiens
  source 1..3725: mol_type = unassigned DNA; mol_type = unassigned DNA
tttcctgctcttgaatatctggttgaactacttaagcttaatttgttaaactccggtaagtacctagcccacatgatttgactcagagattctcttttgtccacagacagtcatctcaggagcagaaagaaaagagctcccaaatgctatatctattcaggggctctcaagaacaatggaatatcatcctgatttagaaaatttggatgaagatggatatactcaattacacttcgactctcaaagcaataccaggatagctgttgtttcagagaaaggatcgtgtgctgcatctcctccttggcgcctcattgctgtaattttgggaatcctatgcttggtaatactggtgatagctgtggtcctgggtaccatgggtgagtatttggtggaggagattaacaacagacaatttagtaagcaattattatgtgccaggcactcttttaagggcttgacatgcataatctactttaatttgtatataatctggttttatctgtattgggttggtgctgttaatgcccatttcacttataaagggtgtgagagactgagaggttattttacctttccagggttataagctagttagtggtgggaccatgattagaaatttgggtgatctgtctaaaaaactcatactcttaactacattgctctcctacctcccttacatagctggtttcaaagctgtggaattcaaaggataaattaatgaagaaaacaagcggagctgaagaagaaagtacaatatggtgctgtcttcctaatgaaataaattcactaaatggacattaagctatttttatgattcacattatttaaggaaattatttccgatctttaatataaacacctttgaatacaccagaaatttcctgaggcacttggtcttaagtcgatattttgtaatggattaatattttttttacattttatatcacatgcaatctgttgtcagtcaccttcagagagtcttcatgacattccttaattagtcaaatgtttattgagtgcgttctatgttataggtactgggcagtttctcaaggatctctcatttttaaataacagaagaaaggtgaaagatgttgctatttcaaatctgtcatgggtccaattgactctatgacatttgcctcttgctgcctccctcattctatttcttcttctccaccttcttttttcttttctttttttttttttactatacctcctttataaaagttatgtatttcttttcatctattctatcaatcgtctttatctctccacagcaatatatcatctatttatcattaatcaataatgtattcttttattccaataacatttgggttttgggattttaattttcaaacacagcagaatgacattttttctgtcactattattattgttggtatgtgaagctatttggagatccaattcaggaagcaacacattggagaatggctactttctatcaagaaataaagagaaccacagtcaacccacacaatcatctttagaagacagtgtgactcctaccaaagctgtcaaaaccacaggggttctttccagcccttgtcctcctaattggattatatatgagaagagctgttatctattcagcatgtcactaaattcctgggatggaagtaaaagacaatgctggcaactgggctctaatctcctaaagatagacagctcaaatgaattgagtctcactctgttgcccaagctagagtgcagtgaagccgcgacatcccaggctcaagtgatcctcccacctcagcttcctgagtagggatttatagtaaaacaagtgtcttcccaacctgataattcattttggataggcctttctcggccccagactgaggtaccatggctctgggaggatggatcaacattctcttctaacttatttcagatcagaaccacagctacccaagaaaacccatctccaaattgtgtatggattcacgtgtcagtcatttatgaccaactgtgtagtgtgccctcatatagtatttgtgagaagaagttttcaatgtaagaggaagggtggagaaggagagagaaatatgtgaggtagtaaggaggacagaaaacagaacagaaaagagtaacagctgaggtcaagataaatgcagaaaatgtttagagagcttggccaactgtaatcttaaccaagaaattgaagggagaggctgtgatttctgtatttgtcgacctacaggtaggctagtattatttttctagttagtagatccctagacatggaatcagggcagccaagcttgagtttttattttttatttatttatttttttgagatagggtctcactttgttacccaggctggagtgcagtggcacaatctcgactcactgcagctatctctcgcctcagcccctcaagtagctgggactacaggtgcatgccaccatgccaggctaatttttggtgttttttgtagagactgggttttgccatgttgaccaagctggtctctaactcctgggcttaagtgatctgcccgccttggcctcccaaagtgctgggattacagatgtgagccaccacacctggccccaagcttgaattttcattctgccattgacttggcatttaccttgggtaagccataagcgaatcttaatttctggctctatcagagttgtttcatgctcaacaatgccattgaagtgcacggtgtgttgccacgatttgaccctcaacttctagcagtatatcagttatgaactgagggtgaaatatatttctgaatagctaaatgaagaaatgggaaaaaatcttcaccacagtcagagcaattttattattttcatcagtatgatcataattatgattatcatcttagtaaaaagcaggaactcctactttttctttatcaattaaatagctcagagagtacatctgccatatctctaatagaatctttttttttttttttttttttgagacagagtttcgctcttgttgcccaggctggagtgcaacggcacgatctcggctcaccgcaacctccgccccctgggttcaagcaattctcctgcctcagcctcccaagtagctgggattacagtcaggcaccaccacacccggctaattttgtatttttttagtagagacagggtttctccatgtcggtcagggtagtcccgaactcctgacctcaagtgatctgcctgcctcggcctcccaagtgctgggattacaggcgtgagccactgcacccagcctagaatcttgtataatatgtaattgtagggaaactgctctcataggaaagttttctgctttttaaatacaaaaatacataaaaatacataaaatctgatgatgaatataaaaaagtaaccaacctcattggaacaagtattaacattttggaatatgttttattagttttgtgatgtactgttttacaatttttaccatttttttcagtaattactgtaaaatggtattattggaatgaaactatatttcctcatgtgctgatttgtcttatttttttcatactttcccactggtgctatttttatttccaatggatatttctgtattactagggaggcatttacagtcctctaatgttgattaatatgtgaaaagaaattgtaccaattttactaaattatgcagtttaaaatggatgattttatgttatgtggatttcatttcaataaaaaaaaactcttatcaaaaaa

SEQ ID NO: 4278 - DNA, 1592 bp, Homo sapiens
  source 1..1592: mol_type = unassigned DNA; mol_type = unassigned DNA
atttcctgctcttgaatatctggttgaactacttaagcttaatttgttaaactccggggctctcaagaacaatggaatatcatcctgatttagaaaatttggatgaagatggatatactcaattacacttcgactctcaaagcaataccaggatagctgttgtttcagagaaaggatcgtgtgctgcatctcctccttggcgcctcattgctgtaattttgggaatcctatgcttggtaatactggtgatagctgtggtcctgggtaccatggctatttggagatccaattcaggaagcaacacattggagaatggctactttctatcaagaaataaagagaaccacagtcaacccacacaatcatctttagaagacagtgtgactcctaccaaagctgtcaaaaccacaggggttctttccagcccttgtcctcctaattggattatatatgagaagagctgttatctattcagcatgtcactaaattcctgggatggaagtaaaagacaatgctggcaactgggctctaatctcctaaagatagacagctcaaatgaattgggatttatagtaaaacaagtgtcttcccaacctgataattcattttggataggcctttctcggccccagactgaggtaccatggctctgggaggatggatcaacattctcttctaacttatttcagatcagaaccacagctacccaagaaaacccatctccaaattgtgtatggattcacgtgtcagtcatttatgaccaactgtgtagtgtgccctcatatagtatttgtgagaagaagttttcaatgtaagaggaagggtggagaaggagagagaaatatgtgaggtagtaaggaggacagaaaacagaacagaaaagagtaacagctgaggtcaagataaatgcagaaaatgtttagagagcttggccaactgtaatcttaaccaagaaattgaagggagaggctgtgatttctgtatttgtcgacctacaggtaggctagtattatttttctagttagtagatccctagacatggaatcagggcagccaagcttgagtttttattttttatttatttatttttttgagatagggtctcactttgttacccagcctagaatcttgtataatatgtaattgtagggaaactgctctcataggaaagttttctgctttttaaatacaaaaatacataaaaatacataaaatctgatgatgaatataaaaaagtaaccaacctcattggaacaagtattaacattttggaatatgttttattagttttgtgatgtactgttttacaatttttaccatttttttcagtaattactgtaaaatggtattattggaatgaaactatatttcctcatgtgctgatttgtcttatttttttcatactttcccactggtgctatttttatttccaatggatatttctgtattactagggaggcatttacagtcctctaatgttgattaatatgtgaaaagaaattgtaccaattttactaaattatgcagtttaaaatggatgattttatgttatgtggatttcatttcaataaaaaaaaactcttatcaaaaaa

SEQ ID NO: 4279 - DNA, 1154 bp, Homo sapiens
  source 1..1154: mol_type = unassigned DNA; mol_type = unassigned DNA
agacagtcatctcaggagcagaaagaaaagagctcccaaatgctatatctattcaggggctctcaagaacaatggaatatcatcctgatttagaaaatttggatgaagatggatatactcaattacacttcgactctcaaagcaataccaggatagctgttgtttcagagaaaggatcgtgtgctgcatctcctccttggcgcctcattgctgtaattttgggaatcctatgcttggtaatactggtgatagctgtggtcctgggtaccatgggggttctttccagcccttgtcctcctaattggattatatatgagaagagctgttatctattcagcatgtcactaaattcctgggatggaagtaaaagacaatgctggcaactgggctctaatctcctaaagatagacagctcaaatgaattgatttcagatcagaaccacagctacccaagaaaacccatctccaaattgtgtatggattcacgtgtcagtcatttatgaccaactgtgtagtgtgccctcatatagtatttgtgagaagaagttttcaatgtaagaggaagggtggagaaggagagagaaatatgtgaggtagtaaggaggacagaaaacagaacagaaaagagtaacagctgaggtcaagataaatgcagaaaatgtttagagagcttggccaactgtaatcttaaccaagaaattgaagggagaggctgtgatttctgtatttgtcgacctacaggtaggctagtattatttttctagttagtagatccctagacatggaatcagggcagccaagcttgagtttttattttttatttatttatttttttgagatagggtctcactttgttacccaggctggagtgcagtggcacaatctcgactcactgcagctatctctcgcctcagcccctcaagtagctgggactacaggtgcatgccaccatgccaggctaatttttggtgttttttgtagagactgggttttgccatgttgaccaagctggtctctaactcctgggcttaagtgatctgcccgccttggcctcccaaagtgctgggattacagatgtgagccaccacacctggccccaagcttgaattttcattctgccattgacttggcatttaccttgggtaagccataag

SEQ ID NO: 4280 - DNA, 1000 bp, Homo sapiens
  source 1..1000: mol_type = unassigned DNA; mol_type = unassigned DNA
atgatttgactcagagattctcttttgtccacagacagtcatctcaggagcagaaagaaaagagctcccaaatgctatatctattcaggggctctcaagaacaatggaatatcatcctgatttagaaaatttggatgaagatggatatactcaattacacttcgactctcaaagcaataccaggatagctgttgtttcagagaaaggggttctttccagcccttgtcctcctaattggattatatatgagaagagctgttatctattcagcatgtcactaaattcctgggatggaagtaaaagacaatgctggcaactgggctctaatctcctaaagatagacagctcaaatgaattgggatttatagtaaaacaagtgtcttcccaacctgataattcattttggataggcctttctcggccccagactgaggtaccatggctctgggaggatggatcaacattctcttctaacttatttcagatcagaaccacagctacccaagaaaacccatctccaaattgtgtatggattcacgtgtcagtcatttatgaccaactgtgtagtgtgccctcatatagtatttgtgagaagaagttttcaatgtaagaggaagggtggagaaggagagagaaatatgtgaggtagtaaggaggacagaaaacagaacagaaaagagtaacagctgaggtcaagataaatgcagaaaatgtttagagagcttggccaactgtaatcttaaccaagaaattgaagggagaggctgtgatttctgtatttgtcgacctacaggtaggctagtattatttttctagttagtagatccctagacatggaatcagggcagccaagcttgagtttttattttttatttatttatttttttgagatagggtctcactttgttacccaggctggagtgcagtggcacaatctcgactcactgcagctatctctcgcctcagcccctcaagtagctgggactacaggtgcatgcca

SEQ ID NO: 4281 - DNA, 1130 bp, Homo sapiens
  source 1..1130: mol_type = unassigned DNA; mol_type = unassigned DNA
ggttgaactacttaagcttaatttgttaaactccggtaagtacctagcccacatgatttgactcagagattctcttttgtccacagacagtcatctcaggagcagaaagaaaagagctcccaaatgctatatctattcaggggctctcaagaacaatggaatatcatcctgatttagaaaatttggatgaagatggatatactcaattacacttcgactctcaaagcaataccaggatagctgttgtttcagagaaaggatcgtgtgctgcatctcctccttggcgcctcattgctgtaattttgggaatcctatgcttggtaatactggtgatagctgtggtcctgggtaccatggctatttggagatccaattcaggaagcaacacattggagaatggctactttctatcaagaaataaagagaaccacagtcaacccacacaatcatctttagaagacagtgtgactcctaccaaagctgtcaaaaccacaggggttctttccagcccttgtcctcctaattggattatatatgagaagagctgttatctattcagcatgtcactaaattcctgggatggaagtaaaagacaatgctggcaactgggctctaatctcctaaagatagacagctcaaatgaattgggatttatagtaaaacaagtgtcttcccaacctgataattcattttggataggcctttctcggccccagactgaggtaccatggctctgggaggatggatcaacattctcttctaacttatttcagatcagaaccacagctacccaagaaaacccatctccaaattgtgtatggattcacgtgtcagtcatttatgaccaactgtgtagtgtgccctcatatagtatttgtgagaagaagttttcaatgtaagaggaagggtggagaaggagagagaaatatgtgaggtagtaaggaggacagaaaacagaacagaaaagagtaacagctgaggtcaagataaatgcagaaaatgtttagagagcttggccaactgtaatcttaaccaagaaattgaagggagaggctgtgatttctgtatttgtcgacctacaggtaggctagtattatttttctagttagtagatccctagacatggaatc

SEQ ID NO: 4282 - DNA, 881 bp, Homo sapiens
  source 1..881: mol_type = unassigned DNA; mol_type = unassigned DNA
atggaatatcatcctgatttagaaaatttggatgaagatggatatactcaattacacttcgactctcaaagcaataccaggatagctgttgtttcagagaaaggatcgtgtgctgcatctcctccttggcgcctcattgctgtaattttgggaatcctatgcttggtaatactggtgatagctgtggtcctgggtaccatgggtactgggcagtttctcaaggatctctcatttttaaataacagaagaaagctatttggagatccaattcaggaagcaacacattggagaatggctactttctatcaagaaataaagagaaccacagtcaacccacacaatcatctttagaagacagtgtgactcctaccaaagctgtcaaaaccacaggggttctttccagcccttgtcctcctaattggattatatatgagaagagctgttatctattcagcatgtcactaaattcctgggatggaagtaaaagacaatgctggcaactgggctctaatctcctaaagatagacagctcaaatgaattgagtctcactctgttgcccaagctagagtgcagtgaagccgcgacatcccaggctcaagtgatcctcccacctcagcttcctgagtagggatttatagtaaaacaagtgtcttcccaacctgataattcattttggataggcctttctcggccccagactgaggtaccatggctctgggaggatggatcaacattctcttctaacttatttcagatcagaaccacagctacccaagaaaacccatctccaaattgtgtatggattcacgtgtcagtcatttatgaccaactgtgtagtgtgccctcatatagtatttgtgagaagaagttttcaatgtaa

SEQ ID NO: 4283 - DNA, 355 bp, Homo sapiens
  source 1..355: mol_type = unassigned DNA; mol_type = unassigned DNA
atggaatatcatcctgatttagaaaatttggatgaagatggatatactcaattacacttcgactctcaaagcaataccaggatagctgttgtttcagagaaagggatttatagtaaaacaagtgtcttcccaacctgataattcattttggataggcctttctcggccccagactgaggtaccatggctctgggaggatggatcaacattctcttctaacttatttcagatcagaaccacagctacccaagaaaacccatctccaaattgtgtatggattcacgtgtcagtcatttatgaccaactgtgtagtgtgccctcatatagtatttgtgagaagaagttttcaatgtaa

SEQ ID NO: 4284 - DNA, 625 bp, Homo sapiens
  source 1..625: mol_type = unassigned DNA; mol_type = unassigned DNA
atggaatatcatcctgatttagaaaatttggatgaagatggatatactcaattacacttcgactctcaaagcaataccaggatagctgttgtttcagagaaaggatcgtgtgctgcatctcctccttggcgcctcattgctgtaattttgggaatcctatgcttggtaatactggtgatagctgtggtcctgggtaccatggctatttggagatccaattcaggaagcaacacattggagaatggctactttctatcaagaaataaagagaaccacagtcaacccacacaatcatctttagaagacagtgtgactcctaccaaagctgtcaaaaccacaggggttctttccagcccttgtcctcctaattggattatatatgagaagagctgttatctattcagcatgtcactaaattcctgggatggaagtaaaagacaatgctggcaactgggctctaatctcctaaagatagacagctcaaatgaattgatttcagatcagaaccacagctacccaagaaaacccatctccaaattgtgtatggattcacgtgtcagtcatttatgaccaactgtgtagtgtgccctcatatagtatttgtgagaagaagttttcaatgtaa

SEQ ID NO: 4285 - DNA, 915 bp, Homo sapiens
  source 1..915: mol_type = unassigned DNA; mol_type = unassigned DNA
tttcctgctcttgaatatctggttgaactacttaagcttaatttgttaaactccggtaagtacctagcccacatgatttgactcagagattctcttttgtccacagacagtcatctcaggagcagaaagaaaagagctcccaaatgctatatctattcaggggctctcaagaacaatggaatatcatcctgatttagaaaatttggatgaagatggatatactcaattacacttcgactctcaaagcaataccaggatagctgttgtttcagagaaaggatcgtgtgctgcatctcctccttggcgcctcattgctgtaattttgggaatcctatgcttggtaatactggtgatagctgtggtcctgggtaccatggctatttggagatccaattcaggaagcaacacattggagaatggctactttctatcaagaaataaagagaaccacagtcaacccacacaatcatctttagaagacagtgtgactcctaccaaagctgtcaaaaccacaggggttctttccagcccttgtcctcctaattggattatatatgagaagagctgttatctattcagcatgtcactaaattcctgggatggaagtaaaagacaatgctggcaactgggctctaatctcctaaagatagacagctcaaatgaattgagtctcactctgttgcccaagctagagtgcagtgaagccgcgacatcccaggctcaagtgatcctcccacctcagcttcctgagtagggatttatagtaaaacaagtgtcttcccaacctgataattcattttggataggcctttctcggccccagactgaggtaccatggctctgggaggatggatcaacattctcttctaacttatttcagatcagaaccacagctacccaagaaaacccatctcc

SEQ ID NO: 4286 - DNA, 1006 bp, Homo sapiens
  source 1..1006: mol_type = unassigned DNA; mol_type = unassigned DNA
gatttgactcagagattctcttttgtccacagacagtcatctcaggagcagaaagaaaagagctcccaaatgctatatctattcaggggctctcaagaacaatggaatatcatcctgatttagaaaatttggatgaagatggatatactcaattacacttcgactctcaaagcaataccaggatagctgttgtttcagagaaaggatcgtgtgctgcatctcctccttggcgcctcattgctgtaattttgggaatcctatgcttggtaatactggtgatagctgtggtcctgggtaccatgggggttctttccagcccttgtcctcctaattggattatatatgagaagagctgttatctattcagcatgtcactaaattcctgggatggaagtaaaagacaatgctggcaactgggctctaatctcctaaagatagacagctcaaatgaattggtaagtgtagacttctgttatgattatctgtggtgtgtatcctgaaggaagatagagggagattccaggtaatgacaatttttcctaaaatgaagtctttttttttttttttttttgaggcagagtctcactctgttgcccaagctagagtgcagtgaagccgcgacatcccaggctcaagtgatcctcccacctcagcttcctgagtaggtaggactacagggtgcaccaccacactcgtctaatgtttttttgtatttttcatagagacgaggtttctccatatcatctgggctggtctcaaaatcctgggcacaagcgatctgcctacctcgatctcccagtgttgggattacaggtgtaagccaccatacttggccaaaattcatttttaatatctctataattataatcatagcatgccttaagcacataaagtgcatagtatatgcttttatttttaactaatttaaaaaactgtgtttcgccttaaaacaaatcctttcaaacatactccatgtatgcatgactacaataatcaggacactacc

SEQ ID NO: 4287 - DNA, 425 bp, Homo sapiens
  source 1..425: mol_type = unassigned DNA; mol_type = unassigned DNA
ccacatgatttgactcagagattctcttttgtccacagacagtcatctcaggagcagaaagaaaagagctcccaaatgctatatctattcaggggctctcaagaacaatggaatatcatcctgatttagaaaatttggatgaagatggatatactcaattacacttcgactctcaaagcaataccaggatagctgttgtttcagagaaaggatcgtgtgctgcatctcctccttggcgcctcattgctgtaattttgggaatcctatgcttggtaatactggtgatagctgtggtcctgggtaccatggctggtttcaaagctgtggaattcaaaggataaattaatgaagaaaacaagcggagctgaagaagaaagtacaatatggtgctgtcttcctaatgaaataaattcactaaatggaca

SEQ ID NO: 4288 - DNA, 573 bp, Homo sapiens
  source 1..573: mol_type = unassigned DNA; mol_type = unassigned DNA
tttcctgctcttgaatatctggttgaactacttaagcttaatttgttaaactccggggctctcaagaacaatggaatatcatcctgatttagaaaatttggatgaagatggatatactcaattacacttcgactctcaaagcaataccaggatagctgttgtttcagagaaaggatcgtgtgctgcatctcctccttggcgcctcattgctgtaattttgggaatcctatgcttggtaatactggtgatagctgtggtcctgggtaccatgggtgagtatttggtggaggagattaacaacagacaatttagtaagcaattattatgtgccaggcactcttttaagggcttgacatgcataatctactttaatttgtatataatctggttttatctgtattgggttggtgctgttaatgcccatttcacttataaagggtgtgagagactgagaggttattttacctttccagggttataagctagttagtggtgggaccatgattagaaatttgggtgatctgtctaaaaaactcatactcttaactacattgctctcctacctcccttaca

SEQ ID NO: 4289 - DNA, 6023 bp, Homo sapiens
  source 1..6023: mol_type = unassigned DNA; mol_type = unassigned DNA
attgttagagacctgtcattgatagcagttgctagttgctgccttttaagagctcgttgattcctctgcaaggtggtgcagcatcctctgtcccttcattcatttcagatctactcaggtctccctgtaaacagatctctcggatcaataagcatgaatgacgaagactacagcaccatctatgacacaatccaaaatgagaggacgtatgaggttccagaccagccagaagaaaatgaaagtccccattatgatgatgtccatgagtacttaaggccagaaaatgatttatatgccactcagctgaatacccatgagtatgattttgtgtcagtctataccattaagggtgaagagaccagcttggcctctgtccagtcagaagacagaggctacctcctgcctgatgagatatactctgaactccaggaggctcatccaggtgagccccaggaggacaggggcatctcaatggaagggttatattcatcaacccaggaccagcaactctgcgcagcagaactccaggagaatgggagtgtgatgaaggaagatctgccttctccttcaagcttcaccattcagcacagtaaggccttctctaccaccaagtattcctgctattctgatgctgaaggtttggaagaaaaggagggagctcacatgaaccctgagatttacctctttgtgaaggctggaatcgatggagaaagcatcggcaactgtcctttctctcagcgcctcttcatgatcctctggctgaaaggagtcgtgttcaatgtcaccactgtggatctgaaaagaaagccagctgacctgcacaacctagcccccggcacgcacccgcccttcctgaccttcaacggggacgtgaagacagacgtcaataagatcgaggagttcctggaggagaccttgacccctgaaaagtaccccaaactggctgcaaaacaccgggaatccaacacagcgggcatcgacatcttttccaagttttctgcctacatcaaaaataccaagcagcagaacaatgctgctcttgaaagaggcctaaccaaggctctaaagaaattggatgactacctgaacacccctctaccagaggagattgacgccaacacttgtggggaagacaaggggtcccggcgcaagttcctggatggggatgagctgaccctggctgactgcaatctgttgcccaagctccatgtggtcaagattgtggccaagaaataccgcaactatgatatcccggctgagatgacaggcctgtggcggtacctcaagaacgcctatgcccgtgatgagttcaccaacacctgtgcagctgacagtgagatcgagttggcctacgctgatgtcgccaaacgcctcagccgatcctgagcacagccattttgccccatccccgctgcagaaggactcaaccactcccctaagactccagcttcatagactcctctgtatcactgccttgaggcgcactttttataatcaagcctcatcttgctggtatcatgggaactccagcctgctatctttcatgaaggtcagcaccatccctggcctcctcacataggaatctagcagaaatgatagacacagtccacctttcggccggccagcctgatctgggctcagcatgtttggggtcagtcagtgttggagagcccacatatgggattgccactagcttcttctgccaatatcaaaataccttctcagatgctttagaaacatgcaacaccaactccttttctaccctcctctccgtccatacctacaaggccaaggacaaacgccatcttcatccttcttagaaagagatctattaccccattaggggagacagagagagtgaatggaggagtaccgagctggctatggacttgggtgtctggcaaacacagcttcagtctcactacttctgacactctggttattgggcactaagggccagactggaaagtcacttgagacacattctcagtttgttgcagtgccaggaatgctgcgctgctgctgctgcgcacctggcccatgctgtccctggcttccatgccgtccaggccctgccagaaaaggaaattggcatgcaattctaaactgcagtgactgggatgggaggggaggggagcagtgttgatgccaaaatacccacggggtctaccagccatggggtttgcttgcttaggagtagttgtttcagaggtgattacaggcctgggtttgactgtgcttaccaatgagtggtttttgagctatgagaaagtggatgggagtgggaggaggagagatgggtgaagacaaaagagttctttatgagcctcgatgttccctggtaaacttttaaaaaggccttctctcatgatctaagtcttggactggtggcatcatgtaactgctaaccttacagtaaaaacccaagaatgggtcaaaaatgtcttcccagtttctccaagctgcttctggaatgcaggtctgtcggctgggtgctctccagcagctgctcctgcctgattcaactgtagcctgtaatgggtaaaagccacatttaggaggtggtctgatcatagaacaccttaggaagaaagtccatgagactttctgactaggaaaccatgtggtttgaacttgaagaaaaatgtagacccatctgggttaattttcctacaatctgactcaactgccaggtgaaaaaaaaaaggaaaaatttttaagctaatatttcactcttttgtcattctccttaagtttcatctcctaaaaagcttacccagcctgagcttggggacctgtgcagaggaaactaagaaaaatgcactcatcaactccttctcccagtgaacgcccggtgagaaaatccatttgccacaggcccttaccttcaacaatcccccttctatagtgttcgctggtaaagggtgaggctcccaagtgctggaaagcccctggacttggctcatttctcagcaagggcaggatagcacgggtcctttccatagaaatatcaacaaattctaacccaagcaatccctggacctacctgcctccagggatctctgaagaaaaaaagtaacccattgatcaaatcagaggagaggaagcaggaggtctcctagagcccattgaggaagaggaactttctcagtaggacactttataagcctgagaaagctttgaaaaggcggaatgagttgattcatttccacctcaaaaggaacctttccaggtccccctggaaattgtgccctggagatgtttaacaaggagaactggtgaggaaagagtccttttttactgtagggaaaagccccaaactggcctcctgggggatgagggctgaaatgatcccgaaggccttttaattagtgtgaaatcctgctgtactcagaaatccttccccgaatttacagcacaggcaggatgacctaagaggcagtttacttccctgagacccacagttgggctgttctggaaacacatctgtgaatcatagccaattgccacagagaaaacagaaccaagcctccggtgaggccactccaccccagagaagtctgcagaattccaaggactcggattggatgttcagaattcagcaactggaaagtccttaaaaacaaacaggccaaaccaaatcaatattgctgtttctagatgtcccttctgtggttgagctagttttacagagataaatatattaagacaaggaggtgggggtgttatatgatcaatgatagccatttgaaagagagggaggagtacagaaggaaggcacttctgggtacttaattcagaaatttctttatatttcagcactggattatcatataatgcaagtgactatggactaagagttagttatggtgtcttatgactagatttattatggtatattaaagtaacaataatattaatattaccttcctttttttttttgtttcaaaagagatctttctccagatgcttcagcctgtctggccttcttatcatatgtgcagcacatcatgtctcagcaacagtgtggtgaggtccttaggtgtcccaagaacaactcagggagcacgggagggtctgcagttgggaccccacaactatacagctatagggtaggaggcttccttttcattggtcctgaatgaatacaaatcgctcagaaagcattttggtggcacagaaaggggatgtatttgtgttgagatcttattttattttgtatttatttatcttctttgacttgcacagcactattgggggtgggggaagcagggtagtgggagacgaaggcagaagcaagagtcaaactcagaatgactgagttgaattcactgtctagtcagcaatgcctgcttctgagtttggcccagagagaaggtattgagtaagattttaataactgtaaaaagtaagctggataagtaaaatcatgatggatccaaagcacagtttcttcatctcctgataaagaaagtcaaatgcttgataaattcagagtcacagatgtgagcatagctatattcttttaaacgagaggtagagtgacctagcactaagcaaatgagctgaaatgtcggaaacagagtccatcagcttatttggccacacgatcccaaactagttttatcttgggaaatggccctgtcctcagcattcccttcttgtgctggtggggccagtgaagtcttgatcttatcagaaaaaggccacaccaagtgcgagttttcccaggctgactttccaggcccttatcaaatgaaacaacagaagctcttcacagttctgtgccccatggccactccacagacagacaataccaagcatcttagaactgtcataagataggtcatgcctgaaatagatcttgaccatatgagagtcccagaaatcagcaaggcctggacaaatagaactaagagagaggcagaggcaggaagctgcgggtctatcttgtaaagagtttagcatcactgtgagagtgtgtgtctaaaattaaattaaactagaagcagcaggtgagtatttggtaagtacttctgtgactcgcctcaattcccactggccaggggccatctcaactgcacggtgaatcaagatgctggtgtcatcctccttggaaaaaggaaatgttaactcatggttaaaactaagtacaatgattcccaagggatcactttcttatttttttaaatgacattaaggagaatcttaagaaagcatcagagaaagacatgtgcatgtgaagcaccctgattctgatgttaggaaaacttaagcgaacaggacctgctgcacacagccccattgtcttctatccatttctctttatcattcaaatcaagcaacatgtgccctcctcatcaacacacattcttcccctttgtcagtatgcatctcccagcttagtgtcaggatactttcgattcataattatgtatgatccaaagtgtgcataatttcatttaacgttaaagaaatagatccaattcctttcttgcaaccaaaaataaataaaatacgttgcctcaatataaggtttgggctattctgtgtttctatagaagcaatctgtttttggtaaaatgtacttttaaggatccagtcatctgaagtattttatgtagagttagagatttcacaatattgactatacatatatttaaaatataaattatccagctgatgtttgaatttgtcttactttcctggccacctcgttgtcctattttataagctggggagttaactagcttaacaaaagatgcttagcttttgtaaaagaacaagtgtttcattttacaaagacactccaaatgatagttacttgattttctcgagacctttaactatggtgatgaataacaggacttgctttcaagccttaataaatgtaaaatgccttttaatgaagatacagctgagtgttttcctcatgaatctgaaccaattaccaatttgtgttccagtcttgattggtattgactgattcaaataaagttggtttattttcaaatattacaaaa

SEQ ID NO: 4290 - DNA, 569 bp, Homo sapiens
  source 1..569: mol_type = unassigned DNA; mol_type = unassigned DNA
atgcccgtgatgagttcaccaacacctgtgcagctgacagtgagatcgagttggcctacgctgatgtcgccaaacgcctcagccgatcctgagcacagccattttgccccatccccgctgcagaaggactcaaccactcccctaagactccagcttcatagactcctctgtatcactgccttgaggcgcactttttataatcaagcctcatcttgctggtatcatgggaactccagcctgctatctttcatgaagtttcatctcctaaaaagcttacccagcctgagcttggggacctgtgcagaggaaactaagaaaaatgcactcatcaactccttctcccagtgaacgcccgagatctttctccagatgcttcagcctgtctggccttcttatcatatgtgcagcacatcatgtctcagcaacagtgtggtgaggtccttaggtgtcccaagaacaactcagggagcacgggagggtctgcagttgggaccccacaactatacagctatagggtaggaggcttccttttcattggtcctgaatgaatacaaatcgctcagaaagca

SEQ ID NO: 4291 - DNA, 2390 bp, Homo sapiens
  source 1..2390: mol_type = unassigned DNA; mol_type = unassigned DNA
cggatcctgtgacacctccgggcagcccggcacttgttgctcccacgacctgttgtcattcccttaacccggctttccccgtggccccccgcctcctcccggcttcgctccttttcatgtgagcatctgggacactgatctctcagaccccgctgctcgggctggagaatagatggttttgtgaaaaattaaacaccgccctgaagaggagccccgctgggcagcggcaggagcgcagagtgctggcccaggtgctgcagaggtggcgcctccccggcccgggacggtagccccgggcgccaacggcatgacagactcggcgacagctaacggggacgacagggaccccgagatcgagctctttgtgaaggctggaatcgatggagaaagcatcggcaactgtcctttctctcagcgcctcttcatgatcctctggctgaaaggagtcgtgttcaatgtcaccactgtggatctgaaaagaaagccagctgacctgcacaacctagcccccggcacgcacccgcccttcctgaccttcaacggggacgtgaagacagacgtcaataagatcgaggagttcctggaggagaccttgacccctgaaaagtaccccaaactggctgcaaaacaccgggaatccaacacagcgggcatcgacatcttttccaagttttctgcctacatcaaaaataccaagcagcagaacaatgctgctcttgaaagaggcctaaccaaggctctaaagaaattggatgactacctgaacacccctctaccagaggagattgacgccaacacttgtggggaagacaaggggtcccggcgcaagttcctggatggggatgagctgaccctggctgactgcaatctgttgcccaagctccatgtggtcaagattgtggccaagaaataccgcaactatgatatcccggctgagatgacaggcctgtggcggtacctcaagaacgcctatgcccgtgatgagttcaccaacacctgtgcagctgacagtgagatcgagttggcctacgctgatgtcgccaaacgcctcagccgatcctgagcacagccattttgccccatccccgctgcagaaggactcaaccactcccctaagactccagcttcatagactcctctgtatcactgccttgaggcgcactttttataatcaagcctcatcttgctggtatcatgggaactccagcctgctatctttcatgaaggtcagcaccatccctggcctcctcacataggaatctagcagaaatgatagacacagtccacctttcggccggccagcctgatctgggctcagcatgtttggggtcagtcagtgttggagagcccacatatgggattgccactagcttcttctgccaatatcaaaataccttctcagatgctttagaaacatgcaacaccaactccttttctaccctcctctccgtccatacctacaaggccaaggacaaacgccatcttcatccttcttagaaagagatctattaccccattaggggagacagagagagtgaatggaggagtaccgagctggctatggacttgggtgtctggcaaacacagcttcagtctcactacttctgacactctggttattgggcactaagggccagactggaaagtcacttgagacacattctcagtttgttgcagtgccaggaatgctgcgctgctgctgctgcgcacctggcccatgctgtccctggcttccatgccgtccaggccctgccagaaaaggaaattggcatgcaattctaaactgcagtgactgggatgggaggggaggggagcagtgttgatgccaaaatacccacggggtctaccagccatggggtttgcttgcttaggagtagttgtttcagaggtgattacaggcctgggtttgactgtgcttaccaatgagtggtttttgagctatgagaaagtggatgggagtgggaggaggagagatgggtgaagacaaaagagttctttatgagcctcgatgttccctggtaaacttttaaaaaggccttctctcatgatctaagtcttggactggtggcatcatgtaactgctaaccttacagtaaaaacccaagaatgggtcaaaaatgtcttcccagtttctccaagctgcttctggaatgcaggtctgtcggctgggtgctctccagcagctgctcctgcctgattcaactgtagcctgtaatgggtaaaagccacatttaggaggtggtctgatcatagaacaccttaggaagaaagtccatgagactttctgactaggaaaccatgtggtttgaacttgaagaaaaatgtagacccatctgggttaattttcctacaatctgactcaactgccaggtgaaaaaaaaaaggaaaaa

SEQ ID NO: 4292 - DNA, 609 bp, Homo sapiens
  source 1..609: mol_type = unassigned DNA; mol_type = unassigned DNA
tcagtgtctcttcctcttgtcctagctgcctgtggaaagaaaggcttcttcttccaacagatgagtattctgcagtgtgtggggagctggcagtgtgatgaaggggacaggattctagatgagctactccactctgaagaccctatgactgtatccactggcaagaagtttgaataaaggcccttttactctttcatgccagctcttgaaagaggcctaaccaaggctctaaagaaattggatgactacctgaacacccctctaccagaggagattgacgccaacacttgtggggaagacaaggggtcccggcgcaagttcctggatggggatgagctgaccctggctgactgcaatctgttgcccaagctccatgtggtcaagacccaccttctcacttcctccagcaacttcctaagattgtggccaagaaataccgcaactatgatatcccggctgagatgacaggcctgtggcggtacctcaagaacgcctatgcccgtgatgagttcaccaacacctgtgcagctgacagtgagatcgagttggcctacgctgatgtcgccaaacgcctcagccgatcctgagcacagccattttgccccatcc

SEQ ID NO: 4293 - DNA, 869 bp, Homo sapiens
  source 1..869: mol_type = unassigned DNA; mol_type = unassigned DNA
caaagtcattgccctccatgaactaacaatctacagggagctgtaaaacaagtacatgtgcaattcccggcctgggtttgaatcccagcacttctagctgcacaactttacccaagaggcttattctttctgagcctctggctctgcatctgtaaaatggactttacattcagtttctttatctggcaataaggaaaaatccaaatggatttctcactttttgaccagatgtttcattgtcacacagcccgtgtgacagcactggcccctagtacaggcagagttgaaaagtgatgtgatgggtcatggttgcccctctactcagagaaaactccttcttgacctcatcacggtcgctgaaagtactaagaattatatctgaaatcaagcactggtagcagaacacaaatatgttaccaaattagttggaagaggttaggagcttgtaaggaagaccatagcagttgaaaacaaagcaaggcacatttccattgtacgtcccaggagtagtttgaatggtttaaggaccagctatgtgtgtgcttgcataagcgtatgtgccctgggtattctgcagtgtgtggggagctggcagtgtgatgaaggggacaggattctagatgagctactccactctgaagaccctatgactgtatccactggcaagaagtttgaataaaggcccttttactctttcatgccagctcttgaaagaggcctaaccaaggctctaaagaaattggatgactacctgaacacccctctaccagaggagattgacgccaacacttgtggggaagacaaggggtcccggcgcaagttcctggatggggatgagctgaccctggctgactgcaatctgttgccca

SEQ ID NO: 4294 - DNA, 273 bp, Homo sapiens
  source 1..273: mol_type = unassigned DNA; mol_type = unassigned DNA
gcctctggctctgcatctgtaaaatggactttacattcagtttctttatctggcaataagaaaggctttatagctactcccagggatgcataaagcacggcaaaccaacaaaggccaagaggaggtgagaaagaaaaacaaggagacaaccatcaaatggagccctgggcccgaatcttcaaattgctcctgtcttctccttctaagaggtgccacctgcagtgggtcatgctcctggctgatgctgctagaaaaagaactcatctgtatcac

SEQ ID NO: 4295 - DNA, 499 bp, Homo sapiens
  source 1..499: mol_type = unassigned DNA; mol_type = unassigned DNA
cggcatgacagactcggcgacagctaacggggacgacagggaccccgagatcgagctctttgtgaaggaggaaggatggaggcgaggctgcggcggcgtttcccggtccgccggtgtaaggagaaagaaacatttgatcagcccttggtgccgacgctgcagaagtagggaaacctgaggctgcgggagagtagcctccagggctgagcagaaacagtcgccaggacttgggggaggggaagtcggggactgcctgggcgccaagacctttcacaaagggggaaaactctctcagtgcaaagtttccctagaaatatgcagatcgctgagaagggaagagtcactggtgcctgtcaggggcctcctggcagaatttaaaaggcataaatattccctggaattgggaaaatgttattttgcccaaaagatccttctctacaagctaattaaatagatgtttgcaaaaagtatgagatctacataaaccttgataacaatc

SEQ ID NO: 4296 - DNA, 2051 bp, Homo sapiens
  source 1..2051: mol_type = unassigned DNA
attttgggcgcgttggcggcggcgggatcgctgacagtcgcggatcctgtgacacctccgggcagcccggcacttgttgctcccacgacctgttgtcattcccttaacccggctttccccgtggccccccgcctcctcccggcttcgctccttttcatgtgagcatctgggacactgatctctcagaccccgctgctcgggctggagaatagatggttttgtgaaaaattaaacaccgccctgaagaggagccccgctgggcagcggcaggagcgcagagtgctggcccaggtgctgcagaggtggcgcctccccggcccgggacggtagccccgggcgccaacggcatgacagactcggcgacagctaacggggacgacagggaccccgagatcgagctctttgtgaaggctggaatcgatggagaaagcatcggcaactgtcctttctctcagcgcctcttcatgatcctctggctgaaaggagtcgtgttcaatgtcaccactgtggatctgaaaagaaagccagctgacctgcacaacctagcccccggcacgcacccgcccttcctgaccttcaacggggacgtgaagacagacgtcaataagatcgaggagttcctggaggagaccttgacccctgaaaagtaccccaaactggctgcaaaacaccgggaatccaacacagcgggcatcgacatcttttccaagttttctgcctacatcaaaaataccaagcagcagaacaatgctgctcttgaaagaggcctaaccaaggctctaaagaaattggatgactacctgaacacccctctaccagaggagattgacgccaacacttgtggggaagacaaggggtcccggcgcaagttcctggatggggatgagctgaccctggctgactgcaatctgttgcccaagctccatgtggtcaaggaacaagtaccactgaaagggatgatataattccagctcagtcacactgtgtcagagtgatacaatgcaaagatcaggagacccgagttccggtcctgtatttgctgccaactagcagcatgagctgaggcacatcatttaatctttttggaattcatttttctcatgcctagaagaacagaagtggattgtattccttcttgccttcttttcctttcttctttccctccttctttccttttctcttgctcaaacatgtattcactaccactcaaaaaccatttgttgaacaaagcaaacaaatgaatctcccaagccttgggcttcatcctgtgatttcctcaattcccacctgccttaaattactcagtgaagccctgtccttggagaaaattcagtgggtggttaacccagagaagctggagatcaaaaagaagatggccaatgaaagaacaaaggccagcccttggcccctatctctttggatttctgctgatccagcttatcagatcccagaaacctggcaaacctctaaagttcacaaagagcgaaggggaagccaagtcaggcctccagtttggcttcggatgccaaaacttaatctgggctgtgggagctaactgttttcatatgaaagagcaaattcagaacatgagcatggaagtccctgcgaacgtcagatctccgtgtgcatccttacccccttgctgctttcatgctcactctcctcttgcgtggctcgctttcaggtttatctccatccctggaagcagagttgctctggcccaggctctccatgagagtttggcttgaacattcattgtctggccccctcctagttctcatctcccaaagtcaagccaatgtgtgaagaaatgaccagctcagcagccaaggcccagggtgcacaggtcttcgttgggagaggcatctgcaggcctttccttgctcactgggatccttgcctagcatagtgacgatgttcagccctggagacaaacaagaaggggaacaccaacatcaatagaagtatatatttacaaattgcatttctgctgtattgaaactaacattctgccctttaaaatcctgaaaataaaatttcagtatgaaatg

SEQ ID NO: 4297 - DNA, 3860 bp, Homo sapiens
  source 1..3860: mol_type = unassigned DNA; mol_type = unassigned DNA
atggccgaggccgcggagccggagggggttgccccgggtccccaggggccgccggaggtccccgcgcctctggctgagagacccggagagccaggagccgcgggcggggaggcagaagggccggaggggagcgagggcgcagaggaggcgccgaggggcgccgccgctgtgaaggaggcaggaggcggcgggccagacaggggcccggaggccgaggcgcggggcacgaggggggcgcacggcgagactgaggccgaggagggagccccggagggtgccgaggtgccccaaggaggggaggagacaagcggcgcgcagcaggtggagggggcgagcccgggacgcggcgcgcagggcgagccccgcggggaggctcagagggagcccgaggactctgcggcccccgagaggcaggaggaggcggagcagaggcctgaggtcccggaaggtagcgcgtccggggaggcgggggacagcgtagacgcggagggcccgctgggggacaacatagaagcggagggcccggcgggcgacagcgtagaggcggagggccgggtgggggacagcgtagacgcggaaggtccggcgggggacagcgtagacgcggagggcccgctgggggacaacatacaagccgagggcccggcgggggacagcgtagacgcggagggccgggtgggggacagcgtagacgcggaaggtccggcgggggacagcgtagacgcggagggccgggtgggggacagcgtagaggcgggggacccggcgggggacggcgtagaagcgggggtcccggcgggggacagcgtagaagccgaaggcccggcgggggacagcatggacgccgagggtccggcaggaagggcgcgccgggtctcgggtgagccgcagcaatcgggggacggcagcctctcgccccaggccgaggcaattgaggtcgcagccggggagagtgcggggcgcagccccggtgagctcgcctgggacgcagcggaggaggcggaggtcccgggggtaaaggggtccgaagaagcggcccccggggacgcaagggcagacgctggcgaggacagggtaggggatgggccacagcaggagccgggggaggacgaagagagacgagagcggagcccggaggggccaagggaggaggaagcagcggggggcgaagaggaatcccccgacagcagcccacatggggaggcctccaggggcgccgcggagcctgaggcccagctcagcaaccacctggccgaggagggccccgccgagggtagcggcgaggccgcgcgcgtgaacggccgccgggaggacggagaggcgtccgagccccgggccctggggcaggagcacgacatcaccctcttcgtcaaggtaaaacttactgcattaggctgttctcgcattgctataaagaaatacctgagagctggttatgatggtgagagtatcggaaattgcccgttttctcagcgtctctttatgattctctggctgaaaggcgttatatttaatgtgaccacagtggacctgaaaaggaaacccgcagacctgcagaacctggctcccggaacaaaccctcctttcatgacttttgatggtgaagtcaagacggatgtgaataagatcgaggagttcttagaggagaaattagctcccccgaggtatcccaagctggggacccaacatcccgaatctaattccgcaggaaatgacgtgtttgccaaattctcagcgtttataaaaaacacgaagaaggatgcaaatgagattcatgaaaagaacctgctgaaggccctgaggaagctggataattacttaaatagccctctgcctgatgaaatagatgcctacagcaccgaggatgtcactgtttctggaaggaagtttctggatggggacgagctgacgctggctgactgcaacctcttacccaagctccatattattaagattgtggccaagaagtacagagattttgaatttccttctgaaatgactggcatctggagatacttgaataatgcttatgctagagatgagttcacaaatacgtgtccagctgatcaagagattgaacacgcatattcagatgttgcaaaaagaatgaaatgaagctgggctgttttctgtcttatttctcagttgagtgagcaaggatacgaaaacagtgtgtttgaaaacaaattaggtttgggttcaattccttcaatttttaaaaaactggtctctgagagttttttaaatcattgagagcctgtttttcttctctaaaacattagtttaattttcttcaaaatgaaaatactgctttgtaattacaaaatgagacacacctatcttgatattttaaagcaatatcagagggtgtaaagaaggacattttaacaatcgccttcaattttactccacttaattaccgaaaacttactggagaacatgttccaaatcttcagtatcttgttctctctctctctctctctctctctctctatcacacacacacacacacacacacacacacacacacacaatttcattcatatatggtattgcattattttattttaaagcactggtgaggggacctcttggtgattcctggatgatcatacacagaggacttacaccatacaaaaatattgggcaccgcagtgccagagaagatgcttgaggttagattttaaggagtggggaattgtgaagcccacagatgcgcacgcaatgaccagcaggaaccggaagccctgggtcacccccactctgcctcatttctgcctccaggatgccactgcctctgcttccaggaaaggcaagggggagggtgcttatccgtgtctctggttccagcttcctgtctttgctccctcccctctcttagagactgtgccttcagcaggactcttaatatctgctgcaacttggagaacctccctgccctgaaatgtgaaccaagcacactttggttccttctccgggcggctctctctgagacccaaggctgcagtccctcagtgctggtggtatcgtgtggggatagcaatacttctctgcccttcattgtctcatctagacatcaagcagggaaaatccagggagattaaattcatggtgacaagtcctgggcagttctggtaaacggtccagttagggagggagtagaaactattgactcaaaagagtttctggctgatctgtggctttgcctccaccatccctaaccaacctctcatcacagctttgtgtgtgggctgagtgctggccttaaccctaggcgtggaagagaaaatgtgaggttgtttagatactcatcaggacctcacaggagctgagacttatcagccagaatgtgttcttcggacagtcgtacacatcttacagaaaaccctccttgtagagttggttgtggtatgtgtttgatgctataaagctcatttttaatgtgtacacctgctctagggacgattcgtttgaaagagagtaagatgcattaacagaaactatcctgggattaggtgaaaaatgtctagcaaaagaaacaaagtctttaatagagtggcctctttcgctcttcgattatgactgctgcagttttaccccagcagtcagctgtctttgtcaaccatacgtttttggagattgggtctagcacatgtcacccttgtccacgttgtttcacatctggttagggggcagattttaaaatgtagttttgtaatgttacatttaagcatgataaatgattagactaccagatgttactagtgctaactttgtattcttagacattaaaatgattgacataaactctttgtgccttgaaaatgaaacaaattataaaaatgtttaaatggaaccaa

SEQ ID NO: 4298 - DNA, 3806 bp, Homo sapiens
  source 1..3806: mol_type = unassigned DNA; mol_type = unassigned DNA
atggccgaggccgcggagccggagggggttgccccgggtccccaggggccgccggaggtccccgcgcctctggctgagagacccggagagccaggagccgcgggcggggaggcagaagggccggaggggagcgagggcgcagaggaggcgccgaggggcgccgccgctgtgaaggaggcaggaggcggcgggccagacaggggcccggaggccgaggcgcggggcacgaggggggcgcacggcgagactgaggccgaggagggagccccggagggtgccgaggtgccccaaggaggggaggagacaagcggcgcgcagcaggtggagggggcgagcccgggacgcggcgcgcagggcgagccccgcggggaggctcagagggagcccgaggactctgcggcccccgagaggcaggaggaggcggagcagaggcctgaggtcccggaaggtagcgcgtccggggaggcgggggacagcgtagacgcggagggcccgctgggggacaacatagaagcggagggcccggcgggcgacagcgtagaggcggagggccgggtgggggacagcgtagacgcggaaggtccggcgggggacagcgtagacgcggagggcccgctgggggacaacatacaagccgagggcccggcgggggacagcgtagacgcggagggccgggtgggggacagcgtagacgcggaaggtccggcgggggacagcgtagacgcggagggccgggtgggggacagcgtagaggcgggggacccggcgggggacggcgtagaagcgggggtcccggcgggggacagcgtagaagccgaaggcccggcgggggacagcatggacgccgagggtccggcaggaagggcgcgccgggtctcgggtgagccgcagcaatcgggggacggcagcctctcgccccaggccgaggcaattgaggtcgcagccggggagagtgcggggcgcagccccggtgagctcgcctgggacgcagcggaggaggcggaggtcccgggggtaaaggggtccgaagaagcggcccccggggacgcaagggcagacgctggcgaggacagggtaggggatgggccacagcaggagccgggggaggacgaagagagacgagagcggagcccggaggggccaagggaggaggaagcagcggggggcgaagaggaatcccccgacagcagcccacatggggaggcctccaggggcgccgcggagcctgaggcccagctcagcaaccacctggccgaggagggccccgccgagggtagcggcgaggccgcgcgcgtgaacggccgccgggaggacggagaggcgtccgagccccgggccctggggcaggagcacgacatcaccctcttcgtcaaggctggttatgatggtgagagtatcggaaattgcccgttttctcagcgtctctttatgattctctggctgaaaggcgttatatttaatgtgaccacagtggacctgaaaaggaaacccgcagacctgcagaacctggctcccggaacaaaccctcctttcatgacttttgatggtgaagtcaagacggatgtgaataagatcgaggagttcttagaggagaaattagctcccccgaggtatcccaagctggggacccaacatcccgaatctaattccgcaggaaatgacgtgtttgccaaattctcagcgtttataaaaaacacgaagaaggatgcaaatgagattcatgaaaagaacctgctgaaggccctgaggaagctggataattacttaaatagccctctgcctgatgaaatagatgcctacagcaccgaggatgtcactgtttctggaaggaagtttctggatggggacgagctgacgctggctgactgcaacctcttacccaagctccatattattaagattgtggccaagaagtacagagattttgaatttccttctgaaatgactggcatctggagatacttgaataatgcttatgctagagatgagttcacaaatacgtgtccagctgatcaagagattgaacacgcatattcagatgttgcaaaaagaatgaaatgaagctgggctgttttctgtcttatttctcagttgagtgagcaaggatacgaaaacagtgtgtttgaaaacaaattaggtttgggttcaattccttcaatttttaaaaaactggtctctgagagttttttaaatcattgagagcctgtttttcttctctaaaacattagtttaattttcttcaaaatgaaaatactgctttgtaattacaaaatgagacacacctatcttgatattttaaagcaatatcagagggtgtaaagaaggacattttaacaatcgccttcaattttactccacttaattaccgaaaacttactggagaacatgttccaaatcttcagtatcttgttctctctctctctctctctctctctctctatcacacacacacacacacacacacacacacacacacacaatttcattcatatatggtattgcattattttattttaaagcactggtgaggggacctcttggtgattcctggatgatcatacacagaggacttacaccatacaaaaatattgggcaccgcagtgccagagaagatgcttgaggttagattttaaggagtggggaattgtgaagcccacagatgcgcacgcaatgaccagcaggaaccggaagccctgggtcacccccactctgcctcatttctgcctccaggatgccactgcctctgcttccaggaaaggcaagggggagggtgcttatccgtgtctctggttccagcttcctgtctttgctccctcccctctcttagagactgtgccttcagcaggactcttaatatctgctgcaacttggagaacctccctgccctgaaatgtgaaccaagcacactttggttccttctccgggcggctctctctgagacccaaggctgcagtccctcagtgctggtggtatcgtgtggggatagcaatacttctctgcccttcattgtctcatctagacatcaagcagggaaaatccagggagattaaattcatggtgacaagtcctgggcagttctggtaaacggtccagttagggagggagtagaaactattgactcaaaagagtttctggctgatctgtggctttgcctccaccatccctaaccaacctctcatcacagctttgtgtgtgggctgagtgctggccttaaccctaggcgtggaagagaaaatgtgaggttgtttagatactcatcaggacctcacaggagctgagacttatcagccagaatgtgttcttcggacagtcgtacacatcttacagaaaaccctccttgtagagttggttgtggtatgtgtttgatgctataaagctcatttttaatgtgtacacctgctctagggacgattcgtttgaaagagagtaagatgcattaacagaaactatcctgggattaggtgaaaaatgtctagcaaaagaaacaaagtctttaatagagtggcctctttcgctcttcgattatgactgctgcagttttaccccagcagtcagctgtctttgtcaaccatacgtttttggagattgggtctagcacatgtcacccttgtccacgttgtttcacatctggttagggggcagattttaaaatgtagttttgtaatgttacatttaagcatgataaatgattagactaccagatgttactagtgctaactttgtattcttagacattaaaatgattgacataaactctttgtgccttgaaaatgaaacaaattataaaaatgtttaaatggaaccaa

SEQ ID NO: 4299 - DNA, 1888 bp, Homo sapiens
  source 1..1888: mol_type = unassigned DNA; mol_type = unassigned DNA
gtgttttcgagacgagtctcgacgcagcagctgtcagctccattttgttgttggtgcgcgacgcagtcagctgcgtgattcccgtgattgcgttacaagctttgtctccttcgacttggagtctttgtccaggacgatgagacactcaaagagaacttactgtcctgattgggatgacaaggattgggattatggaaaatggaggagcagcagcagtcataaaagaaggaagagatcacatagcagtgcccaggagaacaagcgctgcaaatacaatcactctaaaatgtgtgatagccattatttggaaagcaggtctataaatgagaaagattatcatagtcgacgctacattgatgagtacagaaatgactacactcaaggatgtgaacctggacatcgccaaagagaccatgaaagccggtatcagaaccatagtagcaagtcttctggtagaagtggaagaagtagttataaaagcaaacacaggattcaccacagtacttcacatcgtcgttcacatgggaagagtcaccgaaggaaaagaaccaggagtgtagaggatgatgaggagggtcacctgatctgtcagagtggagacgtactaagtgcaagatatgaaattgttgatactttaggtgaaggagcttttggaaaagttgtggagtgcatcgatcataaagcgggaggtagacatgtagcagtaaaaatagttaaaaatgtggatagatactgtgaagctgctcgctcagaaatacaagttctggaacatctgaatacaacagaccccaacagtactttccgctgtgtccagatgttggaatggtttgagcatcatggtcacatttgcattgtttttgaactattgggacttagtacttacgacttcattaaagaaaatggttttctaccatttcgactggatcatatcagaaagatggcatatcagatatgcaagtctgtgaattttttgcacagtaataagttgactcacacagacttaaagcctgaaaacatcttatttgtgcagtctgactacacagaggcgtataatcccaaaataaaacgtgatgaacgcaccttaataaatccagatattaaagttgtagactttggtagtgcaacatatgatgacgaacatcacagtacattggtatctacaagacattatagagcacctgaagttattttagccctagggtggtcccaaccatgtgatgtctggagcataggatgcattcttattgaatactatcttgggtttaccgtatttccaacacacgatagtaaggagcatttagcaatgatggaaaggattcttggacctctaccaaaacatatgatacagaaaaccaggaaacgtaaatattttcaccacgatcgattagactgggatgaacacagttctgccggcagatatgtttcaagacgctgtaaacctctgaaggaatttatgctttctcaagatgttgaacatgagcgtctctttgacctcattcagaaaatgttggagtatgatccagccaaaagaattactctcagagaagccttaaagcatcctttctttgaccttctgaagaaaagtatatagatctgtaattggacagctctctcgaagagatcttacagactgtatcagtctaatttttaaattttaagttattttgtacagctttgtaaattcttaacatttttatattgccatgtttattttgtttgggtaatttggttcattaagtacatagctaaggtaatgaacatctttttcagtaattgtaaagtgatttattcagaataaattttttgtgcttatgaagttgatatgtatctgaacagtttgttctaagtaccatttttcttcctacttctattaaagaatggacataga

SEQ ID NO: 4300 - DNA, 3173 bp, Homo sapiens
  source 1..3173: mol_type = unassigned DNA; mol_type = unassigned DNA
agattagttgaaaattattacaaaatattctaaaagggttttttgtggtacttcaagaaacctgattagttttgatctattgaaatcacaaaagtagaacagggcattttatttttgtataatttaggattaggtatgcttctttgttctaacaagtcatgttttctaacccttctttcactaagcaaaccagaacagatttgaactgttatgggttatatattagtatggagatcagctcagatgacattaaaaatgccgtagtgttattcttgtatgccaaatctttttttccccaaaattagcactttaattttatttactgttataatatttgttttcttagattaggtaggaaatcttaatttggccaccgcctactttgacaagtaaatattacatcatacgattttgcaacattaaattagaacactagaaactaaaaaattatgtttcagtgaatgctacaactaagcattttttttttttaagaaaaacaattgtattatgttttgttgccttgccactttgagtatcttatctgaaaatctgttccttgccatgtttttctcctgttaacataaactatgtgccctgtgaatttctggggactgaatttgaaattgctcctgccaaccgtttgtggcctggcgtgtatctgaatgcctgaatatctccccgctgaatgaatttcgtattctgccctgaattcactcgggtatattgattggctggatgatcttggtgccgcccacttgacgtttccagaagagtcaccgaaggaaaagaaccaggagtgtagaggatgatgaggagggtcacctgatctgtcagagtggagacgtactaagtgcaagatgtatagaatatttttcaacacttattaacttttcagataacataatctatatatagattaagctttcagggatttggaaatctttttttctttctcttttttgtttttgttttatttttccatttcttttggtgggggggattgtatttttgctttctttagaaatgtaatgtttgttatatagaacttccagaacagtaatcaaattaatgaaattagacctaataattatgttttttgatggtgttgaccaataaaatatctagtgataaggaaatttgtagcatcaactagaataatctacattgatagcatttattgtgataagtacattgtttccacttcttgatatgactgagatttatttctctcttttagatgaaattgttgatactttaggtgaaggagcttttggaaaagttgtggagtgcatcgatcataaagcgggaggtagacatgtagcagtaaaaatagttaaaaatgtggatagatactgtgaagctgctcgctcagaaatacaagttctggaacatctgaatacaacagaccccaacagtactttccgctgtgtccagatgttggaatggtttgagcatcatggtcacatttgcattgtttttgaactattgggacttagtacttacgacttcattaaagaaaatggttttctaccatttcgactggatcatatcagaaagatggcatatcagatatgcaagtctgtgaattgtaagttcttggtatatcttcgttaatttgctggttttatccattccacatatcaaaatgtgcatcctaagtgtgtacaatttttatttgattaaaaataaagggggaggaagaataggtatgaagagatttgattacaggctgttgatccagcagtgtacatttcattcagcaagtaggatatccaccatataacaacgtactttgttgcagactatgatttagacttttctgatgcgcaaaaatagtaacttcgaatgctgggtaaaaattaaggcgtgatatatctcataaaagaaagcttcataagaggtagtaagttttagttactggtgattttctagcagactggaatgttgaccattctttgggaaaggaatcagaggttttttgttgggtttttttgttttttgaaatggagtctcgctttgttgttcaggctgaagtgcagtggcgcagtcttcactcactgcaaactctgcctccccagttcaagtgattctcctgcctcagcctcccgagtagctaggactacaggcacacgccaccacacccggccaatttttgtaattttggtagagacagggtttcaccatattggtcaggctggtctcgaactcctgacctcaggtgattacaggcgtgagccactgcacccggcctgttgtggggttttgtgatttggtttggtttggtgttttctgattacagcaactttctctttattctcagttttgcacagtaataagttgactcacacagacttaaagcctgaaaacatcttatttgtgcagtctgactacacagaggcgtataatcccaaaataaaacgtgatgaacgcaccttaataaatccagatattaaagttgtagactttggtagtgcaacatatgatgacgaacatcacagtacattggtatctacaagacattatagagcacctgaagttattttagccctagggtggtcccaaccatgtgatgtctggagcataggatgcattcttattgaatactatcttgggtttaccgtatttccaacacacgatagtaaggagcatttagcaatgatggaaaggattcttggacctctaccaaaacatatgatacagaaaaccaggaaacgtaaatattttcaccacgatcgattagactgggatgaacacagttctgccggcagatatgtttcaagacgctgtaaacctctgaaggaatttatgctttctcaagatgttgaacatgagcgtctctttgacctcattcagaaaatgttggagtatgatccagccaaaagaattactctcagagaagccttaaagcatcctttctttgaccttctgaagaaaagtatatagatctgtaattggacagctctctcgaagagatcttacagactgtatcagtctaatttttaaattttaagttattttgtacagctttgtaaattcttaacatttttatattgccatgtttattttgtttgggtaatttggttcattaagtacatagctaaggtaatgaacatctttttcagtaattgtaaagtgatttattcagaataaattttttgtgcttatgaagttga

SEQ ID NO: 4301 - DNA, 484 bp, Homo sapiens
  source 1..484: mol_type = unassigned DNA; mol_type = unassigned DNA
ggatattgacttatttttaggaaacgtaaatattttcaccacgatcgattagactgggatgaacacagttctgccggcagatatgtttcaagacgctgtaaacctctgaaggaatttatgctttctcaagatgttgaacatgagcgtctctttgacctcattcagaaaatgttggagtatgatccagccaaaagaattactctcagagaagccttaaagcatcctttctttgaccttctgaagaaaagtatatagatctgtaattggacagctctctcgaagagatcttacagactgtatcagtctaatttttaaattttaagttattttgtacagctttgtaaattcttaacatttttatattgccatgtttattttgtttgggtaatttggttcattaagtacatagctaaggtaatgaacatctttttcagtaattgtaaagtgatttattcagaataaattttttgtgcttatgaagttg

SEQ ID NO: 4302 - DNA, 1682 bp, Homo sapiens
  source 1..1682: mol_type = unassigned DNA; mol_type = unassigned DNA
tttgttgttggtgcgcgacgcagtcagctgcgtgattcccgtgattgcgttacaagctttgtctccttcgacttggagtctttgtccaggacgatgagacactcaaagagaacttactgtcctgattgggatgacaaggattgggattatggaaaatggaggagcagcagcagtcataaaagaaggaagagatcacatagcagtgcccaggagaacaagcgctgcaaatacaatcactctaaaatgtgtgatagccattatttggaaagcaggtctataaatgagaaagattatcatagtcgacgctacattgatgagtacagaaatgactacactcaaggatgtgaacctggacatcgccaaagagaccatgaaagccggtatcagaaccatagtagcaagtcttctggtagaagtggaagaagtagttataaaagcaaacacaggattcaccacagtacttcacatcgtcgttcacatgggatgaaattgttgatactttaggtgaaggagcttttggaaaagttgtggagtgcatcgatcataaagcgggaggtagacatgtagcagtaaaaatagttaaaaatgtggatagatactgtgaagctgctcgctcagaaatacaagttctggaacatctgaatacaacagaccccaacagtactttccgctgtgtccagatgttggaatggtttgagcatcatggtcacatttgcattgtttttgaactattgggacttagtacttacgacttcattaaagaaaatggttttctaccatttcgactggatcatatcagaaagatggcatatcagatatgcaagtctgtgaattttttgcacagtaataagttgactcacacagacttaaagcctgaaaacatcttatttgtgcagtctgactacacagaggcgtataatcccaaaataaaacgtgatgaacgcaccttaataaatccagatattaaagttgtagactttggtagtgcaacatatgatgacgaacatcacagtacattggtatctacaagacattatagagcacctgaagttattttagccctagggtggtcccaaccatgtgatgtctggagcataggatgcattcttattgaatactatcttgggtttaccgtatttccaacacacgatagtaaggagcatttagcaatgatggaaaggattcttggacctctaccaaaacatatgatacagaaaaccaggaaacgtaaatattttcaccacgatcgattagactgggatgaacacagttctgccggcagatatgtttcaagacgctgtaaacctctgaaggaatttatgctttctcaagatgttgaacatgagcgtctctttgacctcattcagaaaatgttggagtatgatccagccaaaagaattactctcagagaagccttaaagcatcctttctttgaccttctgaagaaaagtatatagatctgtaattggacagctctctcgaagagatcttacagactgtatcagtctaatttttaaattttaagttattttgtacagctttgtaaattcttaacatttttatattgccatgtttattttgtttgggtaatttggttcattaagtacatagctaaggtaatgaacatctttttcagtaattgtaaagtgatttattcagaataaattttttgtgcttatgaa

SEQ ID NO: 4303 - DNA, 3208 bp, Homo sapiens
  source 1..3208: mol_type = unassigned DNA; mol_type = unassigned DNA
gagacgagtctcgacgcagcagctgtcagctccattttgttgttggtgcgcgacgcagtcagctgcgtgattcccgtgattgcgttacaagctttgtctccttcgacttggagtctttgtccaggacgatgagacactcaaagagaacttactgtcctgattgggatgacaaggattgggattatggaaaatggaggagcagcagcagtcataaaagaaggaagagatcacatagcagtgcccaggagaacaagcgctgcaaatacaatcactctaaaatgtgtgatagccattatttggaaagcaggtctataaatgagaaagattatcatagtcgacgctacattgatgagtacagaaatgactacactcaaggatgtgaacctggacatcgccaaagagaccatgaaagccggtatcagaaccatagtagcaagtcttctggtagaagtggaagaagtagttataaaagcaaacacaggattcaccacagtacttcacatcgtcgttcacatggggtatgaacgtttttaaaacattttggaaattttatatcccatgtggaacagggaaacttgaatttttgtgtttgattatttgagaaagttttaagatgaaatcatctcagttttaacctgcaggattttttctgtgtttgtgcattggataggaaattccggaaataaagtacacatttagttctataatttaattattggttggctcctaattgacattccagtgaaatgatgggagttaattgatttaatttagattagttgaaaattattacaaaatattctaaaagggttttttgtggtacttcaagaaacctgattagttttgatctattgaaatcacaaaagtagaacagggcattttatttttgtataatttaggattaggtatgcttctttgttctaacaagtcatgttttctaacccttctttcactaagcaaaccagaacagatttgaactgttatgggttatatattagtatggagatcagctcagatgacattaaaaatgccgtagtgttattcttgtatgccaaatctttttttccccaaaattagcactttaattttatttactgttataatatttgttttcttagattaggtaggaaatcttaatttggccaccgcctactttgacaagtaaatattacatcatacgattttgcaacattaaattagaacactagaaactaaaaaattatgtttcagtgaatgctacaactaagcattttttttttttaagaaaaacaattgtattatgttttgttgccttgccactttgagtatcttatctgaaaatctgttccttgccatgtttttctcctgttaacataaactatgtgccctgtgaatttctggggactgaatttgaaattgctcctgccaaccgtttgtggcctggcgtgtatctgaatgcctgaatatctccccgctgaatgaatttcgtattctgccctgaattcactcgggtatattgattggctggatgatcttggtgccgcccacttgacgtttccagaagagtcaccgaaggaaaagaaccaggagtgtagaggatgatgaggagggtcacctgatctgtcagagtggagacgtactaagtgcaagatgtatagaatatttttcaacacttattaacttttcagataacataatctatatatagattaagctttcagggatttggaaatctttttttctttctcttttttgtttttgttttatttttccatttcttttggtgggggggattgtatttttgctttctttagaaatgtaatgtttgttatatagaacttccagaacagtaatcaaattaatgaaattagacctaataattatgttttttgatggtgttgaccaataaaatatctagtgataaggaaatttgtagcatcaactagaataatctacattgatagcatttattgtgataagtacattgtttccacttcttgatatgactgagatttatttctctcttttagatgaaattgttgatactttaggtgaaggagcttttggaaaagttgtggagtgcatcgatcataaagcgggaggtagacatgtagcagtaaaaatagttaaaaatgtggatagatactgtgaagctgctcgctcagaaatacaagttctggaacatctgaatacaacagaccccaacagtactttccgctgtgtccagatgttggaatggtttgagcatcatggtcacatttgcattgtttttgaactattgggacttagtacttacgacttcattaaagaaaatggttttctaccatttcgactggatcatatcagaaagatggcatatcagatatgcaagtctgtgaattttttgcacagtaataagttgactcacacagacttaaagcctgaaaacatcttatttgtgcagtctgactacacagaggcgtataatcccaaaataaaacgtgatgaacgcaccttaataaatccagatattaaagttgtagactttggtagtgcaacatatgatgacgaacatcacagtacattggtatctacaagacattatagagcacctgaagttattttagccctagggtggtcccaaccatgtgatgtctggagcataggatgcattcttattgaatactatcttgggtttaccgtatttccaacacacgatagtaaggagcatttagcaatgatggaaaggattcttggacctctaccaaaacatatgatacagaaaaccaggaaacgtaaatattttcaccacgatcgattagactgggatgaacacagttctgccggcagatatgtttcaagacgctgtaaacctctgaaggaatttatgctttctcaagatgttgaacatgagcgtctctttgacctcattcagaaaatgttggagtatgatccagccaaaagaattactctcagagaagccttaaagcatcctttctttgaccttctgaagaaaagtatatagatctgtaattggacagctctctcgaagagatcttacagactgtatcagtctaatttttaaattttaagttattttgtacagctttgtaaattcttaacatttttatattgccatgtttattttgtttgggtaatttggttcattaagtacatagctaaggtaatgaacatctttttcagtaattgtaaagtgatttattcagaataaattttttgtgcttatgaa

SEQ ID NO: 4304 - DNA, 461 bp, Homo sapiens
  source 1..461: mol_type = unassigned DNA; mol_type = unassigned DNA
aggaaacgtaaatattttcaccacgatcgattagactgggatgaacacagttctgccggcagatatgtttcaagacgctgtaaacctctgaaggaatttatgctttctcaagatgttgaacatgagcgtctctttgacctcattcagaaaatgttggagtatgatccagccaaaagaattactctcagagaagccttaaagcatcctttctttgaccttctgaagaaaagtatatagatctgtaattggacagctctctcgaagagatcttacagactgtatcagtctaatttttaaattttaagttattttgtacagctttgtaaattcttaacatttttatattgccatgtttattttgtttgggtaatttggttcattaagtacatagctaaggtaatgaacatctttttcagtaattgtaaagtgatttattcagaataaattttttgtgcttatga

SEQ ID NO: 4305 - DNA, 1192 bp, Homo sapiens
  source 1..1192: mol_type = unassigned DNA; mol_type = unassigned DNA
tacagtttgaagacagtaatacctggaattgagcatcatgtctgtcattcttaaatttgcatgcatctttctaacaggggaggtagacatgtagcagtaaaaatagttaaaaatgtggatagatactgtgaagctgctcgctcagaaatacaagttctggaacatctgaatacaacagaccccaacagtactttccgctgtgtccagatgttggaatggtttgagcatcatggtcacatttgcattgtttttgaactattgggacttagtacttacgacttcattaaagaaaatggttttctaccatttcgactggatcatatcagaaagatggcatatcagatatgcaagtctgtgaattttttgcacagtaataagttgactcacacagacttaaagcctgaaaacatcttatttgtgcagtctgactacacagaggcgtataatcccaaaataaaacgtgatgaacgcaccttaataaatccagatattaaagttgtagactttggtagtgcaacatatgatgacgaacatcacagtacattggtatctacaagacattatagagcacctgaagttattttagccctagggtggtcccaaccatgtgatgtctggagcataggatgcattcttattgaatactatcttgggtttaccgtatttccaacacacgatagtaaggagcatttagcaatgatggaaaggattcttggacctctaccaaaacatatgatacagaaaaccaggaaacgtaaatattttcaccacgatcgattagactgggatgaacacagttctgccggcagatatgtttcaagacgctgtaaacctctgaaggaatttatgctttctcaagatgttgaacatgagcgtctctttgacctcattcagaaaatgttggagtatgatccagccaaaagaattactctcagagaagccttaaagcatcctttctttgaccttctgaagaaaagtatatagatctgtaattggacagctctctcgaagagatcttacagactgtatcagtctaatttttaaattttaagttattttgtacagctttgtaaattcttaacatttttatattgccatgtttattttgtttgggtaatttggttcattaagtacatagctaaggtaatgaacatctttttcagtaattgtaaagtgatttattcagaataaa

SEQ ID NO: 4306 - DNA, 1664 bp, Homo sapiens
  source 1..1664: mol_type = unassigned DNA; mol_type = unassigned DNA
ctccattttgttgttggtgcgcgacgcagtcagctgcgtgattcccgtgattgcgttacaagctttgtctccttcgacttggagtctttgtccaggacgatgagacactcaaagagaacttactgtcctgattgggatgacaaggattgggattatggaaaatggaggagcagcagcagtcataaaagaaggaagagatcacatagcagtgcccaggagaacaagcgctgcaaatacaatcactctaaaatgtgtgatagccattatttggaaagcaggtctataaatgagaaagattatcatagtcgacgctacattgatgagtacagaaatgactacactcaaggatgtgaacctggacatcgccaaagagaccatgaaagccggtatcagaaccatagtagcaagtcttctggtagaagtggaagaagtagttataaaagcaaacacaggattcaccacagtacttcacatcgtcgttcacatgggaagagtcaccgaaggaaaagaaccaggagtgtagaggatgatgaggagggtcacctgatctgtcagagtggagacgtactaagtgcaagatatgaaattgttgatactttaggtgaaggagcttttggaaaagttgtggagtgcatcgatcataaagcgggaggtagacatgtagcagtaaaaatagttaaaaatgtggatagatactgtgaagctgctcgctcagaaatacaagttctggaacatctgaatacaacagaccccaacagtactttccgctgtgtccagatgttggaatggtttgagcatcatggtcacatttgcattgtttttgaactattgggacttagtacttacgacttcattaaagaaaatggttttctaccatttcgactggatcatatcagaaagatggcatatcagatatgcaagtctgtgaattttttgcacagtaataagttgactcacacagacttaaagcctgaaaacatcttatttgtgcagtctgactacacagaggcgtataatcccaaaataaaacgtgatgaacgcaccttaataaatccagatattaaagttgtagactttggtagtgcaacatatgatgacgaacatcacagtacattggtatctacaagacattatagagcacctgaagttattttagacacacgatagtaaggagcatttagcaatgatggaaaggattcttggacctctaccaaaacatatgatacagaaaaccaggaaacgtaaatattttcaccacgatcgattagactgggatgaacacagttctgccggcagatatgtttcaagacgctgtaaacctctgaaggaatttatgctttctcaagatgttgaacatgagcgtctctttgacctcattcagaaaatgttggagtatgatccagccaaaagaattactctcagagaagccttaaagcatcctttctttgaccttctgaagaaaagtatatagatctgtaattggacagctctctcgaagagatcttacagactgtatcagtctaatttttaaattttaagttattttgtacagctttgtaaattcttaacatttttatattgccatgtttattttgtttgggtaatttggttcattaagtacatagctaaggtaatgaacatctttttcagtaattgtaaagtga

SEQ ID NO: 4307 - DNA, 2026 bp, Homo sapiens
  source 1..2026: mol_type = unassigned DNA; mol_type = unassigned DNA
aagacgcaggagggagcggactaggtgacagggccgttcctgtgagcctcgcgggcgcctggcgatgcccccttttcctgcttgtttgctgcccgccgtccccggcgcgacgactgcctgctcccttcactcccaggctgcacagtggcggcgcgcccctctttcctgcgcggccgagcctgtcgccgccggatccggcctgcgggggtagttacggtgtttgctaggccggccgccctcttggagcttctgccctccgctgaggaagcggcgccgcctgacgcgggacggtcgggcgggcgccatgttgtgaaccgcctcggcggagctgtaagatggcggctgggcggaggccggcttcggccctgtggccggaaaggcgaggctccccgttgaggggggatttgctggggttccagaatgtgcgtgagccaagcagctgtggggaaacgttgtctggaatgagacactcaaagagaacttactgtcctgattgggatgacaaggattgggattatggaaaatggaggagcagcagcagtcataaaagaaggaagagatcacatagcagtgcccaggagaacaagcgctgcaaatacaatcactctaaaatgtgtgatagccattatttggaaagcaggtctataaatgagaaagattatcatagtcgacgctacattgatgagtacagaaatgactacactcaaggatgtgaacctggacatcgccaaagagaccatgaaagccggtatcagaaccatagtagcaagtcttctggtagaagtggaagaagtagttataaaagcaaacacaggattcaccacagtacttcacatcgtcgttcacatgggaagagtcaccgaaggaaaagaaccaggagtgtagaggatgatgaggagggtcacctgatctgtcagagtggagacgtactaagtgcaagatatgaaattgttgatactttaggtgaaggagcttttggaaaagttgtggagtgcatcgatcataaagcgggaggtagacatgtagcagtaaaaatagttaaaaatgtggatagatactgtgaagctgctcgctcagaaatacaagttctggaacatctgaatacaacagaccccaacagtactttccgctgtgtccagatgttggaatggtttgagcatcatggtcacatttgcattgtttttgaactattgggacttagtacttacgacttcattaaagaaaatggttttctaccatttcgactggatcatatcagaaagatggcatatcagatatgcaagtctgtgaattttttgcacagtaataagttgactcacacagacttaaagcctgaaaacatcttatttgtgcagtctgactacacagaggcgtataatcccaaaataaaacgtgatgaacgcaccttaataaatccagatattaaagttgtagactttggtagtgcaacatatgatgacgaacatcacagtacattggtatctacaagacattatagagcacctgaagttattttagccctagggtggtcccaaccatgtgatgtctggagcataggatgcattcttattgaatactatcttgggtttaccgtatttccaacacacgatagtaaggagcatttagcaatgatggaaaggattcttggacctctaccaaaacatatgatacagaaaaccaggaaacgtaaatattttcaccacgatcgattagactgggatgaacacagttctgccggcagatatgtttcaagacgctgtaaacctctgaaggaatttatgctttctcaagatgttgaacatgagcgtctctttgacctcattcagaaaatgttggagtatgatccagccaaaagaattactctcagagaagccttaaagcatcctttctttgaccttctgaagaaaagtatatagatctgtaattggacagctctctcgaagagatcttacagactgtatcagtctaatttttaaattttaagttattttgtacagctttgtaaattcttaacatttttatattg

SEQ ID NO: 4308 - DNA, 435 bp, Homo sapiens
  source 1..435: mol_type = unassigned DNA; mol_type = unassigned DNA
aaagcaggtaacatttctatcccatggctgccatttaaatctctagaaaagtgatctgggaaagcatagtaattgatacctttgctagctgttttaagttttcagtgttataaacatgaatggatattgacttatttttaggaaacgtaaatattttcaccacgatcgattagactgggatgaacacagttctgccggcagatatgtttcaagacgctgtaaacctctgaaggaatttatgctttctcaagatgttgaacatgagcgtctctttgacctcattcagaaaatgttggagtatgatccagccaaaagaattactctcagagaagccttaaagcatcctttctttgaccttctgaagaaaagtatatagatctgtaattggacagctctctcgaagagatcttacagactgtatcagtctaattttta

SEQ ID NO: 4309 - DNA, 480 bp, Homo sapiens
  source 1..480: mol_type = unassigned DNA; mol_type = unassigned DNA
ctaattcatatttctttcataattgttttatttaaaacatctttcagtatataagcaattatccgtgtccatgtagggaatcattggcgagtttgttctgcaagccttaatgttagtttttttgctgtcagctttaactgtgtctgttttggtggtcatcttccccaagtctgtttttattttatttctagacacacgatagtaaggagcatttagcaatgatggaaaggattcttggacctctaccaaaacatatgatacagaaaaccaggaaacgtaaatattttcaccacgatcgattagactgggatgaacacagttctgccggcagatatgtttcaagacgctgtaaacctctgaaggaatttatgctttctcaagatgttgaacatgagcgtctctttgacctcattcagaaaatgttggagtatgatccagccaaaagaattactctcagagaagccttaaagcatcctttct

SEQ ID NO: 4310 - DNA, 596 bp, Homo sapiens
  source 1..596: mol_type = unassigned DNA; mol_type = unassigned DNA
ttttgttgttggtgcgcgacgcagtcagctgcgtgattcccgtgattgcgttacaagctttgtctccttcgacttggagtctttgtccaggacgccattatttggaaagcaggtctataaatgagaaagattatcatagtcgacgctacattgatgagtacagaaatgactacactcaaggatgtgaacctggacatcgccaaagagaccatgaaagccggtatcagaaccatagtagcaagtcttctggtagaagtggaagaagtagttataaaagcaaacacaggattcaccacagtacttcacatcgtcgttcacatggggtatgaacgtttttaaaacattttggaaattttatatcccatgtggaacagggaaacttgaatttttgtgtttgattatttgagaaagttttaagatgaaatcatctcagttttaacctgcaggattttttctgtgtttgtgcattggataggaaattccggaaataaagtacacatttagttctataatttaattattggttggctcctaattgacattccagtgaaatgatgggagttaattgatttaatttagattagttgaaaattatt

SEQ ID NO: 4311 - DNA, 690 bp, Homo sapiens
  source 1..690: mol_type = unassigned DNA; mol_type = unassigned DNA
gtgaaccgcctcggcggagctgtaagatggcggctgggcggaggccggcttcggccctgtggccggaaaggcgaggctccccgttgaggggggatttgctggggttccagaatgtgcgtgagccaagcagctgtggggaaacgttgtctggaatgagacactcaaagagaacttactgtcctgattgggatgacaaggattgggattatggaaaatggaggagcagcagcagtcataaaagaaggaagagatcacatagcagtgcccaggagaacaagcgctgcaaatacaatcactctaaaatgtgtgatagccattatttggaaagcaggtctataaatgagaaagattatcatagtcgacgctacattgatgagtacagaaatgactacactcaaggatgtgaacctggacatcgccaaagagaccatgaaagccggtatcagaaccatagtagcaagtcttctggtagaagtggaagaagtagttataaaagcaaacacaggattcaccacagtacttcacatcgtcgttcacatggggtatgaacgtttttaaaacattttggaaattttatatcccatgtggaacagggaaacttgaatttttgtgtttgattatttgagaaagttttaagatgaaatcatctcagttttaacctgcaggattttttctgtgtttgtgcattgg

SEQ ID NO: 4312 - DNA, 626 bp, Homo sapiens
  source 1..626: mol_type = unassigned DNA; mol_type = unassigned DNA
attttgttgttggtgcgcgacgcagtcagctgcgtgattcccgtgattgcgttacaagctttgtctccttcgacttggagtctttgtccaggacgatgagacactcaaagagaacttactgtcctgattgggatgacaaggattgggattatggaaaatggaggagcagcagcagtcataaaagaaggaagagatcacatagcagtgcccaggagaacaagcgctgcaaatacaatcactctaaaatgtgtgataggtaaggaggatacttaaaatgtctgaatataacaatacattactagacaaaactagtatcacttaaaataagtacctgattactaccattcgtttgtttccaatgagagattttgatggtttgtaatgtttgtaaaattaagctgcttgtgggggagtctaggtgctgtcttgaagagaatgtgaggatatttggtcttagcataaaacattgaaaataatttttatttctctagccattatttggaaagcaggtctataaatgagaaagattatcatagtcgacgctacattgatgagtacagaaatgactacactcaaggatgtgaacctggacatcgccaaagagaccatgaaagccggtatcagaa

SEQ ID NO: 4313 - DNA, 1843 bp, Homo sapiens
  source 1..1843: mol_type = unassigned DNA; mol_type = unassigned DNA
gtgcatgacccgccccgcggcggagacgcgctcgctgcgtcatcagtgttttcgagacgagtctcgacgcagcagctgtcagctccattttgttgttggtgcgcgacgcagtcagctgcgtgattcccgtgattgcgttacaagctttgtctccttcgacttggagtctttgtccaggacgatgagacactcaaagagaacttactgtcctgattgggatgacaaggattgggattatggaaaatggaggagcagcagcagtcataaaagaaggaagagatcacatagcagtgcccaggagaacaagcgctgcaaatacaatcactctaaaatgtgtgatagccattatttggaaagcaggtctataaatgagaaagattatcatagtcgacgctacattgatgagtacagaaatgactacactcaaggatgtgaacctggacatcgccaaagagaccatgaaagccggtatcagaaccatagtagcaagtcttctggtagaagtggaagaagtagttataaaagcaaacacaggattcaccacagtacttcacatcgtcgttcacatggggatgaaattgttgatactttaggtgaaggagcttttggaaaagttgtggagtgcatcgatcataaagcgggaggtagacatgtagcagtaaaaatagttaaaaatgtggatagatactgtgaagctgctcgctcagaaatacaagttctggaacatctgaatacaacagaccccaacagtactttccgctgtgtccagatgttggaatggtttgagcatcatggtcacatttgcattgtttttgaactattgggacttagtacttacgacttcattaaagaaaatggttttctaccatttcgactggatcatatcagaaagatggcatatcagatatgcaagtctgtgaattttttgcacagtaataagttgactcacacagacttaaagcctgaaaacatcttatttgtgcagtctgactacacagaggcgtataatcccaaaataaaacgtgatgaacgcaccttaataaatccagatattaaagttgtagactttggtagtgcaacatatgatgacgaacatcacagtacattggtatctacaagacattatagagcacctgaagttattttagccctagggtggtcccaaccatgtgatgtctggagcataggatgcattcttattgaatactatcttgggtttaccgtatttccaacacacgatagtaaggagcatttagcaatgatggaaaggattcttggacctctaccaaaacatatgatacagaaaaccaggaaacgtaaatattttcaccacgatcgattagactgggatgaacacagttctgccggcagatatgtttcaagacgctgtaaacctctgaaggaatttatgctttctcaagatgttgaacatgagcgtctctttgacctcattcagaaaatgttggagtatgatccagccaaaagaattactctcagagaagccttaaagcatcctttctttgaccttctgaagaaaagtatatagatctgtaattggacagctctctcgaagagatcttacagactgtatcagtctaatttttaaattttaagttattttgtacagctttgtaaattcttaacatttttatattgccatgtttattttgtttgggtaatttggttcattaagtacatagctaaggtaatgaacatctttttcagtaattgtaaagtgatttattcagaataaattttttgtgcttatgaagttgatatgtatctgaacagtttgttctaagtaccatttttcttcctacttctattaaagaatggacataga

SEQ ID NO: 4314 - DNA, 12747 bp, Homo sapiens
  source 1..12747: mol_type = unassigned DNA; mol_type = unassigned DNA
gactccagctccgcggcgccctcgccgggtgcgtgccgctcgcgcgcccgccagccaggctctccgcgcccgccgcccgcgccgcgctggcccgggctctcccgcccgcgcttcatggctgcacacgagtgggactggttccaacgcgaggagctcatcgggcagattagcgacatccgagtgcagaacctgcaagttgagagggaaaatgtgcagaagaggacctttacacgatggataaatctacatctagaaaagtgcaacccacctctagaagttaaagatttattcgtcgatatacaagatggcaaaatcctaatggctttgttagaagtcctgtctgggcggaatctgctgcacgaatacaaatcctcgtcgcatcgtatttttcggttgaacaacatagcgaaagcacttaagtttttggaagatagcaatgtaaaactggttagcattgatgcagcagaaatagcagatggcaacccttctttggttcttgggctgatatggaacataatcctcttcttccagattaaggagctcacaggcaacctcagcagaaactctccatcttccagcttgtcccctggctcagggggcacagactcagactcatccttcccacccacacccactgcagagaggagcgtggcaatatcggtgaaagaccagaggaaggctatcaaggccctgttggcgtgggtgcagaggaaaacgagaaagtatggcgtggcggtgcaggactttgcgggcagttggaggagtgggctggctttcctggcggtgatcaaggccattgaccccagcctggtggacatgaaacaggccctggaaaattccacacgagaaaatctagagaaggctttcagcatcgcacaggatgccctgcacatccccaggctcctggagccagaagacatcatggttgacacaccagacgagcagtctatcatgacttacgtggcacagtttctagaacgttttccggagttggaagccgaagatattttcgattcagataaagaagttcctatcgaatccacttttgttcgcatcaaagaaactccttctgaacaggagagcaaagtcttcgttctgactgaaaatggggagcgtacctacactgttaaccatgaaaccagccacccaccaccctccaaagtctttgtctgtgacaagcccgagagcatgaaggaattccgcctggatggtgtttccagccatgcgctgtcagacagctccaccgagttcatgcaccagattattgaccaggtcctgcaagggggcccaggtaagaccagcgacatcagtgagccatctccagaatcctccattttatcatccagaaaggagaacgggaggtccaactctttgccgatcaagaaaacagttcactttgaggctgacacctacaaggatcctttctgcagtaagaacctgtccctttgctttgaagggagcccaagagtggcaaaggaatcattgaggcaggatggacatgtcttggcagttgaggttgctgaggaaaaggaacagaaacaggaatcctcgaagattccagaatcctcctctgacaaggtcgctggtgacatttttttggtggagggcacaaacaataattctcagtcttcttcctgtaatggtgctttagagagtacagcccgccacgatgaagaaagtcactctctttcacccccaggagaaaatactgtgatggccgattccttccagatcaaggttaacctgatgactgtagaagctttagaggagggagactattttgaagccatcccattaaaagcctcaaaatttaacagcgacctaatagattttgcttctaccagccaggctttcaacaaagttccttcacctcatgagacaaaacctgacgaggatgctgaggcttttgagaatcatgctgaaaaactaggtaaaaggagtattaaatctgctcacaaaaagaaggattcgccagagcctcaagttaagatggacaaacatgaacctcatcaggactccggagaagaagctgaaggctgtccttcagccccagaagagacaccagtggataaaaagccagaggtgcatgaaaaggccaagagaaagtccacccgtcctcattatgaggaagagggagaagacgatgacctccagggtgtgggcgaggaattatcttccagccccccaagcagctgtgtcagcttggagacccttgggagtcacagcgaagaaggcctggatttcaagccctccccacccctctcaaaggtttccgtcattccccacgacctcttctatttcccacactatgaggttcccctggctgcagttttggaggcttatgtagaagacccggaggatctaaaaaatgaagaaatggatctcgaagagccagagggctatatgccagacctggactccagggaggaggaggccgatggctctcagagcagctccagttcctcggtgccaggagagagcctccccagtgccagcgaccaggtgctgtatctcagcaggggtggtgtgggtaccacaccagcctcagaacccgctccactggccccccatgaggaccaccagcaaagggagaccaaagagaatgaccccatggacagccatcagtcccaggaatccccaaacctggaaaacatagcaaaccccctagaagaaaatgtaacgaaagaatcaatcagtagtaaaaaaaaggaaaaaaggaaacatgtggaccacgtagaaagttcactatttgtagcaccaggaagtgttcaatcctcagatgacctagaagaagacagtagcgactacagcattccttccaggactagtcacagtgactccagcatttaccttcgacgacatactcataggtcttcggaatcggatcattttagctatgttcagttgaggaacgcagcagatctggatgacagaagaaaccgaatattaaccaggaaggccaacagctcaggagaagccatgtcactggggagccacagcccgcagagtgactccctgacacagcttgtccagcagccggatatgatgtattttattctcttcctgtggctcctggtgtactgcttgctgctcttcccacaactggatgttagcaggctctgatacgtgtgtctggataataaaaaagacaggaccctgaccaggggcggggttacttcattttattttgggttctgggtggggcacttctacagacagttgaggacctccgaggaaacttagaccccctttctcgctattgtggtttttttttttttttcaggtttccttttttttctggacaacctgagcatgcttttttctttggctgtgtactcaaaactcaggcatgcagctggatccgtaggtggggttttgtccttgtgtgccttgctgggttggatagggagcattgttagtgatcattagcccgcctggatcttagcacaccccacattgcaggttcacacgctggatgaacttgagtttcttacctctcagatgaagggctgcttaatgagaaagagggtgggcaccccaggccaagccccagctggggagagagctgccacgttttcctccaagcgtgggtgtttgagagaaggtgctggggtccatgcacctgtcgcagtccggtaactggttgcattcactaggggaaatccgagcagccagctctgtgtaagcacatccaggaatggcagaatccagggaggaaggtgaaagctgtgttgagagccactgtgtgctctttttcaccctgttttttttgttgtttttttgttttgttttttgtttgaggggagataacacttgaaattcagttttccattgattggattgagatagaaccatgattttcaaaccagatcgccagggcccagcagggccatataaaagccatgaggagtggctgggctggaatcagctcccagcagtgctggagctgggtggtggggtagcttcctgcccactaaagctttggtgcacacctccctcagaatgcatgtcttggaacgggcattctttgtggtcacttgtaatgggtttcttgaagaggctttctggacagcactccgggagcaggccagcacaggaggtttgtgaaagaagagaggcatctctagcacccctgcccccagtcttcctcagccccaggctccctctgctctctcctccctgccaagactcaggtccgtggtgagtctctgcattggttcctcctccccttgctctccccttcagaaagcatgtaccaggcaacccttataaaatcacaaatgagtcaggaggggactcagtgagcatcttgtctagctggacccagagagacagagcagcttgaccaagatcatatagccgaccaggggcagacttgcagtgagcacacaggcacctgatgccctgtccagagctgtcaccccttgtaggaaacttccactgggcacaccaatgtcctgagaaaaagataaaatgactagattaaaatgtccacattcaagcaaaaccaaaaagtttagaccaactatcgacatttgttttgttcttgtatttttcccatgaggaattcttactcaccttcaagctcatccccaattccttctgaaatacccttgacagctgcaacagcttgtcatttgacataccagcgtcgctcttactccaggaatcacgtttctttctttgctagccaaggacttgctcatttcaagcagtgggtttcaagtttacagaattccagcatggccagaagaatttacatagcacatctgagtcgatgacagccaaaatctggcctctaaaccagtctgattatagtctgtctcccctcctgaaagaatttcagccttccaaccagaaagctgctgggagcttggagtgattccatctggaaggccaagagccccatggaaaatgagctaattaatgagctccctggcatcaatgaaagctcaaaggtacagataataaagattatgtgatagtttataactctgggcaccatgcagtccttgcctaaattagatgctcgaagagcctgggaagagccaacccaaatgtgaatcatttcattttatgggtctagaccttgttcagaaaaacctctgcaagatacttctctcacctattacaacttgtaatattgtttaaaacatctactggcaagatgcctgaaagtcatttggttcaggttggcagtcaactgatattttgcaaaggaaaaaaaaatctcatttgagtataggcttctatggaagaagctggatatagaaaatggatgtggaagtctgcaggacaaaccaccccattgcttgtaaattttttttaaattaaaagaaatacaataaggcttttaacaagaactagcagtcccctaagtctcgctgcttagaagtaaccactttcaactctcttatgtttgcatttctacataacgtgcttacactttattttttaatttagaaacatctactggcttgctgtcacagtagaggaggatttcactcttaccataccgtgctttggttttccagtatagctagatcacatcatttagtacatttctattaggtgttgacattacctggagcacttaaggattgttgactcccaagcccagcagtgtgttatggttacatgtcctttctcctccaaatgtccccattaatttgctattctctctctttactttttttttttttttggtgtggcacattctttaataacttcctgaggaagagaacatgggaagtaaatatggttgtaaatattttgagatttttgcatgacttaagatgtctgtattctgcccttaacagaaatgtggctgagcatagaatgacaggtggaaaataataccctcccctagcccctcccaagcgtgctggttgagatttctgatgccattctgattcccgtacctttatatgtgacttaggtttttttatccacccttcctggaaacatttaagatctctttattcttggtgttctgaactgtcatgatggtgttgtatcccgggtgttaaaccttgtgctgggccttcatgggaaatttcttaaattttcttgtgattatttacattctttctttctggaccacctattatttcaatgttggaccctcccctacacccaggctgatgctctaatattttttatcttttctatttttcgtctatgtttctgatctgctttcaggaagaattattcatttttatcttcccaatctgaatgttttattgaatttttattttccaagttaataaaacctttggttattatcctgtctttgttttacagtgtcctgctcttgatgcgtggatgcagattttgtctctctgtggacgttaatgattgtggtctgaggggaagtcttttctgctccctgtgttgccctcattttctctgagttctctttattttggtggtctcagtctctatctttcacgttgtgaatttttctcaaatatatggtgatcctatggatctgttcatgttttaagagtgaggcatccaaaagctgattggaagttgtgtgtgccaactggtgagcttttccactagggtcaccaggtgggcacctggactcatcattggagaacactgcctgtcagtatttgcacgtgttttctctggggctcattctgtttcttgagagatattcccactactctccttcctgggaaacgggcatacacagggcttttagcctatgctgagtactcatgtggtttcaaaaatggtgtcccatctgggcagaagtccccatgagcacttggcttgactggcaaaggacaccttttgccccttcctccagacatacccagctctgagcttggacaatgctcgaggaacaatgaaaaggctagattttaactcctaattgccctctttagccaagtgcctctgtgcaatgcacaactgtaggaccatatccagagaccctggtctatactcagtgtgcccgagtcctgaccgctgagcaggcagcctcatcacccgtgagtatttagactttcattaagttgcttcaacctttgctgtgcctggtgtccctgagttggagctgctctgatttctccatggagtaggagcacagtggtcatctggctgcatgggaaggacaggggacctcagagccaataaatgccctggtcttcagccccatgtctcaccccatccctcctattccaatccccaagcctctcctggaggccacagggcatctctgctgaccactctgtggcctcccctctgcaggcatgtggttttaggatccccctccctgctcacttttccatcagttccattcctgcataaataggttgctagctcttgcttactgttctcttctgtattctgtgttcatggttgtattaatataactttcattcctctgctcctattttcatggggtttcatgagggaagaaacaggctcatgtgttcagtataccatcttgatccataaaccccatttgagttatctcacaggttgcttagggggcttgctgctctgactggtttgtgaacgtgccctgagtccagctgggactgcagcaacatccatcctgttgagctgtggtctgctaagtgattttgtgtaatgctgtgccaagtgcaggagagggatacatagcatggctaagctctgcttgaatgccatgattagttattaccttccttccttccccctggttttgctgcctattgtcagtaaatgatcttagatctcctgcctccccaaagatatagtctatgtggtggtctgggttctaggttttctttaccacccttgcttcacttaagaaacagaaaactggctaggcacagtagtggctcacacctataatcccagccctttgggaggccaaggcaggaggatcgcttgaggccaggaattcaagaccagcctgcacaacatagcaagactccatctctacaaaaagttaaatttaaattagtggtggcatacacttatagtcccagctactcaggaggatgaggcaggagaattgtttgagcccatgactttgaggttactgtgagctatgatcctgctattttactccacctgagtgacagagcgagacgctgtctcaaaaataaagaaacaagtagtccacacaggtgtttgccagcaaacaaacagcgcggattctctgttgaacgtggccaacattgcctcgtcgaagtttgtatcttgccatagttgatgatcaggtggtcggggcttcctggtcagacctgacctttgtggggagatgttctcccaccaaggctcagaagcaggacactcttgctgcccctcgggcagccacccagaacatgggcgtctccatttctgaggttcagcatagttccccccaccctcttcccatgcagtgcatgcctgctctttatcaggatggaacagagggaaggcagaggcactgggggcagcctgtgttgttgatctctgtaagtcacagactgttcgaaaacctcaggaattatgtaagcgttcagtgcctcatttaagagatgaaaaactgaagattagaaagaggaaacgactagtcgccctgctagttgatgacctccagatagccatcttcattcccagttaagtttactacaaaaccacagcctcagctgctgaagctaacctccctacccaccatcgctagggactcagaacaccatggagctcatctctccaacaaaagtcagaattagcaagtacagatgtgtcttacgaaaatgtcagaatccatcatggctgctttggtgaggagctgttctccttccgtggtcatgccattggaaggcagttgtatgacaagaatgctttcacatgagctccgattttcttaactctccagaaggacttcagaagcctctggagttttgagacacggcctctctctcccttctgcttggagacaccttcctgggggtctccactgcattccccgccggtattcctctgtggagccttgcgccctcaggtcccagaaatgggctgtgtgggagcttccagtcagcctggtatctcgggaccttctcagccaggaaatgagactgcacaaagccctgtgaggcccagctgtgttatttctccttccccgacattgcataatcactgctgacacagcatttggggaagatttaacgtcttgggccagcagctgccatctggaaccatcaccacatagcaggttgttctgtcccatccaactgatgagggggctgccctaatgacaaggtccaggacctgggttgggtggtggaaggctgggagctggagtgggcattattgtgcttctgtgctgaaaattgctatggctcttttcccctaacagccagcgtgggagaaccaaacatgagacacaagcatccccttgagctccacagatcttgcgccttgctctcatcaggcatttccttggaaaacagcagtcagcagctcatggaagtgagcccggtgcacagactttgcatggactttgcacaggttccatttccatcgtgtgcagacacctgtatctttgggctccacgtgagcacctgccctcttcactctgattttttttttaagagacagcatcttactctgtcaccgaggctggagtacagtggtgtgatcacagctcactgcagcctgaaactcctgggctcaggcaatcctcctgcctcagcctcccaagtagctggtagtacaggtgcatgccaccacgcccacctaatttttttatcttttatagatacaggtctcactgttgctcaggctggtctcgaactcctggcctcaagtgatcctcctgccttggcctaccaaaatgctgggattataggcatgaaccactgtgcctggccttcactctgatttttcttaagagtcctacaggaccttcaggtcttgtcacttctctaccattgtgtgtgagacagggcatggggtgagcttggtcaggtgtgggtcaaaagcctggagactcagagctgctggttccccaagagcccacaaaagttatcagagtttctgagctgagtgttctgcagttgccagaccccacaatgctgggaatactggcttctttgtgtttagaacttgttctgagaaccttgatgagaacacatcaagcaagcagttcctcccagccagggctggagcaacatgccaaaaaacattcttgtctatgggaaaaagacaaccagtattttgtactgtttgaccaagttgtttttaaatatacacatgcctcaacaatccacggcctcaatcgcactgctaatttgtttaaatccctgacactcagatgtcaagaatagcttcatctagcagtgttctctttaaaggaacccttttttttgttttcattttaatcactgccttcttctctgggaggtattgtgggctagagaaagaagtcaggtttgggagtcagccagatttagattggagtcccagctctgtcaccagatctctgggtgatcttggcaaactaacttctgagcttctgtgcattataggcattcagcacatatttgttggatgaaaaatacttttcttgaaagtttatgaagttgtaggatgcccagcagcccccttttctctatttccttcctcttgaagcaagcgttgactatacctctttccctaacccttagtgtaccatagcttcttccaacctctctccaatccattacttttttctgagctaccctgtctcaaatctaactcaggcctttttgcaagaggaagtttaagccattgtttactcattaactcacttgacccttagaacaatcgtgggaggtgtttatttcggaaaggaagctaaagcacaggacagaaaaataaggtcatagcgtgaactagtaagtagcagaactgggaacataggactgttattttcaaacactctaaacttcactgcagttgcaaatttgcaaccaaaatggccgccttgaaagggtcttttgcagtaaaatctcagtgtccaacatcaaagacagttcttcagggcctccaattaactatacatcctgcccccagctgctcatctctgcacctctaacacgtacttcacagagtaggaaattgggctttctccttcaaaaagaaaagtagagaaggcctgagggcagtgtaattaaaatggagaagtagagaccacgaattacttggatgaattcataactggttggtctctgaggcagggattattatttttcctgtattttaagcttaaaagtagtgatttttgcattgttacaaaaaacaaaatagcaaaatatcatttgatacttgtattctgtttgcaatagctaccacttcctttagccccagcaaaaatcaataggtgtgtattctctacaagcccatgctgtgccagaatgccagtattgctaaatgtcatgcaaggatttagacacttttttaaaggaaactctgggagtgcctgttgtctggagagttgacattgtccaaagcaggccaacactggtatgggtatggagaacccacgtcctagctgtggctcacctgcagatgccttgaatttacctctctgggttggaagtgggaagacttcttttaaaagtcctttctaagtttaaaaatccaaaggttacgaaggtagtttttatttatctcaataagtggcctatttgcttaaagcaagtgtacctctgtatatcagcccaaagcttagggcagtgcttcttggctttagtatctgagaaaggtgcctttgggaagagtttggtcagacagaaggtagtctgaatcttaaaggtttcagatgaatgtttgaagtagaacctgggaaatctgcttcctagggctgttagaaggaaattggtctccttaaattacgtcagcatctgaggcagtttcctaagggaatttcttttaaattcaaaagttcaactgcaggaataaatagctgtacaggactagatcttcccatccctcatcttttccccttccccgagtaacgactcaaaaaggcttctgaaattctactcagaatcggagccgtttgcattccaacaaggatcccttaagccaaatgctggtgtgtttgtgtagaatgtccctggggtaggggcggtagctgtggggagggaatgtggtgcaggggacacctgccctctgcccttgaaattgcaccataagatgctgcctatgtcactcacagtggtgctgatactatccgccaaagacaaattgtgaacacggaaaaatggtcgttccctactgtacatcctcaggacagacttaactaaacttggagacaggagattgttcagaccatattgtagtgggtggtgatcattgttttattttgggggagtctggtctattgagcagattgaatgtttccttattgtgcagggcttaattgactatgtctgaaagtttttactgagagctctaagaaaactattgaggaaaatgaaatgttattttgtagtacaaggattatttttgtctatttaggatatacatagctgtagctttgtaaaaaaaaagatctttataaacaatatatgaatgtgccgtcttatttattgattactgtaaattaagatataaatggctatttgaataatttatacctgtgggaattaactggagtatttgttatttgactgttttctattaaggaatattaggcttggtgctatgatgaatgatcttgtaaaatcatgtgtattcttaagaaaatttttgaatataaatttcttgaactga

SEQ ID NO: 4315 - DNA, 515 bp, Homo sapiens
  source 1..515: mol_type = unassigned DNA; mol_type = unassigned DNA
ccttatcattaagcacagtccgatcggatatccggtttgggcaataagagatgtaaataaagtgaggattttaaagcccaaaggcctccttgctataaaaacgcacccaaaacgcctcacctggaccccgcgcgcacccagaaggatcacgttcagagacagaggtgcaacatgagtcaagagatttcatctttactaattgggttgcgggggcttttgtttataaatttcactgtaggatcattttagctatgttcagttgaggaacgcagcagatctggatgacagaagaaaccgaatattaaccaggaaggccaacagctcaggagaagccatgtcactggggagccacagcccgcagagtgactccctgacacagcttgtccagcagccggatatgatgtattttattctcttcctgtggctcctggtgtactgcttgctgctcttcccacaactggatgttagcaggctctgatacgtgtgtctggataataaaaaagacaggaccctga

SEQ ID NO: 4316 - DNA, 746 bp, Homo sapiens
  source 1..746: mol_type = unassigned DNA
agaaagttcactatttgtagcaccaggaagtgttcaatcctcagatgacctagaagaagacagtagcgactacagcattccttccaggactagtcacagtgactccagcatttaccttcgacgacatactcataggtcttcggaatcggttagtatgtgaatttcttctctttccgcacggcccctgctaatcaattcctttccatccttcctcctccccagcccagagctttgaaattactggcatgcaacagctatacttttggatagaagacaagcagattggaaccttatcattaagcacagtccgatcggatatccggtttgggcaataagagatgtaaataaagtgaggattttaaagcccaaaggcctccttgctataaaaacgcacccaaaacgcctcacctggaccccgcgcgcacccagaaggatcacgttcagagacagaggtgcaacatgagtcaaggatcattttagctatgttcagttgaggaacgcagcagatctggatgacagaagaaaccgaatattaaccaggaaggccaacagctcaggagaagccatgtcactggggagccacagcccgcagagtgactccctgacacagcttgtccagcagccggatatgatgtattttattctcttcctgtggctcctggtgtactgcttgctgctcttcccacaactggatgttagcaggctctgatacgtgtgtctggataataaaaaagacaggaccctga

SEQ ID NO: 4317 - DNA, 3023 bp, Homo sapiens
  source 1..3023: mol_type = unassigned DNA
ggcagttggaggagtgggctggctttcctggcggtgatcaaggccattgaccccagcctggtggacatgaaacaggccctggaaaattccacacgagaaaatctagagaaggctttcagcatcgcacaggatgccctgcacatccccaggctcctggagccagaagacatcatggttgacacaccagacgagcagtctatcatgacttacgtggcacagtttctagaacgttttccggagttggaagccgaagatattttcgattcagataaagaagttcctatcgaatccacttttgttcgcatcaaagaaactccttctgaacaggagagcaaagtcttcgttctgactgaaaatggggagcgtacctacactgttaaccatgaaaccagccacccaccaccctccaaagtctttgtctgtgacaagcccgagagcatgaaggaattccgcctggatggtgtttccagccatgcgctgtcagacagctccaccgagttcatgcaccagattattgaccaggtcctgcaagggggcccaggtaagaccagcgacatcagtgagccatctccagaatcctccattttatcatccagaaaggagaacgggaggtccaactctttgccgatcaagaaaacagttcactttgaggctgacacctacaaggatcctttctgcagtaagaacctgtccctttgctttgaagggagcccaagagtggcaaaggaatcattgaggcaggatggacatgtcttggcagttgaggttgctgaggaaaaggaacagaaacaggaatcctcgaagattccagaatcctcctctgacaaggtcgctggtgacatttttttggtggagggcacaaacaataattctcagtcttcttcctgtaatggtgctttagagagtacagcccgccacgatgaagaaagtcactctctttcacccccaggagaaaatactgtgatggccgattccttccagatcaaggttaacctgatgactgtagaagctttagaggagggagactattttgaagccatcccattaaaagcctcaaaatttaacagcgacctaatagattttgcttctaccagccaggctttcaacaaagttccttcacctcatgagacaaaacctgacgaggatgctgaggcttttgagaatcatgctgaaaaactaggtaaaaggagtattaaatctgctcacaaaaagaaggattcgccagagcctcaagttaagatggacaaacatgaacctcatcaggactccggagaagaagctgaaggctgtccttcagccccagaagagacaccagtggataaaaagccagaggtgcatgaaaaggccaagagaaagtccacccgtcctcattatgaggaagagggagaagacgatgacctccagggtgtgggcgaggaattatcttccagccccccaagcagctgtgtcagcttggagacccttgggagtcacagcgaagaaggcctggatttcaagccctccccacccctctcaaaggtttccgtcattccccacgacctcttctatttcccacactatgaggttcccctggctgcagttttggaggcttatgtagaagacccggaggatctaaaaaatgaagaaatggatctcgaagagccagagggctatatgccagacctggactccagggaggaggaggccgatggctctcagagcagctccagttcctcggtgccaggagagagcctccccagtgccagcgaccaggtgctgtatctcagcaggggtggtgtgggtaccacaccagcctcagaacccgctccactggccccccatgaggaccaccagcaaagggagaccaaagagaatgaccccatggacagccatcagtcccaggaatccccaaacctggaaaacatagcaaaccccctagaagaaaatgtaacgaaagaatcaatcagtagtaaaaaaaaggaaaaaaggaaacatgtggaccacgtagaaagttcactatttgtagcaccaggaagtgttcaatcctcagatgacctagaagaagacagtagcgactacagcattccttccaggactagtcacagtgactccagcatttaccttcgacgacatactcataggtcttcggaatcggttagtatgtgaatttcttctctttccgcacggcccctgctaatcaattcctttccatccttcctcctccccagcccagagctttgaaattactggcatgcaacagctatacttttggatagaagacaagcagattggaaccttatcattaagcacagtccgatcggatatccggtttgggcaataagagatgtaaataaagtgaggattttaaagcccaaaggcctccttgctataaaaacgcacccaaaacgcctcacctggaccccgcgcgcacccagaaggatcacgttcagagacagaggtgcaacatgagtcaaggtccgatggacagtggcacgtgctcagtagcagatgtgttagaacccggagcagcacaccccaatccgggttccgggtggtggggtctctcgcactcacaagggaggggcttaggggaggaggtagaggaatgtatattgtttagcactttgattttggatctagacgctggcggtattgagaaatgcccggcatgctcggctttgtgtgtttaaaatcgttttatcttctgtttcagagatttcatctttactaattgggttgcgggggcttttgtttataaatttcactgtaggatcattttagctatgttcagttgaggaacgcagcagatctggatgacagaagaaaccgaatattaaccaggaaggccaacagctcaggagaagccatgtcactggggagccacagcccgcagagtgactccctgacacagcttgtccagcagccggatatgatgtattttattctcttcctgtggctcctggtgtactgcttgctgctcttcccacaactggatgttagcaggctctgatacgtgtgtctggataataaaaaagacaggaccc

SEQ ID NO: 4318 - DNA, 452 bp, Homo sapiens
  source 1..452: mol_type = unassigned DNA
taaaaacgcacccaaaacgcctcacctggaccccgcgcgcacccagaaggatcacgttcagagacagaggtgcaacatgagtcaaggatcattttagctatgttcagttgaggaacgcagcagatctggatgacagaagaaaccgaatattaaccaggtacagtactcagaagcttactgagctgattttacagttttatggcatcagagcagacatgaagagggaaagcaaacatgccaggatgtctatgaaagccaacagctcaggagaagccatgtcactggggagccacagcccgcagagtgactccctgacacagcttgtccagcagccggatatgatgtattttattctcttcctgtggctcctggtgtactgcttgctgctcttcccacaactggatgttagcaggctctgatacgtgtgtctggataataaaaaagacaggacc

SEQ ID NO: 4319 - DNA, 1772 bp, Homo sapiens
  source 1..1772: mol_type = unassigned DNA
tcattttagctatgttcagttgaggaacgcagcagatctggatgacagaagaaaccgaatattaaccaggtacagtactcagaagcttactgagctgattttacagttttatggcatcagagcagacatgaagagggaaagcaaacatgccaggatgtctatgaaagtatttcttgctgtcggagaactgttggcctggcctaatgttgctgaattgctggaaacctgcccatttaaaacataggaaaccagaaaaacgtctcaaattcttacaattctgagacgtccccattcctgttgaagtcatagagttgctttattatgtttttatttttaaaaaattttatttactcgccacagatttgaattggcttggaaggatttagattactggaatcggaagcctctgtctgaatattacccaacacccaagagtgtggtcattagaaccccatccctctggctgctaaaaaagaagcaagacagctcctttcccctgccatgaaatggaaatactaattcaagttttccaccaggctggatatgctcataggaaaataatcctttttgctcttatgagatagaggcgttgaaaatagaacctgtaaagttgagaaatgcagtcgtgttttcagttgtctacattgagcatttattacctttataataaaaaatatggtttaggctgcgcatggtggctcacgcctgtaatcccagcactttgggaggccaaggagggaggactgcttgaggccaggagtttgagactagcctgggcaacacagagagaccgtgtctctataaaaagtatatagtttaacttgtttctgtggacagctttttaaagaagaccatcatgtgggtatttatcattcagtatgtagactgtggcagatgtttaatcccaccctgcccctcgctcctgctatcaggagatagttctgggacaagtggttttagcctctcgtaatctccattacaccgcacgaaaccaccctaagaggcttacactgcaggcttctctacatgcagctccaagcagaggccccagccccaggcaaaaccttctgggcttccctatgatccgccaggcaaaactgaaatgacattttaacactaccacctataaaataaaagcaggaaggtaaatctgactgaaatcaaatctagtaattattttaaaggtaatattccaaagccaaaacaaaactgtggggaatgggagaggtctttgtttctttctgatagatgatttaaaatgatctgctattagggacacttcatcccttagatgacctatggggtcccctgcgttactaacaaacagcagcaagcgatcagtatctaactccgtgtcactctctgagagcactgtggcatcaagaaaggtgtcccaggagacctggcctaggcgccctctctgtcgccaagttaattgcatggccttgggcaagtcactccaccccgaaagcctcagtgtgtccatctgcagaatggggctgccacctcctctcacctgatgttatggagatgaacggagtacgtgcaaaagctcgaggggctgcctggatggcccgacgcactgccttgggccagtacacacagtgtggggcctacctggacatggtgctggggagccttcgggtcttcaggcggggagtgggggccggggagagacgggtagcactgggtggggtccactttcctgggaacctgcttggtaactgcgtttcctctgtgtttcttctgtaggaaggccaacagctcaggag

SEQ ID NO: 4320 - DNA, 718 bp, Homo sapiens
  source 1..718: mol_type = unassigned DNA
cccccttcctctctgtcttgtgtggtctcttgcccttttgccttccactatgggatgatgcaccagcagattccagtgctgtgttcttggactgcccagcctctagaaatccttctgttattgtgtgtcaaaatcacaagctccctgaagactaaggatgtgtctaagataacgtctccactcatagcaggcaatattttgagagggaaaatgtgcagaagaggacctttacacgatggataaatctacatctagaaaagtgcaacccacctctagaagttaaagatttattcgtcgatatacaagatggcaaaatcctaatggctttgttagaagtcctgtctgggcggaatctgctgcacgaatacaaatcctcgtcgcatcgtatttttcggttgaacaacatagcgaaagcacttaagtttttggaagatagcaatgtaaaactggttagcattgatgcagcagaaatagcagatggcaacccttctttggttcttgggctgatatggaacataatcctcttcttccagattaaggagctcacaggcaacctcagcagaaactctccatcttccagcttgtcccctggctcagggggcacagactcagactcatccttcccacccacacccactgcagagaggagcgtggcaatatcggtgaaagaccagaggaaggctatcaaggccctgttggcgtgggtgcagaggaaaac

SEQ ID NO: 4321 - DNA, 685 bp, Homo sapiens
  source 1..685: mol_type = unassigned DNA
tgtacacaagcgtggagctctctcttggagagctggctctctccaagagagagctggcctggcctgtgagtttaactctgatctaaaacaaaccaaacgtgttacctcccgattcaaagccaagggccttgggtgccgaaagcaggaggttgccccgggcaatggcctgtattgagttcccaggagtaccttgggcaagggccatgaagtggcacgtgattgctgacccgtaggggacagagacatcgcaatgccatgagttgagagggaaaatgtgcagaagaggacctttacacgatggataaatctacatctagaaaagtgcaacccacctctagaagttaaagatttattcgtcgatatacaagatggcaaaatcctaatggctttgttagaagtcctgtctgggcggaatctgctgcacgaatacaaatcctcgtcgcatcgtatttttcggttgaacaacatagcgaaagcacttaagtttttggaagatagcaatgtaaaactggttagcattgatgcagcagaaatagcagatggcaacccttctttggttcttgggctgatatggaacataatcctcttcttccagattaaggagctcacaggcaacctcagcagaaactctccatcttccagcttgtcccctggctcagggggcacagactcagactcatccttc

SEQ ID NO: 4322 - DNA, 565 bp, Homo sapiens
  source 1..565: mol_type = unassigned DNA
gtgcgtgccgctcgcgcgcccgccagccaggctctccgcgcccgccgcccgcgccgcgctggcccgggctctcccgcccgcgcttcatggctgcacacgagtgggactggttccaacgcgaggagctcatcgggcagattagcgacatccgagtgcagaacctgcaagttgagagggaaaatgtgcagaagaggacctttacacgatggataaatctacatctagaaaagtgcaacccacctctagaagttaaagatttattcgtcgatatacaagatggcaaaatcctaatggctttgttagaagtcctgtctgggcggaatctgagccctggtcaccagctgctgtgtccttggtgggcctccacggggagtctttgattctggagcccagccaagaacaggcctccacttccccatgagcgtggcctggcacttcacacctggtggagctgacccactggtttgccttgtaatgccatcttcccccaacctggaggagcgtcagtgtgcttcagttcaggctgcacgaatacaaatcctcgtcgcatcgtatttttcggttg

SEQ ID NO: 4323 - DNA, 5072 bp, Homo sapiens
  source 1..5072: mol_type = unassigned DNA
agctgaattttttttttccctctctctttcttcactcctttttctttccaaacagggaaaagtgttccacgaagcggtagcgccttttcgcctcgcgttttcctccctgaccctggtcccggctcccgtccgggcgccagctggtggggcgagcgccgggagcccatctgcccccaggggcacggggcgcggggccggctcccgcccggcacatggctgcagccacctcgcgcgcaccccgaggcgccgcgcccagctcgcccgaggtccgtcggaggcgcccggccgccccggagccaagcagcagctgagcggggaagcgcccgcgtccggggatcgggatgtccctcctccttctcctcttgctagtttcctactatgttggaaccttggggactcacactgagatcaagagagtggcagaggaaaaggtcactttgccctgccaccatcaactggggcttccagaaaaagacactctggatattgaatggctgctcaccgataatgaagggaaccaaaaagtggtgatcacttactccagtcgtcatgtctacaataacttgactgaggaacagaagggccgagtggcctttgcttccaatttcctggcaggagatgcctccttgcagattgaacctctgaagcccagtgatgagggccggtacacctgtaaggttaagaattcagggcgctacgtgtggagccatgtcatcttaaaagtcttagtgagaccatccaagcccaagtgtgagttggaaggagagctgacagaaggaagtgacctgactttgcagtgtgagtcatcctctggcacagagcccattgtgtattactggcagcgaatccgagagaaagagggagaggatgaacgtctgcctcccaaatctaggattgactacaaccaccctggacgagttctgctgcagaatcttaccatgtcctactctggactgtaccagtgcacagcaggcaacgaagctgggaaggaaagctgtgtggtgcgagtaactgtacagtatgtacaaagcatcggcatggttgcaggagcagtgacaggcatagtggctggagccctgctgattttcctcttggtgtggctgctaatccgaaggaaagacaaagaaagatatgaggaagaagagagacctaatgaaattcgagaagatgctgaagctccaaaagcccgtcttgtgaaacccagctcctcttcctcaggctctcggagctcacgctctggttcttcctccactcgctccacagcaaatagtgcctcacgcagccagcggacactgtcaactgacgcagcaccccagccagggctggccacccaggcatacagcctagtggggccagaggtgagaggttctgaaccaaagaaagtccaccatgctaatctgaccaaagcagaaaccacacccagcatgatccccagccagagcagagccttccaaacggtctgaattacaatggacttgactcccacgctttcctaggagtcagggtctttggactcttctcgtcattggagctcaagtcaccagccacacaaccagatgagaggtcatctaagtagcagtgagcattgcacggaacagattcagatgagcattttccttatacaataccaaacaagcaaaaggatgtaagctgattcatctgtaaaaaggcatcttattgtgcctttagaccagagtaagggaaagcaggagtccaaatctatttgttgaccaggacctgtggtgagaaggttggggaaaggtgaggtgaatatacctaaaacttttaatgtgggatattttgtatcagtgctttgattcacaattttcaagaggaaatgggatgctgtttgtaaattttctatgcatttctgcaaacttattggattattagttattcagacagtcaagcagaacccacagccttattacacctgtctacaccatgtactgagctaaccacttctaagaaactccaaaaaaggaaacatgtgtcttctattctgacttaacttcatttgtcataaggtttggatattaatttcaaggggagttgaaatagtgggagatggagaagagtgaatgagtttctcccactctatactaatctcactatttgtattgagcccaaaataactatgaaaggagacaaaaatttgtgacaaaggattgtgaagagctttccatcttcatgatgttatgaggattgttgacaaacattagaaatatataatggagcaattgtggatttcccctcaaatcagatgcctctaaggactttcctgctagatatttctggaaggagaaaatacaacatgtcatttatcaacgtccttagaaagaattcttctagagaaaaagggatctaggaatgctgaaagattacccaacataccattatagtctcttctttctgagaaaatgtgaaaccagaattgcaagactgggtggactagaaagggagattagatcagttttctcttaatatgtcaaggaaggtagccgggcatggtgccaggcacctgtaggaaaatccagcaggtggaggttgcagtgagccaagattatgccattgcactccagcctgggtgacaaagcaagactccatctcaaaaaaaaaaaaaaatcaaggaaggataaaaggaagttcagtattgtaccacacttggaacttcctccatttcttccattttagaaggatatgaacctggaacttttgatgattctaagccttaaactatcaaaaagatcagggattgccaatgcttctaatggcactgcaagtatatgccataaccgttccctcctaaaagtgaaaaatgagagaaattcagtattttcccaggctcagcatccagaagtctagctctgggctggaagaaaagggtactaatatttagggaagagatgagaataagtagtgggtggcaggagagggctgagctagtgcctgctaacattttagttgtatcttggaaagatttagcaaaaataactcaccaggatagctgctgaagagttgatgaatgggagaagaaagatgtttgagaaataaagaaaacagcagcctgcaatacaataacttgcctttttaatagttttgattactcttgatacctacagcacaaatgctggacctgaatcagctcttcaaggaccctagcacaaatgtcaactgatcacctctgggagagtagaaaacttttttttttttgagacgaagtctcgctctgttgcccaggctggagtgcagtggcaccatctcagctcactgcagcgtccgcctcttgggttcaagtgattctcctgccttgtcctcctgagtcgctggtattacaggtgcctgccatcacacccagctaatttttggagttctgatagagacagggtttctccatgttggccaggcttgtctcaagctcctgacctcaagtgacctacccacccttggcctcccacagtgctggaagccactgcacctggctcagaatacttttttttttgagatgcagtcttgctctcatcacgcaggctggagtgcagtggcgtatctcggctcactgcgacctccacctcccgagttcaagcgattctccttcctcagtcccccaagtagcttggattataggtgtgcgccaccacgtacagctaatttttgtatttttagtagagatggggtttcgccatgttgaccaggctggtctcaaaacgcctgacctcaggtgatccacccacctcggccccacaaagtgctaggattacaggtgtgagccaccatgcccggcccagaatactttttaaaagaagagcaggttagaggaaagaaaaaaattgatgctgaatgtggtgatgaaagcatgtttctaaaatgggaagcagatgcttaaagaggaaagactaatctgggattttgccccatttctctggtttttcactcctatatttaattctcacaatcgtgtcgtcacatagtgcaaaaaacaaaattcttgtaaagtccccaggagtttatgcttgggtgaaagttttagcctgagtattttcttcctctaaaaaaggtgggaaatgagacattgaggaattaacatataaatgtctgctatgggtttaagagaactggcgtatttggaatgcttcttacactaacactgtctcattgtaaaatataaaaccccttactctaactacatttttattcctctggtagtgtggtatccaggcaacatatcacttctgctatgtaattctaagaattctcatttctagagtacctgagccaaacaaatacacaacggaagctgcagctgtatcatcactagcaatttgctcatcattatttactacctttgaacctaaggtttcctgcctatgcttttgaaagcaaaaatcagtctcctttgcatgaaaaagagccttagatttttaaacatgttagttaccagaatgctaaaataccagttgattacccaaattattttggaaatctatccataatggaagtctacaacaaacacataaaacagattacactaagagctgagaaattcaaaggaactgaagattctgagagataaactgttcaagtcttagcaatgatactgcacttctctttgacaggttctgggcttaagttagaggccctactggttccaaaccatattccactgactttgcaagtaaaataaatttgattctgaaataggaaacaaaaaaaggagaaataaccgaatagtagaagaaaaactgtttgtaggaagacgatgcagatggaatgatgtggacattgagtaaccatgtcaataaaatatataaaccaaacttaaatttgtgaaataaggaagttggtacctttgttgttacagtgtataaaaacaatttcggaactgctgttgcaaaaagacatatatagttttgcttccttctggtgttaagctgtttatatttcagtttcagttttaacttctaagttgccttgtaattgggactgtgtttcagcatcacaaaaaccaaatatttattatggatgcatctgtatcagcaattaaaaaataaacaagtaaaagtgatactgta

SEQ ID NO: 4324 - DNA, 585 bp, Homo sapiens
  source 1..585: mol_type = unassigned DNA
agcgaatccgagagaaagagggagaggatgaacgtctgcctcccaaatctaggattgactacaaccaccctggacgagttctgctgcagaatcttaccatgtcctactctggactgtaccagtgcacagcaggcaacgaagctgggaaggaaagctgtgtggtgcgagtaactgtacagtgagcagtgacaggcatagtggctggagccctgctgattttcctcttggtgtggctgctaatccgaaggaaagacaaagaaagatatgaggaagaagagagacctaatgaaattcgagaagatgctgaagctccaaaagcccgtcttgtgaaacccagctcctcttcctcaggctctcggagctcacgctctggttcttcctccactcgctccacagcaaatagtgcctcacgcagccagcggacactgtcaactgacgcagcaccccagccagggctggccacccaggcatacagcctagtggggccagaggtgagaggttctgaaccaaagaaagtccaccatgctaatctgaccaaagcagaaaccacacccagcatgatccccagccagagcagagccttcc

SEQ ID NO: 4325 - DNA, 712 bp, Homo sapiens
  source 1..712: mol_type = unassigned DNA
ggtgatcacttactccagtcgtcatgtctacaataacttgactgaggaacagaagggccgagtggcctttgcttccaatttcctggcaggagatgcctccttgcagattgaacctctgaagcccagtgatgagggccggtacacctgtaaggttaagaattcagggcgctacgtgtggagccatgtcatcttaaaagtcttagtgagaccatccaagcccaagtgtgagttggaaggagagctgacagaaggaagtgacctgactttgcagtgtgagtcatcctctggcacagagcccattgtgtattactggcagcgaatccgagagaaagagggagaggatgaacgtctgcctcccaaatctaggattgactacaaccaccctggacgagttctgctgcagaatcttaccatgtcctactctggactgtaccagtgcacagcaggcaacgaagctgggaaggaaagctgtgtggtgcgagtaactgtacagtaaaatagatgtacaaagcatcggcatggttgcaggagcagtgacaggcatagtggctggagccctgctgattttcctcttggtgtggctgctaatccgaaggaaagacaaagaaagatatgaggaagaagagagacctaatgaaattcgagaagatgctgaagctccaaaagcccgtcttgtgaaacccagctcctcttcctcaggctctcggagctc

SEQ ID NO: 4326 - DNA, 668 bp, Homo sapiens
  source 1..668: mol_type = unassigned DNA
ttttcctcttccagtttcctactatgttggaaccttggggactcacactgagatcaagagagtggcagaggaaaaggtcactttgccctgccaccatcaactggggcttccagaaaaagacactctggatattgaatggctgctcaccgataatgaagggaaccaaaaagtggtgatcacttactccagtcgtcatgtctacaataacttgactgaggaacagaagggccgagtggcctttgcttccaatttcctggcaggagatgcctccttgcagattgaacctctgaagcccagtgatgagggccggtacacctgtaaggttaagaattcagggcgctacgtgtggagccatgtcatcttaaaagtcttagtgagaccatccaagcccaagtgtgagttggaaggagagctgacagaaggaagtgacctgactttgcagtgtgagtcatcctctggcacagagcccattgtgtattactggcagcgaatccgagagaaagagggagaggatgaacgtctgcctcccaaatctaggattgactacaaccaccctggacgagttctgctgcagaatcttaccatgtcctactctggactgtaccagtgcacagcaggcaacgaagctgggaaggaaagctgtgtggtgcgagtaactgtacagtgta

SEQ ID NO: 4327 - DNA, 14202 bp, Homo sapiens
  source 1..14202: mol_type = unassigned DNA
agtgagcgcggctgctgccggcgagctagcggcgcagcggcgggaacccgaggccgagcgccgcggcggcagcgctagaagcgcacccatcgggcacggcgaggcggcccacggtgcggcaggcaccgggaggcgagagccggcgcggacagtaggcggcggctgcagctcgttggcggctgctgcgaggatgctgcctgggcggctgtgctgggtgccgctcctgctggcgctgggcgtggggagcggcagcggcggtggcggggacagccggcagcgccgcctcctcgcggctaaagtcaataagcacaagccatggatcgagacttcatatcatggagtcataactgagaacaatgacacagtcattttggacccaccactggtagccctggataaagatgcaccggttccttttgcaggggaaatctgtgcgttcaagatccatggccaggagctgccctttgaggctgtggtgctcaacaagacatcaggagagggccggctccgtgccaagagccccattgactgtgagttgcagaaggagtacacattcatcatccaggcctatgactgtggtgctgggccccacgagacagcctggaaaaagtcacacaaggccgtggtccatatacaggtgaaggatgtcaacgagtttgctcccaccttcaaagagccagcctacaaggctgttgtgacggagggcaagatctatgacagcattctgcaggtggaggccattgacgaggactgctccccacagtacagccagatctgcaactatgaaatcgtcaccacagatgtgccttttgccatcgacagaaatggcaacatcaggaacactgagaagctgagctatgacaaacaacaccagtatgagatcctggtgaccgcctacgactgtggacagaagcccgctgctcaggacaccctggtgcaggtggatgtgaagccagtttgcaagcctggctggcaagactggaccaagaggattgagtaccagcctggctccgggagcatgcccctgttccccagcatccacctggagacgtgcgatggagccgtgtcttccctccagatcgtcacagagctgcagactaattacattgggaagggttgtgaccgggagacctactctgagaaatcccttcaaaagttatgtggagcctcctctggcatcattgacctcttgccatcccctagcgctgccaccaactggactgcaggactgctggtggacagcagtgagatgatcttcaagtttgacggcaggcagggtgccaaagtccccgatgggattgtgcccaagaacctgaccgatcagttcaccatcaccatgtggatgaaacacggccccagccctggtgtgagagccgagaaggaaaccatcctctgcaactcagacaaaaccgaaatgaaccggcatcactatgccctgtatgtgcacaactgccgcctcgtctttctcttgcggaaggacttcgaccaggctgacacctttcgccccgcggagttccactggaagctggatcagatttgtgacaaagagtggcactactatgtcatcaatgtggagtttcctgtggtaaccttatacatggatggagcaacatatgaaccatacctggtgaccaacgactggcccattcatccatctcacatagccatgcaactcacagtcggcgcttgttggcaaggaggagaagtcaccaaaccacagtttgctcagttctttcatggaagcctggccagtctcaccatccgccctggcaaaatggaaagccagaaggtgatctcctgcctgcaggcctgcaaggaagggctggacattaattccttggaaagccttggccaaggaataaagtatcacttcaacccctcgcagtccatcctggtgatggaaggtgacgacattgggaacattaaccgtgctctccagaaagtctcctacatcaactccaggcagttcccaacggcgggtgtgcggcgcctcaaagtatcctccaaagtccagtgctttggggaagacgtatgcatcagtatccctgaggtagatgcctatgtgatggtcctccaggccatcgagccccggatcaccctccggggcacagaccacttctggagacctgctgcccagtttgaaagtgccaggggagtgaccctcttccctgatatcaagattgtgagcaccttcgccaaaaccgaagcccccggggacgtgaaaaccacagaccccaaatcagaagtcttagaggaaatgcttcataacttagatttctgtgacattttggtgatcggaggggacttggacccaaggcaggagtgcttggagctcaaccacagtgagctccaccaacgacacctggatgccactaattctactgcaggctactccatctacggtgtgggctccatgagccgctatgagcaggtgctacatcacatccgctaccgcaactggcgtccggcttcccttgaggcccggcgtttccggattaagtgctcagaactcaatgggcgctacactagcaatgagttcaacttggaggtcagcatccttcatgaagaccaagtctcagataaggagcatgtcaatcatctgattgtgcagcctcccttcctccagtctgtccatcatcctgagtcccggagtagcatccagcacagttcagtggtcccaagcattgccacagtggtcatcatcatctccgtgtgcatgcttgtgtttgtcgtggccatgggtgtgtaccgggtccggatcgcccaccagcacttcatccaggagactgaggctgccaaggaatctgagatggactgggacgattctgcgctgactatcacagtcaaccccatggagaaacatgaaggaccagggcatggggaagatgagactgagggagaagaggaggaagaagccgaggaagaaatgagctccagcagtggctctgacgacagcgaagaggaggaggaggaggaagggatgggcagaggcagacatgggcagaatggagccaggcaagcccagctggagtgggatgactccaccctcccctactagtgcccaggggtctgctgcctggcccacatgtcccttttgtaaaccctgacccagtgtatgcccatgtctatcatacctcacctctgatgtctgtgacatgtctgggaaggccttctccagcttcctggagcccaccctttaagccttgggcactccctgtgtttcatccatggggaagttccaagaagcccagcatggccatcagtgaggacttcagggtagactttgtcctgtagcctccacttctgccctaagttccccagcatcctgactacctgtctgcagagtttgcctttgttttttcctgcagggaagaaggcccacctttgtgtcactcacctccccaggctcagagtccccaaggccctggggttccaactcactgtgcgtctcctccacacagaccagtaggttctcctatgctgactccaggttgcttcatacaaggagggtggttgaacttcacacacgtaaggtcttagtgcttaacagtttaaaggaaagtccttgttgaggcagaactaagtttacagggaaaggtacacacattctctctctctctctctctctgtctatctagttccccagcttggagagcctttccccttgcttctttctgaggccatataagcttataagaaaagtcccaaaccaagaataggtccttggccacaagcagggtctgatcccccatcagagctatctgagcctgcctgtctgggcacctgctgcaaccatgcagctaccctgccaggggcactcagcaaacagaaccacagggcccaggaggcattccacacaggcactgccccaggacaacacaacaaggacagtcacaacaaggacaacaaggacacaacacaacacacaacaaggacagtcacaacaagcctagagccagaaagcagatggaaatgctaatgaggtcaaacgtaggcttcatggtgggtggagtgggggtggctgggctcccccaggacagaggggaccctgaggttggcaaggctctcaccactcagccttatggtcccttatctcctatcttccctcttgagaaaatacacgctttctgcatgtattagaaacgcacgagctccaccaagtctacaatgaaagtttgaaatttaactgcaaggaattagaagcatatttgcaatcattgcagcttcttctttcttctgctcataaaaggaggaacactttagatagagggcaaatatatctgaaaacctaatttctttctttttttgataaggaaatcttttccatctccatcctaacatgcacaacctgtgaagagaattgtttctatagtaactggtctgtgatcttttgtggccaagagaatagcaggcaagaattagggccttgacagaatttccacgaagctctgagaacatgtttgtttcgaatgtctgattcctctttgtcatcaatgtgtatgctctgtccccatccttcactcctcctcaagctcacaccaattggtttggcacaggcacagagctggtccctagttaagtggcatttatgttaaaaaaaaatagttcagaatctcagccttttctttgtgtcatcaaaacagcttaagaaggggactactgccaatgtcctctagtctgacctccacccagggaggacccatggcaggtcttttcaactttctgattcatgagaacaaccttgtgaagcttttcccacctcctaaagtgttttctgcatctgttccttcctttggacctcacaacaaatcctgtgaagtaactgagacatctgttgttagatacatttttgtgatgagtaaactgaggcttcgtgattcaatgtcttgttcagagtcattcaaaagtatagacaagaccagtctccccaacttccactcctggtgcaggattctacttatgttcataggtatgcacctaacagacactgctgcaaacctactatgtgctaagcatcctaccaatagctgtgagaaaaagaaaagctgaataagataagctccttccctacattatatttgcagacgggaaataaacaggcctagaaattacacaagagacaaatgaagaggaagagaagtcacaagagaagaaggatgcggtcacaaacttaaccagtgctcttatttttcccttctcagggaaaaacaccagaagaagctggggttttatattcattggatggaaacagatatttctcctgggaattctcccaaccaaatagcccttttctattaggctgtgtctgtacatccacaagaggaaagtctataggactgattagttttcacaatcccatttaaataaaaaaaagatctttagttgggcatttaggagcaactgaattctcccaaaattgtggcagcaaaaagaacacttcatatgcttaaaacccattctttttgaattagattttgattttaaatatttaagtctggtgtttgtgagaacacttttctctttgctcagtcttttcgatctggttgggtagggaaggtgttcctcatgctctctgggtggctgccttattcatagttgagagagctgttaggtaaaatctttatatgtgttggggtttttttggtagggggggtagcaggtaaaggtggcccatggctagggcagcaaagatgaataatttgaggaagcatttggttggtggactcatttgcagagaaacagtggtgacaacaaatcagagctgtttccctcaactctggctataagaggtcattctctgcatgtcagctacaaagatcaggcacttgaatgaatccgctgggttggcaggcattggtcatcttcgcaacaccctcttcctcaccatggatgagaacaagacgggagtggttatatcccagtaacagaagctttgggaggtatccaggtgagcagggtaatgtggcttgccctcccccagatattctgatcccaagaaaaaggtgtcattaatcagtctggcattttccaccctccatatgctggcatccaggaaccaaaacccctgaaggcctagacaccctatgacctctaactgagatgttggcagccaggcagatgcaggctcatgtccaggaggaactgctgactggtttggccacagcccagttcattgcttgtcttgccaagtggacaaccagattctgccttcctgagcttgaaaataggctacaactctcaggtgattcagatgacatggaggagaagttggaggagaagattgaaatgcttaaatcccagtgcagaatgagttgcttcagtggagtaaagcaaccggctagttggtagcctgccttaaaaaatactaaacatatatcatcatacatttgatcaaatgctgtaagcacagccaaggcccaaattcatctagataccaaaaatgtgatttcagtgaaatctcttttcattgccgctttcttttgttgttgtttgttttttgagccagagtcttgctgctctgtcacccaggctggagtgcagtggcacaatctcagctcactgcaacctccacctcccgggttcaagcgagtttcctgcctcagactcccgagtagctgggattacaggcatccaccaccatgcccagctaatttttgtatttttagtagagacagggcttcaccgtgttggccaggctggtctcaaactcctgatctcaggtgatctgcccaccttggcctccaaggtaatgagattataggagtgagccaccgcacccagccctcattaccactttcttgaatttactcaatcatcctatcaagcagggtttagaccaacatctttgcatttaataagggctctactttgtatacatggaccatccagtgagagagctgggggtggtgagaagcaatgtcccccattcctatatgtcaggtgtcagcaaactatctgtaaagaggcaaatagtaaatattttgggctttgtgagccatttggtacctgtcacagaatagtcagccctccatatctgaggtttccaaatccatggattcaaccaaccttgaatcaaaaatatttgggaaaaaatgtatagttgcaactgacctgaacatattctttttttcattattattccttgaacaatacagtttaacaggatttacatagcatttacactgtattaggtattataagtaacctagagatgatttgaagaacacaggaagttgtgcataggctatatgcaaatactatgcattttatataaaggaattgaacatctgtggattttggtgtccgaggggagttctggaaccaatcccctacagatactgagggatgactgtactcagctctcctattgtagcatgaaaacagacaatacgtacaacaaatgaatgtttcaatacaactttatctagtttccataaaacaatttaaaaacactaaaaaagcaggcagtttggatttatgtaattttcatatctttttttacccttttgatttacatttttaataatttaaaaatataaaaaccttcctcagcccacaggccatacgaaaattagcagccagctagatttggcccaaggccaaagtttggcaacccgtaccatacaccatggaagttagccttccacctcaggagaaagcaagctgctctcataagcctctcaccaactacccagtagtctttgcctccaaactgaacaacaggaaaaagtgccatagtttttaattaagctgttttaaaagtccatgttccgggggaaaacaaaaaagaaacaaacaaaacacttgttatttgctgaactgacaaactgacagatattccacgagagttgaaagccttggatcgaggtgattgcctggttactgagtgctaactccactgaggcaagtgttagccccccaaggctcagtgccttcccagcacagctcagcccataatgatctctgagcaggagtgttcattatctcagactgattttcatttcagccctactcttgccattgctctaaaaatgatcctaaagacttgtgactgtttgaatcaatagcaacatcatcagtagaaagcccgaccaagcacacttcgaaattagcaatcttcttggctctatggctcaatatcagcaagaagaaaaaaagacaactttttttttaatcatccccacatttaaattaaccaaatagtttttacaaaaaagtaggtaagtgggtttaattctttgaaagtatttgccagtgaaaagtagatgatttttaggtaagataacgtttaggcctctgggggatccccaaagccttctgcaatgtactctggcaggctatgaatggtacaggattctgcatctatatgagacatttattgaggctgacaagcaaaagcccttggcacaatttaattttcacataaccactttccattgtccagctgcaggcaaaagaaatgagcaatgaaagttttgaagtctaccccagtaccctcatttcctgtctttatttcctttactttatagatgtattctatacctgctatgtagataatgctctagttttccctttagtgccaactggaaaaggagagttggctttacaggggctgtggattaagagccaggcttcattccatcccagggagacaaaaagagacagaagaagttacctccagcagcaccccagaaagctgacagatattccctgtatgcaggtagtaaacagatgggagtctgtgtttgcagctatgttcagtgtaattcagcagaccttcactgggcacttgtgatgggtcaggccctgtgccagcaacaggggaagggaggatgaacaaggcatgtttccctgaccatgaggagctcttggcctgtgagctgttgggatgtccctttgtggtgttggaagctgtgcacgagcagtcaggactttggggacagaagtttagtgttagggaggcagggtaacttgctttgacagctacccaccctaagtcagatgacaggtgtaattctaggggccctgatatgcatcactgaggcagactgaggagctctccagggaagtaggcaatatttccctgaatattcctcaattccaatcaaggctgactcagttcacttatggatgaaagccagttaccctgcccactgggcagaaataacatggttgacagctgacattcagagaaaataagacagaagcagtccttaaatataaacagcagccaggtggacctggaaatttaggaagggtgatgcaggtagaggggccagcaggagccaagtctcaaaaggcacaagccagactgatgcaagggagccctcctgaggcccaacatcagagctgaagatctaaggagggcccacctccacgagacctgctgagggcttacatttggtgctgaggagcagtggttccctgggccagctgcatcacctgggaacatgtgagaagtgcatattcttgggccccaccccagacctactgaatgagaagctctggaggcaggcagtctgtgatttaatgagctttctgacacacactaaagtttgagaaccactgatgcagaggatgaggagatgacttgagctggcatcgggaagaactgactattaactaacaaggtaaaatcaatgactagtgcagtgagggtgccaaagcaaaccacccccagcccccatcctgggcctttttggctccagtttatactcactgaagcagtggtttcaaggaaccttggtcctagtccgcatccttcacctgcccttgggcatgagacaattcctgcctgcctgccccttctatcctagagagagagactgcccaggagaggctgccatgaggtcactcatccccaggaaggccacctgccaggtttctgtaagctgagcagcctcttcgagggccatattttgtggagaaacactgaaactgcagcagtgaccctggtcactaggagagctgctttctacacagcctgtatgctggtggagacacccagggcctggcagagtgtggagggggtcatttaaggacgttgccaggttgccgcagcactgctctgtttgtttgtaatgagactggggcatgcagcatcacaattcaaacactgaattgcttggggaatggatggccttccttggaagggcagtaactcattctggatgttactaaaagtagaaaacaaaaatccaaaaacaaacctacagcctcatttacaattagaatctgtctgggccttctgatttctaaagtctgtgaggctgccaggattcaccaattctcctttcccctgaggcccagcaactattgatttatagcttaaactctgtgaaggtccacagacctttgaaaggaacttgctggtactttgtcagtcgtgtacacctaactgactcctcctacgaggtacagtctcctcatacaaggggttttgagatggagagtcagagggccagggccctgggctttggggtggaaggacagaagagtagcagtctaggaaagggactagacatgtagcctaggaaaactagcaccatctgttgagttctgaagaacccagattctctcctgctcacagcctcagcagtcttttcagagtcctcctgaatggcccaaagacacccctgtttctggggaacagaagggagctggtacctctggaccattgaggcaacacctccccagaggcaggaccccgcccccatgagaacatgcagttgaatgatgtggtgcctggccaggaccttggaaaacgtggccatgtgagactagtatagatctccaactattgctgcctctgctgatatggccacctccttaaggtaagaagactaccgacttagctattgtggcaccacgggagcctagcactgcacctggcccatgacatgtgtgccacaaatgttgaattgaattgaatcccagagatcacttgacctcagtgaagggactgggtttgaagaattaagaccccccagtggagaaagcctcctccaacttccttctcggtttgtgagtcaaggtcctttgtaaaatcagatcgacgagggtggaagtgcagtgaacagaggacaacatttgtgatgcacgtgggagaaaacaggagtggggttgtttggggactaccccttcctagctatagtcagtaaatggagcccctaagcaaggagcaggggtagatgtgcctgggtgaggcctgcttgctccaccgtcgaggtcatgggcagcatcccaactgaggagagaaaaccctaatttgttaatgacccagccttgtgctgctctccagttcctttcatcagatttactgcagagcagattcatcaacatgaagttcaattcccagtagactaatgaaaagagggcaacagacttgagaagagccaaaatgcagacagtgtgtattaatcacagacaacagaaacgtgttagctttaatgtctgtttgcttttatcttgaaatgaaaatgcatctctgttacctggaccctttttactgcacatttcagaacagaaatgggacacccacacacgtattgagggtccttttccccggcaggaggagctaccagagaaatgagcccacattttgtgtgcagagagaatcaacccacaggtctcagctgcagactccagcacctctgcagagaaggcaggcaaagggatgaggaggtagcatctcctcttcagaaggattcataagggcctctgtgaggagggccttgcttgtgcctgtgggtcatggatgttaatataaaggctcatccacccttggtggcaaaagtgcatccatcctggccaatatagaacactcacatctggagcccacgcccacccacctccagctcctctacatggctgcaagagcatggctgatgtgtgggattcagaagaggtctgctcatgttcactagccaaactttaggtggtgtgatacagcaaaaagctttttttgtttttctgtttttgttttgtttttggcgtggaggagaaatttagacttgaaagtcagggctgatcactcaaaaagtaagataggagatattgagggaaaatgtgactcatagttggagaggaaacaggagagtgggtacaagtgacagcaccaggaacaaccccctcccccagatgccaaagcattgctctgtatctaaagatgcatccaagtttgcaaaaaattatgggtaaatctggccatgtgaccaaagaggcagtcaaatcaattgcttccaaagtcagagctgtttgaaggtgatcagctcttaattgaactagtcatgatgaatcaatccaactgactgcatccagtctgacctcggtggtttccataaagggttgttgatgtcctgagctggacagggtgggcaggaggttgaagaaaaccagttggtgagtatagaaaagaaattgcatgtagaagttgtttgttctcaaagaaatctgtaggtgttagagctgggtttgttatgttattgtcagggacattataatattggtaaggaggagagaatgatttggtaggggtattcgagaaatttgagtacaaaatataaattatcagagatgagtaggctatggacagctgattatatatatgtgtgtgtgtgtatatgtgtgcatatatgtgtacatatacacataccccaaagccatatacatatctataatacagaagtaagaataaagtcataagtaccagcatattttaaatccttagaagcactggttgggatgttacatgttttttcactgttgttgtttaccgttagctctcaaagcagtgggaatagtgcttggcacatagtaggagtttggtaaacatttggaaattgaagacccagcttatcactccttcatagagactcagtagtatgagtataccccaaattgaatgagccacagagaaatgcatccagccacactccctcttagctgaggagaagcctctgtgaatccacagattccatgcaatattcagccagccgcagacacaaggtctggctcccttgtcgtgagagtgaaggcatgctgcacacagtgggtttgcatgcacctagactgcatctgctgaacacccaacagctgtttctacaagctaaagttgtagcttctctctaccactgtctaaagctgtagcttgtctctactattgtctctacaccgttgcccaaacacttggtataatgctattgaatttttcacctccaggcatgattttgtaaccaatgtaaaggttctgggttcagccagtctaaaaagtctaataatttcttctctcagtccttcccttctcccttgtctggagctgccaccgccatttaaaagtgttggacgctgtttattcccagcttctcaacctcagtgtgtgtgggaaaggcctgaaagagagaggtatgttttctctcctccagagtctctgtggtgttgacacagcagagagaggagggggagcagcctcgtcttgcagaatcaccttcaatcactgctactgtctgggccattactgccagtctggccggtgtctcccacagtggatggctttgcctccagcggtggaccagtgtgtacctgacatgtatcagacttctgagctcttcaagctgcctcaaagaatgaatctttttagtctagaaaatgtgtttatttgataaatatactattgtgtatgagtgtgaaacaatgcagactttggagtatctcattagaaggactgtatgaatttatagaaaattgaatctaatttcagaagagcgcactgtcttctcagtcaacaaggttgcccagccacagagggtcagagaaaatgtcctttcccctccccactccttttcatagaatcctctctcaggcctaactgagctgtcatatccaattcagactgacacagagtgaggggcgctgagagtctctatgtatataaagatataggaagaaaataaggatcatcacaggaatctgttgggcttctccccatgactgtgatcttacccatgtttgaatcacaaactttaaatttataataattatgattcttgcagttttcaagtaatttgttaaatgcctattcaacacagacagatttttattttcagctgtggcttgtaaatgcctacaaactgattcatgttggtggtcgttatgacactttctgtgaattggtgaataaatatgattttagaatttcacagtaaa

SEQ ID NO: 4328 - DNA, 2405 bp, Homo sapiens
  source 1..2405: mol_type = unassigned DNA
tgagcgcggctgctgccggcgagctagcggcgcagcggcgggaacccgaggccgagcgccgcggcggcagcgctagaagcgcacccatcgggcacggcgaggcggcccacggtgcggcaggcaccgggaggcgagagccggcgcggacagtaggcggcggctgcagctcgttggcggctgctgcgaggatgctgcctgggcggctgtgctgggtgccgctcctgctggcgctgggcgtggggagcggcagcggcggtggcggggacagccggcagcgccgcctcctcgcggctaaagtcaataagcacaagccatggatcgagacttcatatcatggagtcataactgagaacaatgacacagtcattttggacccaccactggtagccctggataaagatgcaccggttccttttgcaggggaaatctgtgcgttcaagatccatggccaggagctgccctttgaggctgtggtgctcaacaagacatcaggagagggccggctccgtgccaagagccccattgactgtgagttgcagaaggagtacacattcatcatccaggcctatgactgtggtgctgggccccacgagacagcctggaaaaagtcacacaaggccgtggtccatatacaggtgaaggatgtcaacgagtttgctcccaccttcaaagagccagcctacaaggctgttgtgacggagggcaagatctatgacagcattctgcaggtggaggccattgacgaggactgctccccacagtacagccagatctgcaactatgaaatcgtcaccacagatgtgccttttgccatcgacagaaatggcaacatcaggaacactgagaagctgagctatgacaaacaacaccagtatgagatcctggtgaccgcctacgactgtggacagaagcccgctgctcaggacaccctggtgcaggtggatgtgaagccagtttgcaagcctggctggcaagactggaccaagaggattgagtaccagcctggctccgggagcatgcccctgttccccagcatccacctggagacgtgcgatggagccgtgtcttccctccagatcgtcacagagctgcagactaattacattgggaagggttgtgaccgggagacctactctgagaaatcccttcaaaagttatgtggagcctcctctggcatcattgacctcttgccatcccctagcgctgccaccaactggactgcaggactgctggtggacagcagtgagatgatcttcaagtttgacggcaggcagggtgccaaagtccccgatgggattgtgcccaagaacctgaccgatcagttcaccatcaccatgtggatgaaacacggccccagccctggtgtgagagccgagaaggaaaccatcctctgcaactcagacaaaaccgaaatgaaccggcatcactatgccctgtatgtgcacaactgccgcctcgtctttctcttgcggaaggacttcgaccaggctgacacctttcgccccgcggagttccactggaagctggatcagatttgtgacaaagagtggcactactatgtcatcaatgtggagtttcctgtggtaaccttatacatggatggagcaacatatgaaccatacctggtgaccaacgactggcccattcatccatctcacatagccatgcaactcacagtcggcgcttgttggcaaggaggagaagtcaccaaaccacagtttgctcagttctttcatggaagcctggccagtctcaccatccgccctggcaaaatggaaagccagaaggtgatctcctgcctgcaggcctgcaaggaagggctggacattaattccttggaaagccttggccaaggaataaagtatcacttcaacccctcgcagtccatcctggtgatggaaggtgacgacattgggaacattaaccgtgctctccagaaagtctcctacatcaactccaggcagttcccaacggcgggtgtgcggcgcctcaaagtatcctccaaagtccagtgagtggacgctggtcagcctggggccaactgaggcagcagttgggaaggtcccaactgaggtcccttgggaatgttccctcacaaaacaggagttgcctttcgtcagctgtcctcaacttctgctattcctctgaggatgcctcaaaggatctgtgttcttgttttcttcctaagcaagatgttctgttgttttaccaccttgaatccacctttctctatcttgtatcttatctaatgcctagaaggtactactttctataaattctcagagagctaggaatttgaagtgatctgggtgtgcgtttgaagtgttctgatttaagggcgcagtgcgtggtacacaggaagtccttgacaaatgtttattaaattgaattaagttaaccaaccc

SEQ ID NO: 4329 - DNA, 570 bp, Homo sapiens
  source 1..570: mol_type = unassigned DNA
aattctctctcgaacctgccatcgtcccgggcttcagaatccactgggcttggttcatcatggtttaaggtgaaattcggggcgaaggaggcaggacaggtggaatccgcaggctggaggctcccaggggaggcaaacgcctggccctgccctgccccacgccgcaccatgaccctcctgctgctgccccttctgctggcctctctgctcgcgtcctgctcctgtaacaaagccaacaagcacaagccatggattgaggcagagtaccagggcatcgtcatggagaatgacaacacggtcctactgaatccaccactctttgccttggacaaggatgccccgctgcgctatgcaggtgagatctgcggcttccggctccatgggtctggggtgccctttgaggctgtgatccttgacaaggcgacaggagaggggctgatccgggccaaggagcctgtggactgcgaggcccagaaggaacacaccttcaccatccaggcctatgactgtggcgagggccccgacggggccaacaccaagaagtcccacaaggccactgtgcatgtgcgg

SEQ ID NO: 4330 - DNA, 4185 bp, Homo sapiens
  source 1..4185: mol_type = unassigned DNA
agttcctcggctcccccaaaattgcagccaggggaaggagccttgaaactctccagccccgacgccccagtctcattggctccctcccccgctgcagcacctggtccccccccctcccagtcacctgattggccggcggccccatcaatcgttgcccggctgtgctgacgtcatcctgcagtagcggggttggggtgggagtgagagagtgaggacgctgggctgggggaaacgggaagccgctgcaagtccaccgcctcagctacccagattgggatctgcccaggcccgctttatggactagtgtgggcggcaggctcctttccgtccctgccctgctgtaccccgctccttggagaccccctgtatccctcccgcaaggtggaatccgcaggctggaggctcccaggggaggcaaacgcctggccctgccctgccccacgccgcaccatgaccctcctgctgctgccccttctgctggcctctctgctcgcgtcctgctcctgtaacaaagccaacaagcacaagccatggattgaggcagagtaccagggcatcgtcatggagaatgacaacacggtcctactgaatccaccactctttgccttggacaaggatgccccgctgcgctatgcaggtgagatctgcggcttccggctccatgggtctggggtgccctttgaggctgtgatccttgacaaggcgacaggagaggggctgatccgggccaaggagcctgtggactgcgaggcccagaaggaacacaccttcaccatccaggcctatgactgtggcgagggccccgacggggccaacaccaagaagtcccacaaggccactgtgcatgtgcgggtcaacgatgtgaacgagtttgccccagtgtttgtggaacggctgtatcgtgcggctgtgacagaggggaagctgtacgatcgcatcctgcgggtggaagccattgacggtgactgctccccccagtacagccagatctgctactatgagattctcacacccaacacccctttcctcattgacaatgacgggaacattgagaacacagagaagctgcagtacagtggtgagaggctctataagtttacagtgacagcttatgactgtgggaagaagcgggcagcagatgatgctgaggtggagattcaggtgaagcccacctgtaaacccagctggcaaggctggaacaaaaggatcgaatatgcaccaggtgctgggagcttggctttgttccctggtatccgcctggagacctgtgatgaaccactctggaacattcaggccaccatagagctgcagaccagccatgtggccaagggctgtgaccgtgacaactactcagagcgggcgctgcggaaactctgtggtgctgccactggggaggtggatctgttgcccatgcctggccccaatgccaactggacagcaggactctcggtgcactacagccaggacagcagcctgatctactggttcaatggcacccaggctgtgcaggtgcccctgggtggccccagtgggctgggctctgggccccaggacagcctcagtgaccacttcaccctgtccttctggatgaagcatggcgtaactcccaacaagggcaagaaggaagaggaaaccatcgtatgtaacactgtccagaatgaggacggcttctctcactactcgctgactgtccacggctgtaggattgccttcctctactggcccctgcttgagagtgcccgcccagtcaagttcctctggaagctggagcaggtctgtgatgatgagtggcaccactacgctctgaacctcgagttccccacagtcacactctataccgacggcatctccttcgaccctgccctcatccatgacaatggcctcatccacccaccccgaagggagcctgctctcatgattggggcctgctggactgaggagaagaacaaagagaaggaaaagggagacaacagtacagacaccacccaaggagaccctttgtcgatccaccactacttccatggctacctggctggtttcagcgtgcgctcaggtcgcctggagagccgcgaggtcatcgagtgcctctatgcatgtcgggaggggctggactatagggatttcgagagcctgggcaaaggcatgaaggtccacgtgaacccctcacagtccctgctcaccctggagggggatgatgtggagaccttcaaccatgccctgcagcatgtggcttacatgaacactctgcgctttgccacgcccggcgtcaggcccctgcgcctcaccactgctgtcaagtgcttcagcgaagagtcctgcgtctccatccctgaagtggagggctacgtggtcgtccttcagcctgacgccccccagatcctgctgagtggcactgctcattttgcccgcccagctgtggactttgagggaaccaacggcgtccctttgttccctgatcttcaaatcacctgctccatttctcaccaggtggaggccaaaaaggatgagagttggcagggcacagtgacagacacacgcatgtcggatgagattgtgcacaacctggatggctgtgaaatttctctggtgggggatgacctggatcccgagcgggaaagcctgctcctggacacaacctctctgcagcagcgggggctggagctcaccaacacatctgcctacctcactattgctggggtggagagcatcactgtgtatgaagagatcctgaggcaggctcgttatcggctgcgacacggagctgccctctacaccaggaagttccggctttcctgctcggaaatgaatggccgttactccagcaatgaattcatcgtggaggtcaatgtcctgcacagcatgaaccgggttgcccaccccagccacgtgctcagctcccagcagttcctgcaccgtggtcaccagcccccgcctgagatggctggacacagcctagccagctcccacagaaactccatgatacccagcgccgcaaccctcatcattgtggtgtgcgtgggcttcctggtgctcatggtcgtcctgggcctggtgcgcatccattcccttcaccgccgcgtctcaggggccggcgggcctccaggggcctccagtgaccccaaggacccagacctcttctgggatgactcagctctcaccatcattgtgaaccccatggagtcctaccagaatcggcagtcctgtgtgacgggggctgttgggggccagcaggaggatgaggacagcagtgactcggaggtggccgattcccccagcagcgacgagagacgcatcatcgagacccccccacaccgctactaaggcctacacctctccccacgcagagggggaattctgccctggtgaaacagacactccagacatgggagaaggactttctgggaacacagagaccaagagggagagaggcttcagaaccagtcctcctttcatttcaaaaccccagcgggccctctggagtccgccctgcccctcccccggccccccatccctcacttctgggctgtcatgctcctggtgtgccccttgcactggggctggctgggttggaaagtgggctggacttcagctgcctttctacccccaatggcagctgcccccttagcactcactgtgttggggagagggtgacgattgcaatggctggggctggggctgggggtgggattgaaggaaaccctctcctctccccttcccttctctctcctgtccatgggaagcttttccccctctgcagggctccctcagctggaccatcgtccctgcttctcttatgatcgccccacctcatttccatttcagtctggggaccccatttctccctcctttccaacttccttcctttcttgtcctgtttcccttcctgcccttgcagtcctgaggtcctgcagccccggcccctcctccgtgacctggtgtggccaggctgcggggacgggaggggacgtgggggccccgggtgtacatatataatgtatattttttcaatgttgtcgtgagtgcagcccatgttcctgcgtgcagctcacggccttgtgtgtatgtgtgtgtgtgtgtgtgtgtgaggcatcgtcatgtcctggggcaggggcggggggttgggtgtggtgagggaggggacatatcctagggttttcaaataaaacaatcagaaaaaaaaaaaaa

SEQ ID NO: 4331 - DNA, 671 bp, Homo sapiens
  source 1..671: mol_type = unassigned DNA
aaacgggaagccgctgcaagtccaccgcctcagctacccagattgggatctgcccaggcctatgactgtggcgagggccccgacggggccaacaccaagaagtcccacaaggccactgtgcatgtgcgggtcaacgatgtgaacgagtttgccccagtgtttgtggaacggctgtatcgtgcggctgtgacagaggggaagctgtacgatcgcatcctgcgggtggaagccattgacggtgactgctccccccagtacagccagatctgctactatgagattctcacacccaacacccctttcctcattgacaatgacgggaacattgagaacacagagaagctgcagtacagtggtgagaggctctataagtttacagtgacagcttatgactgtgggaagaagcgggcagcagatgatgctgaggtggagattcaggtgaagcccacctgtaaacccagctggcaaggctggaacaaaaggatcgaatatgcaccaggtgctgggagcttggctttgttccctggtatccgcctggagacctgtgatgaaccactctggaacattcaggccaccatagagctgcagaccagccatgtggccaagggctgtgaccgtgacaactactcagagcgggcgctgcggaaactctgtggtgctgccactgggga

SEQ ID NO: 4332 - DNA, 533 bp, Homo sapiens
  source 1..533: mol_type = unassigned DNA
gcagcgccgtgcggggtgggggtgggaaggaggtgtcgaggctccctggcacctgacagccaacaagcacaagccatggattgaggcagagtaccagggcatcgtcatggagaatgacaacacggtcctactgaatccaccactctttgccttggacaaggatgccccgctgcgctatgcaggtgagatctgcggcttccggctccatgggtctggggtgccctttgaggctgtgatccttgacaaggcgacaggagaggggctgatccgggccaaggagcctgtggactgcgaggcccagaaggaacacaccttcaccatccaggcctatgactgtggcgagggccccgacggggccaacaccaagaagtcccacaaggccactgtgcatgtgcgggtcaacgatgtgaacgagtttgccccagtgtttgtggaacggctgtatcgtgcggctgtgacagaggggaagctgtacgatcgcatcctgcgggtggaagccattgacggtgactgctccccccagtacagccaga

SEQ ID NO: 4333 - DNA, 533 bp, Homo sapiens
  source 1..533: mol_type = unassigned DNA
actggcgcatgctaagggtgtgtggcagatccatctgcttcgcctccatcccatcctggggagaaagtatttgctgcagttcagcaattcggagcacccaacaagcacaagccatggattgaggcagagtaccagggcatcgtcatggagaatgacaacacggtcctactgaatccaccactctttgccttggacaaggatgccccgctgcgctatgcaggtgagatctgcggcttccggctccatgggtctggggtgccctttgaggctgtgatccttgacaaggcgacaggagaggggctgatccgggccaaggagcctgtggactgcgaggcccagaaggaacacaccttcaccatccaggcctatgactgtggcgagggccccgacggggccaacaccaagaagtcccacaaggccactgtgcatgtgcgggtcaacgatgtgaacgagtttgccccagtgtttgtggaacggctgtatcgtgcggctgtgacagaggggaagctgtacgatcgcatcctgcgggtgga

SEQ ID NO: 4334 - DNA, 547 bp, Homo sapiens
  source 1..547: mol_type = unassigned DNA
aggacgggagggagggcttgcgggcagagggctcagccaacaagcacaagccatggattgaggcagagtaccagggcatcgtcatggagaatgacaacacggtcctactgaatccaccactctttgccttggacaaggatgccccgctgcgctatgcaggtgagatctgcggcttccggctccatgggtctggggtgccctttgaggctgtgatccttgacaaggcgacaggagaggggctgatccgggccaaggagcctgtggactgcgaggcccagaaggaacacaccttcaccatccaggcctatgactgtggcgagggccccgacggggccaacaccaagaagtcccacaaggccactgtgcatgtgcgggtcaacgatgtgaacgagtttgccccagtgtttgtggaacggctgtatcgtgcggctgtgacagaggggaagctgtacgatcgcatcctgcgggtggaagccattgacggtgactgctccccccagtacagccagatctgctactatgagattctcacacccaacaccccttt

SEQ ID NO: 4335 - DNA, 570 bp, Homo sapiens
  source 1..570: mol_type = unassigned DNA
accatcttgtggctttctcctcagcattcaggaaggggttatggtggtcatcaccaacaagcacaagccatggattgaggcagagtaccagggcatcgtcatggagaatgacaacacggtcctactgaatccaccactctttgccttggacaaggatgccccgctgcgctatgcaggtgagatctgcggcttccggctccatgggtctggggtgccctttgaggctgtgatccttgacaaggcgacaggagaggggctgatccgggccaaggagcctgtggactgcgaggcccagaaggaacacaccttcaccatccaggcctatgactgtggcgagggccccgacggggccaacaccaagaagtcccacaaggccactgtgcatgtgcgggtcaacgatgtgaacgagtttgccccagtgtttgtggaacggctgtatcgtgcggctgtgacagaggggaagctgtacgatcgcatcctgcgggtggaagccattgacggtgactgctccccccagtacagccagatctgctactatgagattctcacacccaacacccctttcctcat

SEQ ID NO: 4336 - DNA, 4296 bp, Homo sapiens
  source 1..4296: mol_type = unassigned DNA
gcattgattcctctgctccattcctgcccctctctgccccctccctctgtcctatatatcttcacttctctcctttctccccatcctgtgttctgggagagtggcctcaagttggggcttggctgggagaagtgcagagtgaagggatcaggactgaaatgagttgggaggaggataagcaatcaggatctcaggaaacttctagatctttttctagtttcaattctgcccttaatctatcccttccctttcccagggccttctcacagcccaccactgctccctgaagttccctgtctccattctctagcacgtgaaatcgctaaagaacattctccacttcctgaccatggttcccatggagatagtgatcccctcctcttcacccccagggcaggttgtttccatgggaactgtctaccctgctataggagaaggctatgacctcccgcagaccctctgactcctttagtagctgatttcttgtcctcaaccacccgcctcctgtaaggtgctcctatagggggtggaaaaggtgatggtgctggggtgtgagttgtctgggtcaacaagggttgttgtgggagtagaggccctgctcacaggtgcttcctctcctctccctggggtggggccagccaacaagcacaagccatggattgaggcagagtaccagggcatcgtcatggagaatgacaacacggtcctactgaatccaccactctttgccttggacaaggatgccccgctgcgctatgcaggtgagatctgcggcttccggctccatgggtctggggtgccctttgaggctgtgatccttgacaaggcgacaggagaggggctgatccgggccaaggagcctgtggactgcgaggcccagaaggaacacaccttcaccatccaggcctatgactgtggcgagggccccgacggggccaacaccaagaagtcccacaaggccactgtgcatgtgcgggtcaacgatgtgaacgagtttgccccagtgtttgtggaacggctgtatcgtgcggctgtgacagaggggaagctgtacgatcgcatcctgcgggtggaagccattgacggtgactgctccccccagtacagccagatctgctactatgagattctcacacccaacacccctttcctcattgacaatgacgggaacattgagaacacagagaagctgcagtacagtggtgagaggctctataagtttacagtgacagcttatgactgtgggaagaagcgggcagcagatgatgctgaggtggagattcaggtgaagcccacctgtaaacccagctggcaaggctggaacaaaaggatcgaatatgcaccaggtgctgggagcttggctttgttccctggtatccgcctggagacctgtgatgaaccactctggaacattcaggccaccatagagctgcagaccagccatgtggccaagggctgtgaccgtgacaactactcagagcgggcgctgcggaaactctgtggtgctgccactggggaggtggatctgttgcccatgcctggccccaatgccaactggacagcaggactctcggtgcactacagccaggacagcagcctgatctactggttcaatggcacccaggctgtgcaggtgcccctgggtggccccagtgggctgggctctgggccccaggacagcctcagtgaccacttcaccctgtccttctggatgaagcatggcgtaactcccaacaagggcaagaaggaagaggaaaccatcgtatgtaacactgtccagaatgaggacggcttctctcactactcgctgactgtccacggctgtaggattgccttcctctactggcccctgcttgagagtgcccgcccagtcaagttcctctggaagctggagcaggtctgtgatgatgagtggcaccactacgctctgaacctcgagttccccacagtcacactctataccgacggcatctccttcgaccctgccctcatccatgacaatggcctcatccacccaccccgaagggagcctgctctcatgattggggcctgctggactgaggagaagaacaaagagaaggaaaagggagacaacagtacagacaccacccaaggagaccctttgtcgatccaccactacttccatggctacctggctggtttcagcgtgcgctcaggtcgcctggagagccgcgaggtcatcgagtgcctctatgcatgtcgggaggggctggactatagggatttcgagagcctgggcaaaggcatgaaggtccacgtgaacccctcacagtccctgctcaccctggagggggatgatgtggagaccttcaaccatgccctgcagcatgtggcttacatgaacactctgcgctttgccacgcccggcgtcaggcccctgcgcctcaccactgctgtcaagtgcttcagcgaagagtcctgcgtctccatccctgaagtggagggctacgtggtcgtccttcagcctgacgccccccagatcctgctgagtggcactgctcattttgcccgcccagctgtggactttgagggaaccaacggcgtccctttgttccctgatcttcaaatcacctgctccatttctcaccaggtggaggccaaaaaggatgagagttggcagggcacagtgacagacacacgcatgtcggatgagattgtgcacaacctggatggctgtgaaatttctctggtgggggatgacctggatcccgagcgggaaagcctgctcctggacacaacctctctgcagcagcgggggctggagctcaccaacacatctgcctacctcactattgctggggtggagagcatcactgtgtatgaagagatcctgaggcaggctcgttatcggctgcgacacggagctgccctctacaccaggaagttccggctttcctgctcggaaatgaatggccgttactccagcaatgaattcatcgtggaggtcaatgtcctgcacagcatgaaccgggttgcccaccccagccacgtgctcagctcccagcagttcctgcaccgtggtcaccagcccccgcctgagatggctggacacagcctagccagctcccacagaaactccatgatacccagcgccgcaaccctcatcattgtggtgtgcgtgggcttcctggtgctcatggtcgtcctgggcctggtgcgcatccattcccttcaccgccgcgtctcaggggccggcgggcctccaggggcctccagtgaccccaaggacccagacctcttctgggatgactcagctctcaccatcattgtgaaccccatggagtcctaccagaatcggcagtcctgtgtgacgggggctgttgggggccagcaggaggatgaggacagcagtgactcggaggtggccgattcccccagcagcgacgagagacgcatcatcgagacccccccacaccgctactaaggcctacacctctccccacgcagagggggaattctgccctggtgaaacagacactccagacatgggagaaggactttctgggaacacagagaccaagagggagagaggcttcagaaccagtcctcctttcatttcaaaaccccagcgggccctctggagtccgccctgcccctcccccggccccccatccctcacttctgggctgtcatgctcctggtgtgccccttgcactggggctggctgggttggaaagtgggctggacttcagctgcctttctacccccaatggcagctgcccccttagcactcactgtgttggggagagggtgacgattgcaatggctggggctggggctgggggtgggattgaaggaaaccctctcctctccccttcccttctctctcctgtccatgggaagcttttccccctctgcagggctccctcagctggaccatcgtccctgcttctcttatgatcgccccacctcatttccatttcagtctggggaccccatttctccctcctttccaacttccttcctttcttgtcctgtttcccttcctgcccttgcagtcctgaggtcctgcagccccggcccctcctccgtgacctggtgtggccaggctgcggggacgggaggggacgtgggggccccgggtgtacatatataatgtatattttttcaatgttgtcgtgagtgcagcccatgttcctgcgtgcagctcacggccttgtgtgtatgtgtgtgtgtgtgtgtgtgtgaggcatcgtcatgtcctggggcaggggcggggggttgggtgtggtgagggaggggacatatcctagggttttcaaataaaacaatcag

SEQ ID NO: 4337 - DNA, 583 bp, Homo sapiens
  source 1..583: mol_type = unassigned DNA
atagggggtggaaaaggtgatggtgctggggtgtgagttgtctgggtcaacaagggttgttgtgggagtagaggccctgctcacaggtgcttcctctcctctccctggggtggggccagccaacaagcacaagccatggattgaggcagagtaccagggcatcgtcatggagaatgacaacacggtcctactgaatccaccactctttgccttggacaaggatgccccgctgcgctatgcaggtgagatctgcggcttccggctccatgggtctggggtgccctttgaggctgtgatccttgacaaggcgacaggagaggggctgatccgggccaaggagcctgtggactgcgaggcccagaaggaacacaccttcaccatccaggcctatgactgtggcgagggccccgacggggccaacaccaagaagtcccacaagtgaggaagtccttgtctcctgccccatgtgttgcagggtcctcctccctgctcccaagcccaccatcctctgtccgtgcggtcatcgaatatccacccccacccgctgctgttcctaggacttagggagccccatcccctgctg

SEQ ID NO: 4338 - DNA, 910 bp, Homo sapiens
  source 1..910: mol_type = unassigned DNA
ttgacggtgactgctccccccagtacagccagatctgctactatgagattctcacacccaacacccctttcctcattgacaatgacgggaacattgagaacacagagaagctgcagtacagtggtgagaggctctataagtttacagtgacagcttatgactgtgggaagaagcgggcagcagatgatgctgaggtggagattcaggtgaagcccacctgtaaacccagctggcaaggctggaacaaaaggatcgaatatgcaccaggtgctgggagcttggctttgttccctggtatccgcctggagacctgtgatgaaccactctggaacattcaggccaccatagagctgcagaccagccatgtggccaagggctgtgaccgtgacaactactcagagcgggcgctgcggaaactctgtggtgctgccactggggaggtggatctgttgcccatgcctggccccaatgccaactggacagcaggactctcggtgcactacagccaggacagcagcctgatctactggttcaatggcacccaggctgtgcaggtgcccctgggtggccccagtgggctgggctctgggccccaggacagcctcagtgaccacttcaccctgtccttctggatgaagcatggcgtaactcccaacaagggcaagaaggaagaggaaaccatcgtatgtaacactgtccagaatggtgagcctcccctccaggcactagccagagggggaaactggcttcttgtcccgcctctgtcactgcccagtgtgtgactgtgaacaggtcacttcccctctcttcatttgtgaggtgcaagtgccaggtgtgatatgccttgattctgtgctttatccccaacatgacatgttggatcgtactgctgtcagagtgcaatgggatt

SEQ ID NO: 4339 - DNA, 566 bp, Homo sapiens
  source 1..566: mol_type = unassigned DNA
attcaggccaccatagagctgcagaccagccatgtggccaagggctgtgaccgtgacaactactcagagcgggcgctgcggaaactctgtggtgctgccactggggaggtggatctgttgcccatgcctggccccaatgccaactggacagcaggactctcggtgcactacagccaggacagcagcctgatctactggttcaatggcacccaggctgtgcaggtgcccctgggtggccccagtgggctgggctctgggccccaggacagcctcagtgaccacttcaccctgtccttctggatgaagcatggcgtaactcccaacaagggcaagaaggaagaggaaaccatcgtatgtaacactgtccagaatgaggacggcttctctcactactcgctgactgtccacggctgtaggattgccttcctctactggcccctgcttgagagtgcccgcccagtcaagttcctctggaagctggagcaggctgaccacaaggaccagtgaggactaatttgagttttcacctccttctgtttctcttgcaagtcctggtggagtggctg

SEQ ID NO: 4340 - DNA, 546 bp, Homo sapiens
  source 1..546: mol_type = unassigned DNA
ttaaaatcctctcttgagccaacagttgcagcctcttcattatttattctccaggctgaccacaaggaccagtgaggactaatttgagttttcacctccttctgtttctcttgcaagtcctggtggagtggctgagtctgtgatgatgagtggcaccactacgctctgaacctcgagttccccacagtcacactctataccgacggcatctccttcgaccctgccctcatccatgacaatggcctcatccacccaccccgaagggagcctgctctcatgattggggcctgctggactgaggagaagaacaaagagaaggaaaagggagacaacagtacagacaccacccaaggagaccctttgtcgatccaccactacttccatggctacctggctggtttcagcgtgcgctcaggtcgcctggagagccgcgaggtcatcgagtgcctctatgcatgtcgggaggggctggactatagggatttcgagagcctgggcaaaggcatgaaggtccacgtgaacccctcacagtccctgctcaccctg

SEQ ID NO: 4341 - DNA, 568 bp, Homo sapiens
  source 1..568: mol_type = unassigned DNA
agctgtatctgtgtctggggcccaggtccacgtgaacccctcacagtccctgctcaccctggagggggatgatgtggagaccttcaaccatgccctgcagcatgtggcttacatgaacactctgcgctttgccacgcccggcgtcaggcccctgcgcctcaccactgctgtcaagtgcttcagcgaagagtcctgcgtctccatccctgaagtggagggctacgtggtcgtccttcagcctgacgccccccagatcctgctgagtggcactgctcattttgcccgcccagctgtggactttgagggaaccaacggcgtccctttgttccctgatcttcaaatcacctgctccatttctcaccaggtggaggccaaaaaggatgagagttggcagggcacagtgacagacacacgcatgtcggatgagattgtgcacaacctggatggctgtgaaatttctctggtgggggatgacctggatcccgagcgggaaagcctgctcctggacacaacctctctgcagcagcgggggctggagctcaccaacacatctgcctacctcactatt

SEQ ID NO: 4342 - DNA, 390 bp, Homo sapiens
  source 1..390: mol_type = unassigned DNA
gaggtgcttcctcatctccaggggtggagagcatcactgtgtatgaagagatcctgaggcaggctcgttatcggctgcgacacggagctgccctctacaccaggaagttccggctttcctgctcggaaatgaatggccgttactccagcaatgaattcatcgtggaggtcaatgtcctgcacagcatgaaccgggttgcccaccccagccacgtgctcagctcccagcagttcctgcaccgtggtcaccagcccccgcctgagatggctggacacagcctagccagctcccacagaaactccagtacgtaagcctggtggggctgggcagggaggggcaggtggcaggtgagtgtgttgggacaggtatcctccccctccacctctggga

SEQ ID NO: 4343 - DNA, 2288 bp, Homo sapiens
  source 1..2288: mol_type = unassigned DNA
agctgagtgtgctggctgctggggagaggggcgctgcagcagggtgtgggtgtgagtgtgaggagctcctgggccatgcgcttccctacgctctgctctgtctgttgacacatgagtctcaggctgtaggtaatttgcggacggggctggaatgcgatgtgtgtatttttctaggggcttgcttgtgtgactgctggtctctgtgtgtgtttggggcacacatacatggaatagtccctcagcaacgggaccgcccagggaggagctgctgtgtatgcatggtgggcaggggtgtgcacccatgtggggagtagtgacccagctgcccgtaagggccctgggcctggaggtgcgtgtgtggggtctctgcctccacctgctgtccctggggctgcgggctttcctgcttttcttccttgtgcttcttcgagagctgtgtgtgtgtgtgcaggaggcaggcagggctgtgctcatggcggctcgctctgtggccctcacggcccacgtctgtagtgtctatgtcttccttcagggggttgcctggtctgcccagctggtggggagctgggtgatgctgcacatatggctctaccgtgccttgctggagacccccagacgcgttcctttactcccgcagtgtgagcaggcggccaggtggctggtgtgggccagcatgcaggctggcaaaggcctggctcgggtgtggggcgtggcaacctttgtgcagctgtgtgcccacacggtcttcctgagcatgtacctgtgcatgcacatctgctttgccgccatcagctctaaggtccgtgtgagagtgaacgcaccgttctgtgtctcagtgcccttgaaggtccatgcccctctgagcctgggcatcaaagtggggctgcagggccagaagcatgggagagccacgggggaggcaggtatgcctcagggggagatgttggggaagcaggaaccccagacgtcccggagccccaagcccaccaggagaagggaggtgtcacggagtgagctcagtccagtgatacccagcgccgcaaccctcatcattgtggtgtgcgtgggcttcctggtgctcatggtcgtcctgggcctggtgcgcatccattcccttcaccgccgcgtctcaggggccggcgggcctccaggggcctccagtgaccccaaggacccagacctcttctgggatgactcagctctcaccatcattgtgaaccccatggaggtgagaggcctggggaagcggggttctgtagggtcaagactgtggagcacacacgtcctaccagaatcggcagtcctgtgtgacgggggctgttgggggccagcaggaggatgaggacagcagtgactcggaggtggccgattcccccagcagcgacgagagacgcatcatcgagacccccccacaccgctactaaggcctacacctctccccacgcagagggggaattctgccctggtgaaacagacactccagacatgggagaaggactttctgggaacacagagaccaagagggagagaggcttcagaaccagtcctcctttcatttcaaaaccccagcgggccctctggagtccgccctgcccctcccccggccccccatccctcacttctgggctgtcatgctcctggtgtgccccttgcactggggctggctgggttggaaagtgggctggacttcagctgcctttctacccccaatggcagctgcccccttagcactcactgtgttggggagagggtgacgattgcaatggctggggctggggctgggggtgggattgaaggaaaccctctcctctccccttcccttctctctcctgtccatgggaagcttttccccctctgcagggctccctcagctggaccatcgtccctgcttctcttatgatcgccccacctcatttccatttcagtctggggaccccatttctccctcctttccaacttccttcctttcttgtcctgtttcccttcctgcccttgcagtcctgaggtcctgcagccccggcccctcctccgtgacctggtgtggccaggctgcggggacgggaggggacgtgggggccccgggtgtacatatataatgtatattttttcaatgttgtcgtgagtgcagcccatgttcctgcgtgcagctcacggccttgtgtgtatgtgtgtgtgtgtgtgtgtgtgaggcatcgtcatgtcctggggcaggggcggggggttgggtgtggtgagggaggggacatatcctagggttttcaaataaaacaatcagaaaaaaaaaaaaa

SEQ ID NO: 4344 - DNA, 787 bp, Homo sapiens
  source 1..787: mol_type = unassigned DNA
tgagagtgaacgcaccgttctgtgtctcagtgcccttgaaggtccatgcccctctgagcctgggcatcaaagtggggctgcagggccagaagcatgggagagccacgggggaggcaggtatgcctcagggggagatgttggggaagcaggaaccccagacgtcccggagccccaagcccaccaggagaagggaggtgtcacggagtgagctcagtccagtgatacccagcgccgcaaccctcatcattgtggtgtgcgtgggcttcctggtgctcatggtcgtcctgggcctggtgcgcatccattcccttcaccgccgcgtctcaggggccggcgggcctccaggggcctccagtgaccccaaggacccagacctcttctgggatgactcagctctcaccatcattgtgaaccccatggagtcctaccagaatcggcagtcctgtgtgacgggggctgttgggggccagcaggaggatgaggacagcagtgactcggaggtggccgattcccccagcagcgacgagagacgcatcatcgagacccccccacaccgctactaaggcctacacctctccccacgcagagggggaattctgccctggtgaaacagacactccagacatgggagaaggactttctgggaacacagagaccaagagggagagaggcttcagaaccagtcctcctttcatttcaaaaccccagcgggccctctggagtccgccctgcccctcccccggccccccatccctcacttctgggctgtcatgctcctggtgtgccc

SEQ ID NO: 4345 - DNA, 11485 bp, Homo sapiens
  source 1..11485: mol_type = unassigned DNA
acaaagggcgaagagaggggcgtggggaggctggaaagcatggttgccccgcctggcccggcgacgcccgctcagcagcctgctgaggagtggggacgaagagcagcctaaacttagggctcgggatatttcgatgccacccaaattgccgtcctaccccaacgaggcagggaaaggagcggagcgcgcgcgcgagctgagtgagtgcttacgtcgcagcgagatctgtgctgggataattagagaggagttgggctgagccgagtcctctttcagcagcagcagccggagccgccgccgcagcccggtggggcaaccctgactcggaccgctcgggagagccccaggagaggccagcgccgcgcagcagccgccccgctgcgcccacctccccggctgctcccggagggctcacaaaggcggtggccgcccgagtggccttctccatccaggcgttcgcgtcctcctccccaccttctctcccgaaggcgaaaatggcagggccaggcgagaacctgggacagcggtggccctagccctgcgatcctcacccctcctgctaggagaggctgcgggctgcccgcggacgatgtggccgcggctgctcccgagcgcatcttcggcccgggtccccgccgccacccctcttctctgctccttccatcccgcccagaggagttgatgccgctgtcgccgccgccgccgctgctgaagccgcggctgatggatgccagggagtgccgcattgcttagcgaccccgcctctgggtttgctgatgatctctctccgccctggagctcagcgctgaagagctaccttattattaatcagaatttccatcgccacccctggcaggcgtatccttcagcagggaccgcaggaacattcacagtgcaggggctgagatgtgcgtgggggttgtttttgttacatcttggaagagaagagaagaggacagtaccaagatcagaaacacccgtgctaggtggaattaggggtgatttgttaggaaagagaaaggacaagaagaggagtgcggagcccttcaggggttcacatctctttaaaggaaaggaaagagggagccaaagtagggtgttgtattttagggggcagaggaagaagtttacaccccccggcccccccagctttgctgggggaaagcaggagcaacagggcacttgattggacaccaagattattaatttcctgtaggggagaggaagcaggcagcaggaggtctgggggctggagtctggtggtggcaaggaccaggtttgctttgggacagtcaacaaggtcttctgagggaaagctcagagataggcagaacaatgactcatttgcaagccggtctctcccctgagaccctggagaaagctcgcctggagctcaatgaaaacccagacacgctgcaccaggacatccaggaggtgagggatatggtcatcaccaggccggacattggctttctgcgcacggatgatgccttcatcttacgcttcttgcgggctaggaagtttcatcactttgaggccttccgcctcctggcgcagtactttgagtaccggcagcagaacctggacatgttcaaaagctttaaggccaccgaccctggcatcaagcaggcactgaaggatggcttccctgggggcctggccaatctggaccactatggcaggaagattctagtcctttttgctgccaattgggatcagagcaggtacacactggtggatattttgcgtgccatcttactttctttagaagccatgattgaagatcctgagcttcaagtgaatgggtttgttttgatcatagactggagtaacttcactttcaagcaagcctctaaactcacaccaagtatgctgcgattagctattgaaggcctgcaggatagtttcccagcgcgatttggaggaattcattttgtcaatcaaccatggtatatccatgccctgtacaccgtgatccggcctttcctgaaggagaaaactcggaaaaggatatttttgcatggtaacaacctgaacagtctacaccaactaattcatcctgagatcctgccctctgagtttggaggaatgctgcctccttatgacatggggacatgggcaagaacactgctagaccatgaatatgacgatgacagcgagtacaatgtagactcctacagcatgcctgtgaaggaagtagagaaggaactctccccaaagtccatgaagagatctcaatcagtagtggatcctacagtactaaaacgcatggataaaaatgaggaagaaaacatgcaaccattgctttctctggactaataacttctctacatccccttcatggattagaaatggaaagtattggttttcagcaacagggacaacactgtagaggaattaccagctggaaaccgacttattcatgttaatgtagcataatatataacaaggcatcaggctttccttggcctgaaccatgggggccctgggctggatttttaaaatgtcaataatttattctgtaagtgccaagttgtttgtaaatataatgtaatcttcatgtcaagtttgtaaatttcagtagtaactcagtttggaaaaaggttggctcaaaagtccatgccagtgttatgaactataacaaaaagcagaaaagacacagtcaaagctaattaaatgtagccctctttcctatgaagccatatttcagctctcatagtgattgtttcattgtttttctctgaaactctgtcagtattcaaacatactcttaacgggcacacacaactaagtgattccaggaaattttatgattaatgtatttcctgtctagtgattttcatttcagagaaatgtgtcttagtaactatcattggccttgcattttggaggcaaggaatggcagatgagctggtaaactgaacacttgaactcttctatgttgtttaattcttggaatcttgtgaaaagatgtgtttcctcaattaagacgtagaaatgtaaaaaagagtggattctttttaaattgctgtcttcacaatgtgccctttattcaagaccctattatatttcttcctaatgtactctaagtacatttcccctccaaaactctttgactaagagaatgagaactcatgtgaacagtgttctgacagctaattttgaacataaaattttccacttacagatgaggggctaatttctaattgttgtgcactggttaaaaagtatatatatatatatattcacacatatatatttttactgagctctaataaatccttaatgtgacaggcttataaaataaatcatagatattcaatgatcttatggataattacatgagataactctggaaaactacttccactgaagttaatgaaaaggagaaatagtgaaactgactttcagtgtacctatttaaaggaattccaagttaatttataatgcaatcttacatatgtgccatcttatttgaactatatttttccttcaaagaagcaataggtctcaacatagtgtaggtagcatcaggtgacagaaagccaattttattttcaaatttaagttaattatcttcgtgatcctatttatccacaatttctttcagaaaagactgaaaaaacacattatattcaggagatataatgaaattattggaaggcatctatgacaacatgtaatcatttatacgtggatttagaaatttgcatatttaacattttatttcataaaatttatacaattacagcaaatcttaattttttaattttaaatttcaatgtgaaaaaatgatttttatcacccataataaattttgagattgagagtttaccattaaagtattcttttggaagaaaaatatctcagaaactcttggaaaccaacaaaaataaaggcatgtgtcagccttcatattttttggccaaaagctcccaaaatttgttataattctgcagccaaaaattgtaaaagcaagctgaatacaccaatgtacagtgtatcaatggactgcctcatgtgtgtaaaaatacattaattaacacaaatgaaagataccttaataatgccaacctccagtcaagtgcagaagaataatgactgtcaggcactctgctctccttgtgacttttacagagattggaatgcactggggacaacatgtctcagcagttcttacctttataagaattctaaccattgatattcttacattcttgcctacctgacatacattttgtagccatgggctttttagactatataaatcttaggcagtataatccattggaataaaatagaaacattgtaagtgcagagggcagtcaacttttcattctcatgagtttctcttgatgtgtaccatttattgccagttttcagaattctgccagtttcagatgtcaaccagcattggcagcttctttcccctatcgtaaagttagtgtcatatataaaaataactagaaaggcatattttatatgtatgcctatctaattataagtatcattcacactgtctcccagacccacatttggaaagtttgcattgcattactgctcatctttagatgagcaattgagagttggctagattgtgtaaaatattttaaaatgaatgaacaaattacaatgatgatgccttttgaaattaccatatctagttcattctgtgaataaactcattttctagtaatgtttgtgaaccttagtcaagggatattcattcaactttataaatttacccctcagcaccagctatctagcactgtttaggaatttttcccttcatgatattctgtgtcacatcctatgtctatgaataacctatacactatagttgtatgcctataagcactcctatactcttgtattttaattgcaatagtatacctccactctctctctctctctcatacacacacacacacacactcttacacacacactaacacactagactgtttgccctaatgaattttcctctgtacttcgagagctattttagttgtcttgtcacttgaaatttgcgggcttcaaagaattatcgcatttgacttggaatggtccagtagtccatttacttctttcaccctgcctgttccatcttctatttctgatattttttctttcttccagttatttcaggggcaggtgattccaaagctggtttaaaaataaataacttctcttatgttgtcagtgatgtttgcctgcatttttgactactatttaagagggaagagattatcatgaaaatatactctaagaaatatgaagaagtgcctctttgaaaatggaataaagcaacgttactggcatatggattttatttgtactctcttccaaaaagtaaatacgtaaatctatattatataggtgaaatatagatatcatttgaagaaggatatttaaggcctttatttgaacatactcatacagtattaagtctctgttgtgtaagttaaatacagtaactttagtacatgttaatgataaacgtggcactaggctaaaacgatatacgagtattaaacagagttttgcaagcaagtttttgaagtgggcatgcatgaattctttcatttcagtaatggtttgcataagtgtagacagagatatttcctaagttttttcatatagaatacttatttactttatagtaccaaaaattcatacattcataagcaggaaagccaaaaattcatacattaatacttagcttttttaatactgttaactaggtcatattgttaaacatgtgaagcgtctgtaatattcctgagggaaaagaggtccctctattgcatcaagaaattggagagttgttttagacattggggaatatgtttatgactcttcacataaagaaaccttcagagccatggagtatgtcttcagggacagggatcatttgcttctacaatgtaaaggtttatggacatatctctggtcctttaaagaagttacattaagaaagcttgctgagaggctgtacactcttctgttgttttatttaaaggtctgccttgtgtggttggtgaataatatctcagcttctttttttgtgtatatttattaatgattacatgaaaagttgccatcagccatgaggacacttcaaaaattttcaacacactaaataaaatgagcagagctctagcatgatatttgaactttcagatatggtatatgtacattttttacaacaataagctcataggcatatattccattgtagatctgctatataaatacatagcctgaaacatagtaatgcatttgaaatttgtgaggtcactgatcatacaagaagaggcagattataaaccaacatattggaacaaaagaagattggttaaatatgcaaggtgtgtaattatcttcagtaatgaaaaggatttgttttcttgtttttgtctttggttttagttgaaaaaatagcttcccatatgctactggaactatttgacattatttgctacatgaaaaaaggcaaataagtaaacatacaaaagaagcttggctttgtaacattattatattatgatctcaatggcttagagaatataatcttttttaagaattaaagattttattttataaatatttggaggttaacataggacatgaaaatagtgctgtggattctgttatgtactaactatgggaatgaattctccagtaccataggaaaatatataagataacaactttgtggattgaaacactcaaattagcctttttttcaaggaagcaggtgtacaaatgatgctattgaaataaaaaaatgtagaaatcacttaattataggagttaaatataatcaatgcactcatggtaaataatggaaattgttaaaatttagaagagttttgtcattatttgacttagatttaagtctcagtgcaaatatgtctgtccttgatatagtgcatttattctgtaagacttattttacctggtgaacgagatggacttaggtgaaaataaattttaaccacagttttaagggtcacccaatcctcaactactttaaaaaattgcaatgaattttaattcatttacttttaacagagatacaaagcactgtcttgtttctaatccaatttttcaatttttcagattttatatttgcttaaacaataaataaaactcagaaaaccaaatagtttttgttttcaaagctatccaggaaaaataaaagatgtctaacaggaaatcatacaagtccttgaagaatactgagtatattatttgctattttactcaaatgttattaatttttactactacaaactacttatttagtactacacggcatttactatttggccttttgaaggagttataaattccaaaacactataatataatttttggacaagtatacatttctgtttaaaagaaatgtatgcttttattttgtatattttatattttaaatgtatacatttattttgcacattgttaatgttaaatttggtagtcctggatctgctgcatctataaaatggagatttctttaaaaaatcgtctaaaaattagcaatatttttattttgagagaaattgtgcttagctatttaagttaagattcctcaagtttgtgatatttgtatgtgtggggatcaaagaggaaaatatatagtaatttgtttcatcaaaatgacgtattcaatattctataacttctagtcaaactttcaaatgaaagtttgaaagaagtaaactaatgttttaattacatatagcaaaggaatgatcagtaaataaaataactagggttttcacatttgcaatagaatgactggattaggcaagagattaaatttagaaatttgaattacagaaaagcattggtttaaataaatcctcaaaaaagtaatcccaggtcaaaatatgatgtgaaattaaaaaaaaaattcagcctgatttgagaaagaatgcttactcaataaatatgtatttgtgtcttctgtgagtttccctcatttatcctatctgtggatgaaaagtcatctaataaggtataagagactcaattacatttacctagaaccatctacaagtagacttcatgaatttctttggctcaaactcagaggattttctttacacaggattcttgaggttatcaagaatcgttattgctgctccctcctaaaggcaggccaggagaagccacatttccagcagtagtatcctcagtgggaatgaaccagaaaacaaagaaaaagccagagatattgtctccactctcgttacaaaaaagtgcgttccttcttcaggaggatcgagtagaaaatattttctactcgaagaggccatggggaagtgatggtcaaatctctgttgtgaagcaagtttccacacagaaacatcatcaaaaacacgtacctctgagcatcacttctttctctaaaaataaaaataaatatgctgttttcctcccttttttctaattggcatcataaaagtataagaagccacaaatgcattgttgccacttaagaaaaaaatcctatgttatacatatatgaacataattcacttagttgcatatgattgaaatatttgcatgctggtttataaattattacctaaaagttttatgaaatataattattaagttttagtgctagaaaaattgttgttttttgtgttttgtattcatagggaagactagtaatatcccttactcctcattcatatagctaacaattttaattggatggctaatggatatggcggatttaacatttacaaaaccaaactactttcactctgaccctgcttcccctttagccttctcatctcactatgtgtcgaccccaatcttccagtttctaggaataaaaattttggagtcatcctctctttccttcctctttttctttcaaaactacatcacatcagctagctcatgctgttgggtcttcaaaatatatccacactctaaccacttctccaatcttcttcactgtattggaccaagtcttcaacattttccatctggaatattttaataatctaaaaactagtcttcttgcttccagagtcaattttcaacacattagcaagagtgagtctcttaaaatgtaactcagaccattttgttctccaaaccctctgaaagagtaaaagccgatgtctttatatcagtgtatgagaagtcttgatatgaaggcagtaagcaccagtacagcaacatagcatggtttctgattgggctggcatttttgctggtactatgaaaaaatagttgttaaatactttaatttcttgcttctgaagttctctaccccgttcttgccttttcttagataatctcttaagaatctctcctttatttactgctgccaaactgtcatctttgctgttccaggaacttgctaagcatgcctctacctcaggactttcgcatttctgttccctttgcctctaatttcagatatccacgtggtttattccctcatcttcttcaggtatttgcttaaatgtcatcttctttgtgaggactctctttcctaattttagatgaaacagccctgtggttcttcatattctcctttcctgctgtatttcctctccatagcatttatcacctgatacaccatacagattatttatttactttgcatttccccccaatagcaatgtgaactccacaagggcaggaatttttgtctgtttactactgcattactggtgccttgtacagtccctggaacttaacaaatccaaaatgatttcatgaggatcctaatttgtttcagcaagttatgtaacggccaatagtatgaattgaaagagtttcttgttgtcttaatttaaaaaattttgttatttatcttcaaaggggaaattttaccctctcatgataatagaatcatgaatcaaaaatgatatcctcttctccccaattgtgatctctatccctgagcctaagttttacatcagtatttcagttttgtctttagaagttactcaacgatcactggaccctatatctatccacatggcttactcttggagagactacaagatagctcaggggaaaagtcattttgagattaaaactacatggaattgttctttatggattatcatggttaatttcaatttttaaaaatatgcaggaagttaaaagactataattccagtattggaagccagtttaagagaatatgactatgtagttacttttaatggaaaggggaagaagaggaagaaaaaggaaagacattgtgttcgtatcttctctgcaacaattataaaatgaatgaggaagtattttggtgtttctaaggtctttccatgatcttgaaatctatatattatagtcatttagtctgtgaaccattttaacaattgggtttcatgttacatatctttaaatttttatgttgaaaatttatagctgtgacacaagatgatagaaattgctcatgctcacatatattccaactggcttttcagcttgctcccttctcttttaatttcagctatcatttttagagccttacagtcacaattgttcttaactatcccaaatttttatttcctatttggactgacttctccataattttagtaactaaatgacctagatattggttcttgttgtgataggtttctgatttgtatcctttgcagtttaacttttaatccttaccaaacatatgttattccttttcttcagctacattgttgtgcctttcccaacactgtaataatttaagcctcctgttttataatcttctatcagaacatatattaagaagacactgaatttaaagaatcagcaggtgatgttgaagaagaaatataacctgaaatataagaatagatgtttgaaactgtttcagaagttaaccagtcttttagtggctttgtaatgggtaggggttttattcctctttgtgtgctatgtaggacattgttaaccaatatagattatgtttcttgtcagttacacaaggataggtaatcagggttaacagttcggaaaacattctctagagaagagactaatgattcttgctcacaaacaaggcagaatttccttatgtttcttaatatttgatccttgatagtctgtacagtggaaaccatttccctctgtgatatccttttttgccaacctatatgaatgtgtttagcgtcacttcagatatagagttcaagctcaagtatacacagcacatgaaagatcctatagttcatgttctcttaggttgaattttcttttcataattttttatgattgaattctaagggtatgttccttggtaaattgtgttaattatgtccactttataatggatttaacaattttacaaagcagatcattgtttattatattctgaaaaccattatattaatattttatttctttttttgcagagaaactattgtcttttttgatttctgaggatgaatgaagtactgttaaataaaatgtcactaaatgaaacttcaga

SEQ ID NO: 4346 - DNA, 1359 bp, Homo sapiens
  source 1..1359: mol_type = unassigned DNA
ggctgatggatgccagggagtgccgcattgcttagcgaccccgcctctgggtttgctggtacacactggtggatattttgcgtgccatcttactttctttagaagccatgattgaagatcctgagcttcaagtgaatgggtttgttttgatcatagactggagtaacttcactttcaagcaagcctctaaactcacaccaagtatgctgcgattagctattgaaggcctgcaggatagtttcccagcgcgatttggaggaattcattttgtcaatcaaccatggtatatccatgccctgtacaccgtgatccggcctttcctgaaggagaaaactcggaaaaggatatttttgcatggtaacaacctgaacagtctacaccaactaattcatcctgagatcctgccctctgagtttggaggaatgctgcctccttatgacatggggacatgggcaagaacactgctagaccatgaatatgacgatgacagcgagtacaatgtagactcctacagcatgcctgtgaaggaagtagagaaggaactctccccaaagtccatgaagagatctcaatcagtagtggatcctacagtactaaaacgcatggataaaaatgaggaagaaaacatgcaaccattgctttctctggactaataacttctctacatccccttcatggattagaaatggaaagtattggttttcagcaacagggacaacactgtagaggaattaccagctggaaaccgacttattcatgttaatgtagcataatatataacaaggcatcaggctttccttggcctgaaccatgggggccctgggctggatttttaaaatgtcaataatttattctgtaagtgccaagttgtttgtaaatataatgtaatcttcatgtcaagtttgtaaatttcagtagtaactcagtttggaaaaaggttggctcaaaagtccatgccagtgttatgaactataacaaaaagcagaaaagacacagtcaaagctaattaaatgtagccctctttcctatgaagccatatttcagctctcatagtgattgtttcattgtttttctctgaaactctgtcagtattcaaacatactcttaacgggcacacacaactaagtgattccaggaaattttatgattaatgtatttcctgtctagtgattttcatttcagagaaatgtgtcttagtaactatcattggccttgcattttggaggcaaggaatggcagatgagctggtaaactgaacacttgaactcttctatgttgtttaattcttggaatcttgtgaaaagatgtgtttcctcaattaagacgtagaaatgtaaaaaagagtggattctttttaaa

SEQ ID NO: 4347 - DNA, 947 bp, Homo sapiens
  source 1..947: mol_type = unassigned DNA
agacggtatctcctggatgccagtgagcggctgagagctgaagctccctggacactcaaggctcttgtggtgacagtctgacgtaaaggcgtgcagggaggcctagctctgtctcctggacttagagatttcagacacagaagtctgtccatggctccttgtcacatccgcaaataccaggagagcgaccgccagtgggttgtgggcttgctctcccgggggatggccgagcatgccccagccaccttccggcaattgctgaagctgcctcgaaccctcatactcttacttggggggcccctcgccctactcctggtctctggatcctggcttctagccctcgtgttcagcatcagcctcttccctgccctgtggttccttgccaaaaaaccctggacggagtatgtggacatgacattgtgcacagacatgtctgacattaccaaatcctacctgagtgagcgtggctcctgcttctgggtggctgagtctgaagagaaggtggtgggcatggtaggagctctgcctgttgatgatcccaccttgagggagaagcggttgcagctgtttcatctctttgtggacagtgagcaccgtcgtcaggggatagcaaaagccctggtcaggactgtcctccagtttgcccgggaccagggctacagtgaagttatcctggacaccggcaccatccagctctctgctatggccctctaccagagcatgggcttcaagaagacgggccagtccttcttctgtgtgtgggccaggctagtggctcttcatacagttcatttcatctaccacctcccttcttctaaggtagggagtctgtgatctctttctgtgtgtattggtcagaatagaatccattcagctgtagcagcaagcaatccccaacctttcactgcaatgacctttcaatgcaataaaagcttattgtccattca

SEQ ID NO: 4348 - DNA, 1200 bp, Homo sapiens
  source 1..1200: mol_type = unassigned DNA
gttagagaagggggacacaaatgtcttcaggcttaggtccctgggggctcccagtcctgcccctgttcctctactcacatcccagctcctcccagtttcttttcggacctcctcctctccccttccttctctattccaggctgggttgggctctaagcaaggggagggattagagcctccttcctctctgcccctccccatgggtctctagggggctggtgcaggcagcagcagaggcactctgggcagctgggtgagggcccatctgggcaaggcccccagcgcctgccttctctcccggggccctgtgggcaagcctcctgcttcactttcaggtttctcgaagtgccttcttgctcctgtctgtttccccatcctgccagatttctgtttctcttgctgggcttttggcagtagggggctgtgttggtgggccctacgaagatgctcagtgctcgagatcgccgggaccggcaccctgaggagggggtagttgcagagctccagggcttcgcggtggacaaggccttcctcacctcccacaagggcatcctgctggaaaccgagctggccctgaccctcatcatcttcatctgcttcacggcctccatctctgcctacatggccgcggcgctactggagttcttcatcacacttgccttcctcttcctctatgccacccagtactaccagcgcttcgaccgaattaactggccctgtctggacttcctgcgctgtgtcagtgccatcatcatcttcctggtggtctcctttgcagctgtgacctcccgggacggagctgccattgctgcttttgtttttggcatcatcctggtttccatctttgcctatgatgccttcaagatctaccggactgagatggcacccggggccagccagggggaccagcagtgactctggggctacctggctcctaggcccagccagccagagaggacagtggagcccagacacgtctccttgggattcactagcccccagcccgccaaaccccaccccagccctacacagcagtctggcctgagacgtcactggggacttatctgtggagcctggtgctccaggatgtggcttctcatgaagctctggccagaggaggggaacttattgggggagggggggtggaggggaggaatctggacctctaagtcattcccaaattaaaatattcaaattcta

SEQ ID NO: 4349 - DNA, 1173 bp, Homo sapiens
  source 1..1173: mol_type = unassigned DNA
cagcagaggcactctgggcagctgggtgagggcccatctgggcaaggcccccagcgcctgccttctctcccggggccctgtgggcaagcctcctgcttcactttcaggtttctcgaagtgccttcttgctcctgtctgtttccccatcctgccagatttctgtttctcttgctgggcttttggcagtagggggctgtgttggtgggccctacgaagatgctcagtgctcgagatcgccgggaccggcaccctgaggagggggtagttgcagagctccagggcttcgcggtggacaaggccttcctcacctcccacaagggcatcctgctggaaaccgagctggccctgaccctcatcatcttcatctgcttcacggcctccatctctgcctacatggccgcggcgctactggagttcttcatcacacttgccttcctcttcctctatgccacccagtactaccagcgcttcgaccgaattaactggccctgtctgctgcagggccacgggcaatcaggaggaccacatccgctagatctactctcccactcagcaaaggtccagccccagccctggcctggcttgacccccccgggctggcatactccagccgctgtcccctgggttccagccccagcgcctggcttctggtcctggttgctctggttcatctgcttccactccctgggtagcagtgacttcctgcgctgtgtcagtgccatcatcatcttcctggtggtctcctttgcagctgtgacctcccgggacggagctgccattgctgcttttgtttttggcatcatcctggtttccatctttgcctatgatgccttcaagatctaccggactgagatggcacccggggccagccagggggaccagcagtgactctggggctacctggctcctaggcccagccagccagagaggacagtggagcccagacacgtctccttgggattcactagcccccagcccgccaaaccccaccccagccctacacagcagtctggcctgagacgtcactggggacttatctgtggagcctggtgctccaggatgtggcttctcatgaagctctggccagaggaggggaacttattgggggagggggggtggaggggaggaatctggacctctaagtcattcccaaattaaaatattcaaattcta

SEQ ID NO: 4350 - DNA, 725 bp, Homo sapiens
  source 1..725: mol_type = unassigned DNA
agcagaggcactctgggcagctgggtgagggcccatctgggcaaggcccccagcgcctgccttctctcccggggccctgtgggcaagcctcctgcttcactttcaggtttctcgaagtgccttcttgctcctgtctgtttccccatcctgccagatttctgtttctcttgctgggcttttggcagtagggggctgtgttggtgggccctacgaagatgctcagtgctcgagatcgccgggaccggcaccctgaggagggggtagttgcagagctccagggcttcgcggtggacaaggccttcctcacctcccacaagggcatcctgctggaaaccgagctggtttttggcatcatcctggtttccatctttgcctatgatgccttcaagatctaccggactgagatggcacccggggccagccagggggaccagcagtgactctggggctacctggctcctaggcccagccagccagagaggacagtggagcccagacacgtctccttgggattcactagcccccagcccgccaaaccccaccccagccctacacagcagtctggcctgagacgtcactggggacttatctgtggagcctggtgctccaggatgtggcttctcatgaagctctggccagaggaggggaacttattgggggagggggggtggaggggaggaatctggacctctaagtcattcccaaattaaaatattcaaattcta

SEQ ID NO: 4351 - DNA, 818 bp, Homo sapiens
  source 1..818: mol_type = unassigned DNA
agcagaggcactctgggcagctgggtgagggcccatctgggcaaggcccccagcgcctgccttctctcccggggccctgtgggcaagcctcctgcttcactttcaggtttctcgaagtgccttcttgctcctgtctgtttccccatcctgccagatttctgtttctcttgctgggcttttggcagtagggggctgtgttggtgggccctacgaagatgctcagtgctcgagatcgccgggaccggcaccctgaggagggggtagttgcagagctccagggcttcgcggtggacaaggccttcctcacctcccacaagggcatcctgctggaaaccgagctggacttcctgcgctgtgtcagtgccatcatcatcttcctggtggtctcctttgcagctgtgacctcccgggacggagctgccattgctgcttttgtttttggcatcatcctggtttccatctttgcctatgatgccttcaagatctaccggactgagatggcacccggggccagccagggggaccagcagtgactctggggctacctggctcctaggcccagccagccagagaggacagtggagcccagacacgtctccttgggattcactagcccccagcccgccaaaccccaccccagccctacacagcagtctggcctgagacgtcactggggacttatctgtggagcctggtgctccaggatgtggcttctcatgaagctctggccagaggaggggaacttattgggggagggggggtggaggggaggaatctggacctctaagtcattcccaaattaaaatattcaaattcta

SEQ ID NO: 4352 - DNA, 1931 bp, Homo sapiens
  source 1..1931: mol_type = unassigned DNA
ctctgggcagctgggtgagggcccatctgggcaaggcccccagcgcctgccttctctcccggggccctgtgggcaagcctcctgcttcactttcaggtttctcgaagtgccttcttgctcctgtctgtttccccatcctgccagatttctgtttctcttgctgggcttttggcagtagggggctgtgttggtgggccctacgaagatgctcagtgctcgagatcgccgggaccggcaccctgaggagggggtagttgcagagctccagggcttcgcggtggacaaggccttcctcacctcccacaagggcatcctgctggaaaccgagctggtaacagctgcctcccaacctggtgcctccatctccctgacccccggctcctggccagccttatgccagcccccagctcacccttcagtagcctccttccccaagccctctggacacctctcctgcccgcagctgccccttcttcgtctcctactctgccttcttgctgcctctccacccggagacatttacagcaggtttcagttgcagcaggaaggactgcagttagacagggtgactttttgggacattgaggaagcttgagacatagggatgggacaggggcaatgacagcctctaacatggccacttctcagcacgtccaagaagtctaactatcaaaaagggcagacttcctgcaactgcactttatctgtggtctgctgcccagaaacatctcttctcaggaaaggatcttcccctggttacttagcaagaccacagtgtagagttaaggcctctgcacgtatgccaccctaggtcatcagagctaaaggggctcccagaaaccactgggcagcatctgccttctctcttggcatggaatcaaaggctctggtccttgtcagggggctttcaggcatctgggggtggggaaagcattatgaggcagggggctcctcttggtccctgtggagtcgggtctctgtgggcacaactccaggggctggcattcacactgtacctatgaattactgtgggatagtgctcctgggagccatatggcttggccagactgctggggttgctgggtgagcagagtgggaggccggagactgcccttgaccggcaaatgccctgcaacggtggctcctgacaccaggggatagggagatgtgccagagtccttcctcccctccaaggacaggtagtaggtgccagcctaggggagcttccaaggaggggaaggcaaagccctggcccctgcctgtgtccccttcttggcatgttccacatgctcggtcctgcaggccctgaccctcatcatcttcatctgcttcacggcctccatctctgcctacatggccgcggcgctactggagttcttcatcacacttgccttcctcttcctctatgccacccagtactaccagcgcttcgaccgaattaactggccctgtctggacttcctgcgctgtgtcagtgccatcatcatcttcctggtggtctcctttgcagctgtgacctcccgggacggagctgccattgctgcttttgtttttggcatcatcctggtttccatctttgcctatgatgccttcaagatctaccggactgagatggcacccggggccagccagggggaccagcagtgactctggggctacctggctcctaggcccagccagccagagaggacagtggagcccagacacgtctccttgggattcactagcccccagcccgccaaaccccaccccagccctacacagcagtctggcctgagacgtcactggggacttatctgtggagcctggtgctccaggatgtggcttctcatgaagctctggccagaggaggggaacttattgggggagggggggtggaggggaggaatctggacctctaagtcattcccaaattaaaatattcaaattct

SEQ ID NO: 4353 - DNA, 831 bp, Homo sapiens
  source 1..831: mol_type = unassigned DNA
gagggcccatctgggcaaggcccccagcgcctgccttctctcccggggccctgtgggcaagcctcctgcttcactttcaggtttctcgaagtgccttcttgctcctgtctgtttccccatcctgccagatttctgtttctcttgctgggcttttggcagtagggggctgtgttggtgggccctacgaagatgctcagtgctcgagatcgccgggaccggcaccctgaggagggggtagttgcagagctccagggcttcgcggtggacaaggccttcctcacctcccacaagggcatcctgctggaaaccgagctgtactaccagcgcttcgaccgaattaactggccctgtctggacttcctgcgctgtgtcagtgccatcatcatcttcctggtggtctcctttgcagctgtgacctcccgggacggagctgccattgctgcttttgtttttggcatcatcctggtttccatctttgcctatgatgccttcaagatctaccggactgagatggcacccggggccagccagggggaccagcagtgactctggggctacctggctcctaggcccagccagccagagaggacagtggagcccagacacgtctccttgggattcactagcccccagcccgccaaaccccaccccagccctacacagcagtctggcctgagacgtcactggggacttatctgtggagcctggtgctccaggatgtggcttctcatgaagctctggccagaggaggggaacttattgggggagggggggtggaggggaggaatctggacctctaagtcattcccaaattaaaatattcaaattcta

SEQ ID NO: 4354 - DNA, 378 bp, Homo sapiens
  source 1..378: mol_type = unassigned DNA
atgctcagtgctcgagatcgccgggaccggcaccctgaggagggggtagttgcagagctccagggcttcgcggtggacaaggccttcctcacctcccacaagggcatcctgctggaaaccgagctggccctgaccctcatcatcttcatctgcttcacggcctccatctctgcctacatggccgcggcgctactggagttcttcatcacacttgccttcctcttcctctatgccacccagtactaccagcgcttcgaccgaattaactggccctgtctggtttttggcatcatcctggtttccatctttgcctatgatgccttcaagatctaccggactgagatggcacccggggccagccagggggaccagcagtga

SEQ ID NO: 4355 - DNA, 1764 bp, Homo sapiens
  source 1..1764: mol_type = unassigned DNA
tggaatcaaaggctctggtccttgtcagggggctttcaggcatctgggggtggggaaagcattatgaggcagggggctcctcttggtccctgtggagtcgggtctctgtgggcacaactccaggggctggcattcacactgtacctatgaattactgtgggatagtgctcctgggagccatatggcttggccagactgctggggttgctgggtgagcagagtgggaggccggagactgcccttgaccggcaaatgccctgcaacggtggctcctgacaccaggggatagggagatgtgccagagtccttcctcccctccaaggacaggtagtaggtgccagcctaggggagcttccaaggaggggaaggcaaagccctggcccctgcctgtgtccccttcttggcatgttccacatgctcggtcctgcaggccctgaccctcatcatcttcatctgcttcacggcctccatctctgcctacatggccgcggcgctactggagttcttcatcacacttgccttcctcttcctctatgccacccagtactaccagcgcttcgaccgaattaactggccctgtctggtgaggaaccctgacccctagcccagtttggggcccttccctctcctctaaatgatgcattttcctttcctccccgagcttctttccatttccacaccacagctgggctttgtcccatgctatgccctgcactcaaaggtgtgctttgactcacactgatttcacagctgcagggccacgggcaatcaggaggaccacatccgctagatctactctcccactcagcaaaggtccagccccagccctggcctggcttgacccccccgggctggcatactccagccgctgtcccctgggttccagccccagcgcctggcttctggtcctggttgctctggttcatctgcttccactccctgggtagcagtgtgagcgctctgtctcttgaatgtgcttcatattgtgtgaggggtatcctatggaggggttcagaatccctcagggtcgggctgctggctagcctggaaaacttcagggtaacgccccctgccttctgaggtcctgttaaccctgcacccctggcccccaggacttcctgcgctgtgtcagtgccatcatcatcttcctggtggtctcctttgcagctgtgacctcccgggacggagctgccattgctgcttttgtgagttcagccctgcaggactccttagcccctcaagagctcaggctggtgcttgcacactttctgtatcagaagccacagccaggacttggggttctggcttgcacctcaccctataccttaacccaatggccctatagcctctgttttgccatccccactcccactcccacaggtttttggcatcatcctggtttccatctttgcctatgatgccttcaagatctaccggactgagatggcacccggggccagccagggggaccagcagtgactctggggctacctggctcctaggcccagccagccagagaggacagtggagcccagacacgtctccttgggattcactagcccccagcccgccaaaccccaccccagccctacacagcagtctggcctgagacgtcactggggacttatctgtggagcctggtgctccaggatgtggcttctcatgaagctctggccagaggaggggaacttattgggggagggggggtggaggggaggaatctggacctctaagtcattcccaaattaaaatattcaaattcta

SEQ ID NO: 4356 - DNA, 996 bp, Homo sapiens
  source 1..996: mol_type = unassigned DNA
ggcctccaccgccttccccggctgcccggcagcctcccctcgctcgctctcctcttcctctagggccccagcgcagctcgggagcccgcgcaccgaggcgctaggggcaccgcgcactagagggacacccgccgcgcctggacagcccccggcgggcgcccccctcgcacctcctgccccgcgcgggccgcgctcccctcccccgcgcctgtgtccccagggcgcagggccgcgcgtccagccccagacccgccggggtccctggggacgcgccagcccggcagtggctcgacgatggaggagccgcagcgcgcccgctcgcacacagtcaccaccaccgccagctccttcgcagagaacttctccaccagcagcagcagcttcgcctacgaccgggagttcctccgcaccctgcccggcttcctcatcgtggccgagatcggcctgtgctttaacggcagtgccttcgtcttgtacctctctgccgctgttgtagatgcatcttccgtctcccctgagagggacagtcacaacttcaacagctgggcggcctcatcgttctttgccttcctggtcaccatctgctacgctggaaatacatatttcagttttatagcatggagatccaggaccatacagtgatttaccattttgataattaaaaggaaaaaaaaaggaagactctcactgtaaaaacagctgtaggtataatgtatattcccagagaattgtatttaactaattaatgttttttatattcttaaatttgctcacaaattgtggtttgttacaattaaactggatacttatttgcaaagtgttgtagcttataatgaactcttaagtatcttattaatgtattaatgtcttcatagatcatattttcttagacaatgtttaaatagataaattgctaatattgagaatgtgtcaagtttgtaaacctaacttttaagatgccagattcttttttgattaaatgttgcaaaatcccaa

SEQ ID NO: 4357 - DNA, 1174 bp, Homo sapiens
  source 1..1174: mol_type = unassigned DNA
ggcctccaccgccttccccggctgcccggcagcctcccctcgctcgctctcctcttcctctagggccccagcgcagctcgggagcccgcgcaccgaggcgctaggggcaccgcgcactagagggacacccgccgcgcctggacagcccccggcgggcgcccccctcgcacctcctgccccgcgcgggccgcgctcccctcccccgcgcctgtgtccccagggcgcagggccgcgcgtccagccccagacccgccggggtccctggggacgcgccagcccggcagtggctcgacgatggaggagccgcagcgcgcccgctcgcacacagtcaccaccaccgccagctccttcgcagagaacttctccaccagcagcagcagcttcgcctacgaccgggagttcctccgcaccctgcccggcttcctcatcgtggccgagatcgttctggggctgctggtatggacgcttattgctggaactgagtacttccgggtccccgcatttggctgggtcatgtttgtagctgtattttactgggtcctcaccgtcttcttcctcattatctacataacaatgacctacaccaggattccccaggtgccctggacaacagtgggcctgtgctttaacggcagtgccttcgtcttgtacctctctgccgctgttgtagatgcatcttccgtctcccctgagagggacagtcacaacttcaacagctgggcggcctcatcgttctttgccttcctggtcaccatctgctacgctggaaatacatatttcagttttatagcatggagatccaggaccatacagtgatttaccattttgataattaaaaggaaaaaaaaaggaagactctcactgtaaaaacagctgtaggtataatgtatattcccagagaattgtatttaactaattaatgttttttatattcttaaatttgctcacaaattgtggtttgttacaattaaactggatacttatttgcaaagtgttgtagcttataatgaactcttaagtatcttattaatgtattaatgtcttcatagatcatattttcttagacaatgtttaaatagataaattgctaatattgagaatgtgtcaagtttgtaaacctaacttttaagatgccagattcttttttgattaaatgttgcaaaatcccaagtaa

SEQ ID NO: 4358 - DNA, 2215 bp, Homo sapiens
  source 1..2215: mol_type = unassigned DNA
gcattgtctcttcctctgcagttgagctgaatgaatacctccgaagccgctttgttctccagatgtgaatagctccactataccagcctcgtcttccttccgggggacaacgtgggtcagggcacagagagatatttaatgtcaccctcttggggctttcatgggactccctctgccacattttttggaggttgggaaagttgctagaggcttcagaactccagcctaatggatcccaaactcgggagaatggctgcgtccctgctggctgtgctgctgctgctgctggagcgcggcatgttctcctcaccctccccgcccccggcgctgttagagaaagtcttccagtacattgacctccatcaggatgaatttgtgcagacgctgaaggagtgggtggccatcgagagcgactctgtccagcctgtgcctcgcttcagacaagagctcttcagaatgatggccgtggctgcggacacgctgcagcgcctgggggcccgtgtggcctcggtggacatgggtcctcagcagctgcccgatggtcagagtcttccaatacctcccgtcatcctggccgaactggggagcgatcccacgaaaggcaccgtgtgcttctacggccacttggacgtgcagcctgctgaccggggcgatgggtggctcacggacccctatgtgctgacggaggtagacgggaaactttatggacgaggagcgaccgacaacaaaggccctgtcttggcttggatcaatgctgtgagcgccttcagagccctggagcaagatcttcctgtgaatatcaaattcatcattgaggggatggaagaggctggctctgttgccctggaggaacttgtggaaaaagaaaaggaccgattcttctctggtgtggactacattgtaatttcagataacctgtggatcagccaaaggaagccagcaatcacttacggaacccgggggaacagctacttcatggtggaggtgaaatgcagagaccaggattttcactcaggaacctttggtggcatccttcatgaaccaatggctgatctggttgctcttctcggtagcctggtagactcgtctggtcatatcctggtccctggaatctatgatgaagtggttcctcttacagaagaggaaataaatacatacaaagccatccatctagacctagaagaataccggaatagcagccgggttgagaaatttctgttcgatactaaggaggagattctaatgcacctctggaggtacccatctctttctattcatgggatcgagggcgcgtttgatgagcctggaactaaaacagtcatacctggccgagttataggaaaattttcaatccgtctagtccctcacatgaatgtgtctgcggtggaaaaacaggtgacacgacatcttgaagatgtgttctccaaaagaaatagttccaacaagatggttgtttccatgactctaggactacacccgtggattgcaaatattgatgacacccagtatctcgcagcaaaaagagcgatcagaacagtgtttggaacagaaccagatatgatccgggatggatccaccattccaattgccaaaatgttccaggagatcgtccacaagagcgtggtgctaattccgctgggagctgttgatgatggagaacattcgcagaatgagaaaatcaacaggtggaactacatagagggaaccaaattatttgctgcctttttcttagagatggcccagctccattaatcacaagaaccttctagtctgatctgatccactgacagattcacctcccccacatccctagacagggatggaatgtaaatatccagagaatttgggtctagtatagtacattttcccttccatttaaaatgtcttgggatatctggatcagtaataaaatatttcaaaggcacagatgttggaaatggtttaaggtcccccactgcacaccttcctcaagtcatagctgcttgcagcaacttgatttccccaagtcctgtgcaatagccccaggattggattccttcaaaccttttagcatatctccaaccttgcaatttgattggcataatcactccagtttgctttctaggtcctcaagtgctcgtgacacataatcattccatccaatgatcgcctttgctttaccactctttccttttatcttattaataaaaatgttggtctccaccactgactacaa

SEQ ID NO: 4359 - DNA, 646 bp, Homo sapiens
  source 1..646: mol_type = unassigned DNA
tgtgaatagctccactataccagcctcgtcttccttccgggggacaacgtgggtcagggcacagagagatatttaatgtcaccctcttggggctttcatgggactccctctgccacattttttggaggttgggaaagttgctagaggcttcagaactccagcctaatggatcccaaactcgggagaatggctgcgtccctgctggctgtgctgctgctgctgctggagcgcggcatgttctcctcaccctccccgcccccggcgctgttagagaaagtcttccagtacattgacctccatcaggatgaatttgtgcagacgctgaaggagtgggtggccatcgagagcgactctgtccagcctgtgcctcgcttcagacaagagctcttcagaatgatggccgtggctgcggacacgctgcagcgcctgggggcccgtgtggcctcggtggacatgggtcctcagcagggaaactttatggacgaggagcgaccgacaacaaaggccctgtcttggcttggatcaatgctgtgagcgccttcagagccctggagcaagatcttcctgtgaatatcaaattcatcattgaggggatggaagaggctggctctgttgccctggaggaacttgtggaaaaagaaaagga

SEQ ID NO: 4360 - DNA, 4111 bp, Homo sapiens
  source 1..4111: mol_type = unassigned DNA
gggactccctctgccacattttttggaggttgggaaagttgctagaggcttcagaactccagcctaatggatcccaaactcgggagaatgacgctgaaggagtgggtggccatcgagagcgactctgtccagcctgtgcctcgcttcagacaagagctcttcagaatgatggccgtggctgcggacacgctgcagcgcctgggggcccgtgtggcctcggtggacatgggtcctcagcagctgcccgatggtcagagtcttccaatacctcccgtcatcctggccgaactggggagcgatcccacgaaaggcaccgtgtgcttctacggccacttggacgtgcagcctgctgaccggggcgatgggtggctcacggacccctatgtgctgacggaggtagacgggaaactttatggacgaggagcgaccgacaacaaaggccctgtcttggcttggatcaatgctgtgagcgccttcagagccctggagcaagatcttcctgtgaatatcaaattcatcattgaggggatggaagaggctggctctgttgccctggaggaacttgtggaaaaagaaaaggaccgattcttctctggtgtggactacattgtaatttcagataacctgtggatcagccaaaggaagccagcaatcacttacggaacccgggggaacagctacttcatggtggaggtgaaatgcagagaccaggattttcactcaggaacctttggtggcatccttcatgaaccaatggctgatctggttgctcttctcggtagcctggtagactcgtctggtcatatcctggtccctggaatctatgatgaagtggttcctcttacagaagaggaaataaatacatacaaagccatccatctagacctagaagaataccggaatagcagccgggttgagaaatttctgttcgatactaaggaggagattctaatgcacctctggaggtacccatctctttctattcatgggatcgagggcgcgtttgatgagcctggaactaaaacagtcatacctggccgagttataggaaaattttcaatccgtctagtccctcacatgaatgtgtctgcggtggaaaaacaggtgacacgacatcttgaagatgtgttctccaaaagaaatagttccaacaagatggttgtttccatgactctaggactacacccgtggattgcaaatattgatgacacccagtatctcgcagcaaaaagagcgatcagaacagtgtttggaacagaaccagatatgatccgggatggatccaccattccaattgccaaaatgttccaggagatcgtccacaagagcgtggtgctaattccgctgggagctgttgatgatggagaacattcgcagaatgagaaaatcaacaggtggaactacatagagggaaccaaattatttgctgcctttttcttagagatggcccagctccattaatcacaagaaccttctagtctgatctgatccactgacagattcacctcccccacatccctagacagggatggaatgtaaatatccagagaatttgggtctagtatagtacattttcccttccatttaaaatgtcttgggatatctggatcagtaataaaatatttcaaaggcacagatgttggaaatggtttaaggtcccccactgcacaccttcctcaagtcatagctgcttgcagcaacttgatttccccaagtcctgtgcaatagccccaggattggattccttcaaaccttttagcatatctccaaccttgcaatttgattggcataatcactccagtttgctttctaggtcctcaagtgctcgtgacacataatcattccatccaatgatcgcctttgctttaccactctttccttttatcttattaataaaaatgttggtctccaccactgactacaatgatttccccatggattcattttcagaggagttactaaggcatggtactatattaacctcttgcctccccttcatttattttttcccacttcttgaaaagttccgaagctgaaatgatcaatattcatacccatatgccatttgggagtccttgtgcaaagatgagtatttttttttttattccaagcttctttacctttcctgagatcgatgccaccttgtcagcttctctgcctcccgttccttcttcctgtcccatcagaaaaggcccactctctctctatccaacatctgtgcacaggttgcaccagagcagaatttatcctgatagaatttctctcaccccattgaagttttactcaatgacaacatctaaattgctcaaagcttttaatagcatcagttttagatagagaactaatcaaccctgacatcagtaacacacgctaaatttaaagccatcagctaatgctgcattcattaatcattttagttaaccatcatgtttggcttgattggatttgacggtgtaaacaacaaaaaaagacagtcatttttctacagttgagtgtatataaacaaaatcaatctttatgaatttattatttaaatcacattaatggagaatcatttaggggcttattaaaatttttttctattatgactccaaataaaaacaaagcagagggccaggcgcggtggctcatgcccataatcccagcactttcggaggccgaggtgggcggatcacctgaggtcgggagttcgagatcagcctggctaacatggtgaaaccctgtctctactgaatatacaaaattaactgggcatggtggtgcatgcctgtagtcccagctactcgggaggctgaggcaggagaatcgcttgaacccaggaggcggaagttgcagtgaactgggatcatgccactgcactccagcctgggcgacagagtgagactccgtctccaaaaaaaaaaaaaaaaaaaaaaaaagcagaacacatttgcgttcaacttttttccatcactctgttggttcttgagatgtcagtgtcagtttaaaaacgtgctgtaccacctttaaaaggactggagcaggcaggcagtgattcagttcaccttgactctagtcatagaagtggacccaactgagagctcaacctagttgtgggcatttgtgaaggattccagttagtgttttctttggaagcaggaggcttcaagccatcacatctccaattctatagaatatcaagtcatcgttaaagaacagcagcaggtgtttgatattttgtgctattaagtgtagtttgcgctcatctaattatgcagagtttcgtggtgtttctcgattttgttgaacctacctgatgcatttggcactgtagataaggactaacagtaagagagatttagagtcttcatgttagtccattaacataagtttattataaaatacactgtaagcatttctggctaatgtaccatcagatttaagaagttacccaacaatatgtattcgctgatcttcattcctgctgaatctgagaccagcagtgtctcaattattacgttgctgccaggagagaaggggaggagaatgaatagttatggaagttgtagaatctaggatattccaaccctggattgccagagttcagagtccatgtttttctgtcacccagggtcacgactggtctccccagctcttccctcctgtttttccacccaattctaagccctgtggtgatccagaccctaccctgacgtgggagtcagaaaggagtatcttccaagctccttgtactcaaagggataaaagaaagctactcagttgttattcagatatattaaccagccatatggaggcaaaaaagggagaaatttaaatatttgttttttaacattttaatgatgaaatatatgcacttggacaaaaatgatcacccagtaaagttgggcgtacattgtggcatgcccatcagggggactttgttgtattggaggagggcaatgtatctggctttgttagtagacgtagcgcattaaagcgtaactattgtgataagtttaggggttaggaatatcatttgagtttggtagatgcttttctggaaaacaatgaggctgggaatgtttctggctttatgttgtattcataaaaataaaatgtactggcttggaaa

SEQ ID NO: 4361 - DNA, 551 bp, Homo sapiens
  source 1..551: mol_type = unassigned DNA
tgctgaccggggcgatgggtggctcacggacccctatgtgctgacggagggaaactttatggacgaggagcgaccgacaacaaaggccctgtcttggcttggatcaatgctgtgagcgccttcagagccctggagcaagatcttcctgtgaatatcaaattcatcattgaggggatggaagaggctggctctgttgccctggaggaacttgtggaaaaagaaaaggaccgattcttctctggtgtggactacattgtaatttcagataacctgtggatcagccaaaggaagccagcaatcacttacggaacccgggggaacagctacttcatggtggaggtgaaatgcagagaccaggattttcactcaggaacctttggtggcatccttcatgaaccaatggctgatctggttgctcttctcggcccaggtgttttcagccacacctttgacaaggtgaacactaaagcagggcggactccagctgcgtgatcctggtgaccaactcctttctctgacagtcacttcttggatggagttgctgccaatgg

SEQ ID NO: 4362 - DNA, 1511 bp, Homo sapiens
  source 1..1511: mol_type = unassigned DNA
ttcaagttgagatttggtggggacacagccaaaccacatcaggcaacttgtgcaatttttttcttctgttgttacttaggatcttcctgtgaatatcaaattcatcattgaggggatggaagaggctggctctgttgccctggaggaacttgtggaaaaagaaaaggaccgattcttctctggtgtggactacattgtaatttcagataacctgtggatcagccaaaggaagccagcaatcacttacggaacccgggggaacagctacttcatggtggaggtgaaatgcagagaccaggattttcactcaggaacctttggtggcatccttcatgaaccaatggctgatctggttgctcttctcggtagcctggtagactcgtctggtcatatcctggtccctggaatctatgatgaagtggttcctcttacagaagaggaaataaatacatacaaagccatccatctagacctagaagaataccggaatagcagccgggttgagaaatttctgttcgatactaaggaggagattctaatgcacctctggaggtacccatctctttctattcatgggatcgagggcgcgtttgatgagcctggaactaaaacagtcatacctggccgagttataggaaaattttcaatccgtctagtccctcacatgaatgtgtctgcggtggaaaaacaggtgacacgacatcttgaagatgtgttctccaaaagaaatagttccaacaagatggttgtttccatgactctaggactacacccgtggattgcaaatattgatgacacccagtatctcgcagcaaaaagagcgatcagaacagtgtttggaacagaaccagatatgatccgggatggatccaccattccaattgccaaaatgttccaggagatcgtccacaagagcgtggtgctaattccgctgggagctgttgatgatggagaacattcgcagaatgagaaaatcaacaggtggaactacatagagggaaccaaattatttgctgcctttttcttagagatggcccagctccattaatcacaagaaccttctagtctgatctgatccactgacagattcacctcccccacatccctagacagggatggaatgtaaatatccagagaatttgggtctagtatagtacattttcccttccatttaaaatgtcttgggatatctggatcagtaataaaatatttcaaaggcacagatgttggaaatggtttaaggtcccccactgcacaccttcctcaagtcatagctgcttgcagcaacttgatttccccaagtcctgtgcaatagccccaggattggattccttcaaaccttttagcatatctccaaccttgcaatttgattggcataatcactccagtttgctttctaggtcctcaagtgctcgtgacacataatcattccatccaatgatcgcctttgctttaccactctttccttttatcttattaataaaaatgttggtctccaccactgactacaa

SEQ ID NO: 4363 - DNA, 485 bp, Homo sapiens
  source 1..485: mol_type = unassigned DNA
ttctgaatagcacagacatcaatggctcccctttccctgtgatggcgtttcaggcatgagccaccgcgcctggccgtataattttttttttgagacagagtctgactttatcacccaggctggagtgcagtgatgtgatcatgacttactgcagcctcaacttcctgggatcaatgatcctcccacctcagcttcccaagtagctgggaccacaggcatgtgccaccatgccctgctaatttttgtattttttgtagagacagggtctcgccacgttgcccaggctggttgggaattcctgggctcaagcgatccacttgctttgacctcccaaagtgctgggagtacagatgtgagccaccgcacccagcatgtattttaaatgttttataatgaacacatattacttttaaaatcaggataagacaaaactaaaaaaccttgtttatgtataaaaggcatagctgagaacgtgaacatgatgc

SEQ ID NO: 4364 - DNA, 3641 bp, Homo sapiens
  source 1..3641: mol_type = unassigned DNA
tcagcttcccaagtagctgggaccacaggcatgtgccaccatgccctgctaatttttgtattttttgtagagacagggtctcgccacgttgcccaggctggttgggaattcctgggctcaagcgatccacttgctttgacctcccaaagtgctgggagtacagatgtgagccaccgcacccagcatgtattttaaatgttttataatgaacacatattacttttaaaatcaggataagacaaaactaaaaaaccttgtttatgtataaaaggcatagctgagaacgtgaacatgatgcaggtaactcactccgacctcatttgttgcaggcccaggtgttttcagccacacctttgacaaggtgaacactaaagcagggcggactccagctgcgtgatcctggtgaccaactcctttctctgacagtcacttcttggatggagttgctgccaatggctttggccacggggacccagacagtcaagaggcctgctgcaaccctgaagagtcctcccacagtctggctccaggaccacaacattggcacactcctttctacctggctttgttttctgtgtgtgttttgtaggtagcctggtagactcgtctggtcatatcctggtccctggaatctatgatgaagtggttcctcttacagaagaggaaataaatacatacaaagccatccatctagacctagaagaataccggaatagcagccgggttgagaaatttctgttcgatactaaggtatggccacagactgatggataagctggaagaggcatgaggctagtatatcatatttgccctctgtctaagtcattgtctggtgctaatctccgtatcttagaatccaaagcagatgtgaattcccaggcatatttttgacattcacagccacttccccgtgggctggatcaaccagtcctttttcaatggcgtctaattggcactggcttctggcacttaaccacaagcagttacccatttcccagccatgttttccaaagctgttcattaacctaaatcccacgtcagccttcagccagtgagctggacttcttaccttttcaaagaccaagaaaagtctgagatgattccagctccaagacctctaactgttcatttttccagacaaaaccaagagccttaggggctaatctgtaagtgaatacatcattgtctcagtggactaagtaaacacaaagctgaaaacattccttacaggcaaatttcgaattgttttgcttttctcttcttcctctttctgggcagcatgcttgcctgacaaggtgtttggtagctagggctggttcctggggaaggggccgagagggggaaaagcaagctgaaaagaagcggtagagtgaattattatgaagcaggcatcttcttgcagaccagctccaggatggccagaagaaagaaaactggcttaaacatctgaagagttatttgatgtcttctgaataagaaaatgctttcattacataagttattattgtaatttggggttagaaatttataattgaacccacgtttctgaaagggctcctttatctatggccataccacactgaacgtgcccgatctcgtttgaaagggcccctttgccatttgttaactgaaaactgcagatcttgggcaaagaggggcactcatcaatggggagcattggtagtgatgggtagtgaaggcatctgaggacagcagagagtttgtgtcctgaggaaaaagtccttgcgtgaggcacagctgagtaaggtgacagttaacgtgtcctgaatggtgtctcagagaggcagagggtggtaacacaagcaacccaggtccactgggttctaattaagcatcctttggataattttattttaatataggaggagattctaatgcacctctggaggtacccatctctttctattcatgggatcgagggcgcgtttgatgagcctggaactaaaacagtcatacctggccgagttataggaaaattttcaatccgtctagtccctcacatgaatgtgtctgcggtggaaaaacaggtgacacgacatcttgaagatgtgttctccaaaagaaatagttccaacaagatggttgtttccatgactctaggactacacccgtggattgcaaatattgatgacacccagtatctcgcagcaaaaagagcgatcagaacagtgtttggaacagaaccagatatgatccgggatggatccaccattccaattgccaaaatgttccaggagatcgtccacaagagcgtggtgctaattccgctgggagctgttgatgatggagaacattcgcagaatgagaaaatcaacaggtcagctgatgcctgtgcaatgtgcctctctcttcttcctttactgcacacacccgggtctacacgtgggtgagctcctgttcaatttatgtgagaatggaaaatcgtccagactgggagcttaaagaacagacattcattcctcacagttctggagcctggatgccctagatcaggtgccaggccatttggttcctggtgggtatgggctgtcttcctggccgtccctgcgatggtggggttaggtggttctggtgtctctctttttataagagcaccagacccattggattaggacccccattttaacctcatttaacctttattatctcctccaggccctgtctccaaatacagacacactggggggttaggggttcaacacaggactttgaggaaacacaaatatttagtgcataacaaaaaaggctattaggaatgtttgctttatgcgctactggcagatactacaagatctcctaagcatcccagactactgagaaacaagaaattgtttgaccctgatatccatatcagtgataagaaatcaaggaaaattcacttttggatttgagtctaggactgattctcatcttcttaataataataatgcaattttcacatggaacttactaagtgcttttcatactgggatctcagaagtatgttaaataatttaaatggaatttataacatcaaatcttcctgtctaaatgacagaatatttttcctccttcatttgaatggaaattgtaacaaaatttctctttgtttttcctcttcttaggtggaactacatagagggaaccaaattatttgctgcctttttcttagagatggcccagctccattaatcacaagaaccttctagtctgatctgatccactgacagattcacctcccccacatccctagacagggatggaatgtaaatatccagagaatttgggtctagtatagtacattttcccttccatttaaaatgtcttgggatatctggatcagtaataaaatatttcaaaggcacagatgttggaaatggtttaaggtcccccactgcacaccttcctcaagtcatagctgcttgcagcaacttgatttccccaagtcctgtgcaatagccccaggattggattccttcaaaccttttagcatatctccaaccttgcaatttgattggcataatcactccagtttgctttctaggtcctcaagtgctcgtgacacataatcattccatccaatgatcgcctttgctttaccactctttccttttatcttattaataaaaatgttggtctcc

SEQ ID NO: 4365 - DNA, 876 bp, Homo sapiens
  source 1..876: mol_type = unassigned DNA
cgccgctgggctgagccccggcagtggctgcggcggcggcggcggcgggcggcagcggaggcagctgccgcctctgtcctcggatccgctccgctctgctccctggtgtgttgattcttcccccagctgctgcctaatggagtccaggcgctcgcgtcacaggaaatgcctatactgccctcctcactcacttccggtggcaggccacatcatgctgaacaagagccgagaagtagaatcgccagtgtcaagccgtccacgttgtgggatgcccactgttcccccaggatcactcaagaccctgtgacttgtggtcactgatgagtggaccaagtgaagtgatcctcatggaacacctttcctgaagagatgatgatggggccatttgacatgggacacagcaggtgctggaagaagcacatatttttagtgacaaagactgtgactatgttgcctcctggttataaagcaaagccaaactggagagaccagtgccagagcctttattactaaaaggcacatgcaaagtgctgtaagatttcacaggatggagagaacatctgtggcagtggacagagtcgtgagtgaccacagaaggctttctggaggcaggacttgagggcctttgcctcagacatgcatacggcaggagtgtgagatctatggagtgggctcagctcatggagcaaggaggacggcaggggctccaatgatgatgtctgcgtaagaattcccatttaagatctttccaagcacaagagtcatggcccaatggcagagtgtcctatgcccacgaataaatcaaggatgaagaagacatttttggaaccagcatagtttctggtaggatctttgccactacttaaaaaaaaaaaa

SEQ ID NO: 4366 - DNA, 968 bp, Homo sapiens
  source 1..968: mol_type = unassigned DNA
tcccgggggtcaggggagggaggccagcgggccggcggggtccgccccgaccccatccacgaccccgactcctatccgatcctatccccggccccgctcgggcctttccccttgcgccctggctcggctggctcgacgagcagtaagttcgtagccgccctccgaagccgggcgtgcatgggatggcagagttggcgtgcgtgcgtgagtccaccagtgtggcatgggcatgtaaggtgcgcggagggactgcaccttctccatcaggtgcagaaggccacatcatgctgaacaagagccgagaagtagaatcgccagtgtcaagccgtccacgttgtgggatgcccactgttcccccaggatcactcaagaccctgtgacttgtggtcactgatgagtggaccaagtgaagtccacaagatggctgctgtggctccaggcatcacgtccacatgcaaatccatccagaggcaggaactgggaataggcttggaggtggccaggacagcaagtgggctgtctgtataaacctcccctccacttgggaaggaaaatcaccccccaagtcgattttctgtccatcttattgatcagagagcgttataaattcacccattaaataatctggacaaggggagcgtgcatgttgtccttggtttagactggttatgatttatgccctgaaattggacatattgccaagcaagcgaaattgagattccatcagccaggaagaaggggtaaggatgatgaatattgggtaggcacatgataggggttgtcacaagttttaagatgctttcaattagtaaataactgtcaagattaccttttgttttcacctgcccagtctccattgtgcctccttcagaaacacacactgggttttctttgggtgtgaaggggcctctgtgtccatcattccagtgtgagcacatgatctgagcccggtcagtgaggtttaattt

SEQ ID NO: 4367 - DNA, 778 bp, Homo sapiens
  source 1..778: mol_type = unassigned DNA
gggagggaggccagcgggccggcggggtccgccccgaccccatccacgaccccgactcctatccgatcctatccccggccccgctcgggcctttccccttgcgccctggctcggctggctcgacgagcagtaagttcgtagccgccctccgaagccgggcgtgcatgggatggcagagttggcgtgcgtgcgtgagtccaccagtgtggcatgggcatgtaaggtgcgcggagggactgcaccttctccatcaggtgcagaaggtgcgtttttgcaagactgcgcactcacacgaccattgagaggctcactttgcagtggccctcccaggccctccgtggttgggtgtccgtctttgtcagaaaagggccagcagggggcaccaaacccgcacgtttctgccgggagagggcgtctgggccacatcatgctgaacaagagccgagaagtagaatcgccagtgtcaagccgtccacgttgtgggatgcccactgttcccccaggatcactcaagaccctgtgacttgtggtcactgatgagtggaccaagtgaagtccacaagatggctgctgtggctccaggcatcacgtccacatgcaaatccatccagaggcaggaactgggaataggcttggaggtggccaggacagcaagtgggctgtctgtataaacctcccctccacttgggaaggaaaatcaccccccaagtcgattttctgtccatcttattgatcagagagcgttataaattcacccattaaataatctggacaaggg

SEQ ID NO: 4368 - DNA, 451 bp, Homo sapiens
  source 1..451: mol_type = unassigned DNA
attcaatatagtggcatgaaggaggagacacagagctacttcatgggatctgtcttcttaacagtcatgcattatgcattgctgttgtttcaggccacatcatgctgaacaagagccgagaagtagaatcgccagtgtcaagccgtccacgttgtgggatgcccactgttcccccaggatcactcaagaccctgtgacttgtggtcactgatgagtggaccaagtgaagtccacaagatggctgctgtggctccaggcatcacgtccacatgcaaatccatccagaggcaggaactgggaataggcttggaggtggccaggacagcaagtgggctgtctgtataaacctcccctccacttgggaaggaaaatcaccccccaagtcgattttctgtccatcttattgatcagagagcgttataaattcacccattaaataatctggacaagg

SEQ ID NO: 4369 - DNA, 389 bp, Homo sapiens
  source 1..389: mol_type = unassigned DNA
gtggaccaagtgaagtccacaagatggctgctgtggctccaggcatcacgtccacatgcaaatccatccagaggcaggaactgggaataggcttggaggtggccaggacagcaagtgggctgtctgtataaacctcccctccacttgggaaggaaaatcaccccccaagtcgattttctgtccatcttattgatcagagagcgttataaattcacccattaaataatctggacaaggggagcgtgcatgttgtccttggtttagactggttatgatttatgccctgaaattggacatattgccaagcaagcgaaattgagattccatcagccaggaagaaggggattgtggtgaggagcaaatgaatcaacgcatgagcaaaggatggt

SEQ ID NO: 4370 - DNA, 897 bp, Homo sapiens
  source 1..897: mol_type = unassigned DNA
gttcagctttgttcttactttgtttgtgttacactggtatccagtgatccattggcacagagacacagtttctactttgatacaatctgtgtcagcctggcagttaatttatttagcagcatcttaaatttttttgtttttgcataaaatccagctcctgcaggatatttatcagcatctttgcaagagaggatgaattcaaaataaagtacaagagaagaaacattcagataattgcctttgatgagttaaggacagattttaagagccccatagaccagtgcaatcctgttcatgcgagggaacggttgaggaacatcgagcgcatctgcttccttctgcgaaagctggtgctgccagaatactccatccatagcctcttctgcattatgttcctgtgtgcgcaagagtggctcacgctggggctgaatgtccctctacttttctatcacttctggaggtatttccactgtccagcagatagctcagaactagcctacgacccaccggtggtcatgaatgccgacactttgagttactgtcagaaggaggcctggtgtaagctggccttctatctcctctccttcttctactacctttactgcatgatctacactttagtgagctcttaacgcaaagaccatgcacatcatcagagactgagatgggagaggcctgagacggagaggtgcatttctgctggtgactggaggagggaccagaatgaggatacgtgagaaatagacccggcaggcagtcagactgaatgggagctggaatcacgcagcagctgggagccgagttaaccctgcgtgtctgtgtcaccctgtttgtcaatctttggcattcgaattccacacacggggtcctagagcccttctgagcatcagtggtgtg

SEQ ID NO: 4371 - DNA, 785 bp, Homo sapiens
  source 1..785: mol_type = unassigned DNA
gctttgttcttactttgtttgtgttacactggtatccagtgatccattggcacagagacacagtttctactttgatacaatctgtgtcagcctggcagttaatttatttagcagcatcttaaatttttttgtttttgcataaaatccagctcctgcaggatatttatcagcatctttgcaagagaggatgaattcaaaataaagtacaagagaagaaacattcagtgatcctcatggaacacctttcctgaagagatgatgatggggccatttgacatgggacacagcaggtgctggaagaagcacatatttttagtgacaaagactgtgactatgttgcctcctggttataaagcaaagccaaactggagagaccagtgccagagcctttattactaaaagataattgcctttgatgagttaaggacagattttaagagccccatagaccagtgcaatcctgttcatgcgagggaacggttgaggaacatcgagcgcatctgcttccttctgcgaaagctggtgctgccagaatactccatccatagcctcttctgcattatgttcctgtgtgcgcaagagtggctcacgctggggctgaatgtccctctacttttctatcacttctggaggtatttccactgtccagcagatagctcagaactagcctacgacccaccggtggtcatgaatgccgacactttgagttactgtcagaaggaggcctggtgtaagctggccttctatctcctctccttcttctactacctttactgcatgatcta

SEQ ID NO: 4372 - DNA, 747 bp, Homo sapiens
  source 1..747: mol_type = unassigned DNA
gttacactggtatccagtgatccattggcacagagacacagtttctactttgatacaatctgtgtcagcctggcagttaatttatttagcagcatcttaaatttttttgtttttgcataaaatccagctcctgcaggatatttatcagcatctttgcaagagaggatgaattcaaaataaagtacaagagaagaaacattcagttgcctcctggttataaagcaaagccaaactggagagaccagtgccagagcctttattactaaaaggcacatgcaaagtgctgtaagatttcacaggatggagagaacatctgtggcagtggacagagtcgtgagtgaccacagaaggctttctggaggcaggacttgagataattgcctttgatgagttaaggacagattttaagagccccatagaccagtgcaatcctgttcatgcgagggaacggttgaggaacatcgagcgcatctgcttccttctgcgaaagctggtgctgccagaatactccatccatagcctcttctgcattatgttcctgtgtgcgcaagagtggctcacgctggggctgaatgtccctctacttttctatcacttctggaggtatttccactgtccagcagatagctcagaactagcctacgacccaccggtggtcatgaatgccgacactttgagttactgtcagaaggaggcctggtgtaagctggccttctatctcctctccttcttctactacctttactg

SEQ ID NO: 4373 - DNA, 846 bp, Homo sapiens
  source 1..846: mol_type = unassigned DNA
cactggtatccagtgatccattggcacagagacacagtttctactttgatacaatctgtgtcagcctggcagttaatttatttagcagcatcttaaatttttttgtttttgcataaaatccagctcctgcaggatatttatcagcatctttgcaagagaggatgaattcaaaataaagtacaagagaagaaacattcaggattgtggtgaggagcaaatgaatcaacgcatgagcaaaggatggtcgcatctgtgaaaggaaattcaatctcgggaccccaaaatcctacaccaaagagaaaagtcaagctgggaactgcatcaggcaaacctgcctcccatttaattgctaaataagatagctacaaagattttttaaaaaggaaaaaaaaactacatatctccatcacaatttgcccgcaaggaaatttttatgggcctcaagatctttaccctgaaacggttctgttgaatttcactttggaaatgtaagttgatagctgatcttcacaactgcgggacaaaggacagaactcaaagtcatccctctgctcacctgagacaaatgcatatctgattgctttctctgccttactgtttatgcaaaactgcagatgcactgaggctaagtgatcattcctctacccacccctcacatgtaaatcgtgtattcagtgaaaggctgataaaagactggaaagactgcaaccatttgtctcttacctacctgtgatctggaagcccccgcccccgtgctttgagttgtcctgcctttccagaccaaaccaatgtacgtcttacacatattgattgatgtctcatgtctccctaaatgcataaaatcaa

SEQ ID NO: 4374 - DNA, 866 bp, Homo sapiens
  source 1..866: mol_type = unassigned DNA
actggtatccagtgatccattggcacagagacacagtttctactttgatacaatctgtgtcagcctggcagttaatttatttagcagcatcttaaatttttttgtttttgcataaaatccagctcctgcaggatatttatcagcatctttgcaagagaggatgaattcaaaataaagtacaagagaagaaacattcagtgatcctcatggaacacctttcctgaagagatgatgatggggccatttgacatgggacacagcaggtgctggaagaagcacatatttttagtgacaaagactgtgactatgttgcctcctggttataaagcaaagccaaactggagagaccagtgccagagcctttattactaaaaggcacatgcaaagtgctgtaagatttcacaggatggagagaacatctgtggcagtggacagagtcgtgagtgaccacagaaggctttctggaggcaggacttgaggcctgagtgagaatgcaggtgcgctgaaggagcaggcaatagtgaagagtcaaggtttgggaggggaaccagagaccccagacttcagaactgcagcttttggggtcaacacaacatcccagaacatcaagacaccaagacatatcagctaggaccctgcagtaggacatcggtgtccagatgagaccagaagcaacccagtagaagccaggggacagtgtgtggaccacagaattcatgcttgatgccatcaagggcctttgcctcagacatgcatacggcaggagtgtgagatctatggagtgggctcagctcatggagcaaggaggacggcaggggctccaatgatgatgtctgcgtaagaattcccatttaagatctttccaa

SEQ ID NO: 4375 - DNA, 612 bp, Homo sapiens
  source 1..612: mol_type = unassigned DNA
catcttaaatttttttgtttttgcataaaatccagctcctgcaggatatttatcagcatctttgcaagagaggatgaattcaaaataaagtacaagagaagaaacattcagtgatcctcatggaacacctttcctgaagagatgatgatggggccatttgacatgggacacagcaggtgctggaagaagcacatatttttagtgacaaagactgtgactatgttgcctcctggttataaagcaaagccaaactggagagaccagtgccagagcctttattactaaaagtagaagttgatacacatttgaagttgcccatcccactaccaccaaatgatgtggaagagaatgagtcccctgtgacctagtgacgagaatgaagtaaatcctgtctcaaaagaagaaaatccacttccaagggacaaggtctcactctgtcgcccaagctggagcacagtggcacaataatagttcactgcagccttgaagtcctgggctcaagtgattctcctgcctcagcctcttgagtagctaggactacagataattgcctttgatgagttaaggacagattttaagagccccatagaccagtgcaatcctgttcatgcg

SEQ ID NO: 4376 - DNA, 823 bp, Homo sapiens
  source 1..823: mol_type = unassigned DNA
tagatgagctgtatgagtcaggagttctgctctccaggtctgaggctgttcattgcctgggtttgtccagcgggcctgaagccatggagagcataatatttagaggtggcgaacccgacaccaccctgcttgcattctttgctccaggccttctgacctagttgtccttttcctgtaccccatgcttgctccctgagccctacgcttgctgttctccagattgaggctttctcctcttgcttcatactcccctccctcagcccactatgcactatgtcaggccaactggtcttactctgcaggagagtctgagattcactgttgcttcctgtggggaggcttttctgagcccccaggcctggtgctgtgtgctcccgtggcagcccctgcttctcctgtacaccacatattgccaacttgcttctgactttcccctactgagctacattctccatgagttgcctcctggttataaagcaaagccaaactggagagaccagtgccagagcctttattactaaaaggcacatgcaaagtgctgtaagatttcacaggatggagagaacatctgtggcagtggacagagtcgtgagtgaccacagaaggctttctggaggcaggacttgagggcctttgcctcagacatgcatacggcaggagtgtgagatctatggagtgggctcagctcatggagcaaggaggacggcaggggctccaatgatgatgtctgcgtaagaattcccatttaagatctttccaagcacaagagtcatggcccaatggcagagtgtcctatgcccacgaataaatcaaggatgaagaa

SEQ ID NO: 4377 - DNA, 525 bp, Homo sapiens
  source 1..525: mol_type = unassigned DNA
gcctgtgggattcacaatttacacaggcctgagtgagaatgcaggtgcgctgaaggagcaggcaatagtgaagagtcaaggtttgggaggggaaccagagaccccagacttcagaactgcagcttttggggtcaacacaacatcccagaacatcaagacaccaagacatatcagctaggaccctgcagtaggacatcggtgtccagatgagaccagaagcaacccagtagaagccaggggacagtgtgtggaccacagaattcatgcttgatgccatcaagggcctttgcctcagacatgcatacggcaggagtgtgagatctatggagtgggctcagctcatggagcaaggaggacggcaggggctccaatgatgatgtctgcgtaagaattcccatttaagatctttccaagcacaagagtcatggcccaatggcagagtgtcctatgcccacgaataaatcaaggatgaagaagacatttttggaaccagcatagtttctggtaggatctttgccactactt

SEQ ID NO: 4378 - DNA, 2558 bp, Homo sapiens
  source 1..2558: mol_type = unassigned DNA
ccgggtcgcaccgctacagttctcgcagtggcaaaggcggcggcggcggcggcggcagcggcagcagcaggtggagcgagctacagcgtttggcctgaaacccactgctgcagccacccgggctggagttggcccgttgggtggagccagtgctcgccccggtccgacccccggtttccgggacacttgggttgcggaggccggctggccggagtcacggttggggacgggcgcgcctcggagcgcacggctgcgctggaagccgcgtctggggcgcaggaccaacgggacctacctcctcccggctacctaaagactccttctctcgggaaagagcgctgcccggctctgggatttgggaggagctcggaggccgctcgggcacctcgctggacactatccgtttgcgccccggtggcgcgggagggtccggagcggagcgctcgtctctcctcagcggtttagtggagaaaagcagagagctcttcctggggcgaatgggacctcctccctcggtcctccgtggagtcgtcgcatcgcttgtcgtgttggtctcgaggggctcacagcttggcactaatttgcaggtgttcgctgctgatttggtttcttcttcgatttgcggacggttccctccagcgactctcgacacacgttttcctgtcttcgccggagggccgggtctggggtcgccggagcctgcgggaatccagcgcttattcgctgaccctcgagtcgcttcgctagctgtgcgccctcctgggcactagcctggagaggagcgtgcagacgcggctccttggagggagtgcggtcctctagggaggcatcgggctcctaggggcttcttggcgtgtgtggtgggattggggtccgccggccatggccttcactttcgctgcgttctgctacatgctgtctctggtgctgtgcgctgcgctcatcttcttcgccatctggcacataattgcctttgatgagttaaggacagattttaagagccccatagaccagtgcaatcctgttcatgcgagggaacggttgaggaacatcgagcgcatctgcttccttctgcgaaagctggtgctgccagaatactccatccatagcctcttctgcattatgttcctgtgtgcgcaagagtggctcacgctggggctgaatgtccctctacttttctatcacttctggaggtatttccactgtccagcagatagctcagaactagcctacgacccaccggtggtcatgaatgccgacactttgagttactgtcagaaggaggcctggtgtaagctggccttctatctcctctccttcttctactacctttactgcatgatctacactttagtgagctcttaacgcaaagaccatgcacatcatcagagactgagatgggagaggcctgagacggagaggtgcatttctgctggtgactggaggagggaccagaatgaggatacgtgagaaatagacccggcaggcagtcagactgaatgggagctggaatcacgcagcagctgggagccgagttaaccctgcgtgtctgtgtcaccctgtttgtcaatctttggcattcgaattccacacacggggtcctagagcccttctgagcatcagtggtgtgggggagtaggtgacgaaacactagacctctcctgagagagaattgctgcttcctgaatccacttcattgaacagcaccttgcaagttcaaatgagttcctgggagcggaggctggaaggccacaaggtgcttgctaaggaacagaatgacccagagtcaaggccaagtctgcagggacctgttgaaagcctcgagaatgtcttggctgcccaagactcttgttgcctttcttccaagccatggccatgccctttttctcaaatgggaggggctggagggtgtgtgggatttgtcttcagctgcaaccagccttgagcctgctgggctattttcagctgaggaggggtgaatataggaaaaatgcatttttgaaacgtttgcaacatgatcaaggtgttagttctccaccacacaagttgtattcttcttttgccacctcaaaccatcacagagtctttaaatgcaaatcaattggtcaatgctagtcaaagctatgttcttacaaaaaccccagacagctcagagctcagaaaatcctgtggagtggctgctctgtaccgtgggcatccggcagccaggaagtgagacaacataattataactttgttttatgatgctgcatcatttgtactgtttaggtcgacgtgaggacatcatcttatttagaattttccgtttggcattctcttttgggtgggagttatgctgggggttgtaaataatgacaaggctgagatttttatgatgtttaaattgggcacaatgattttgaccttattccccaaacttcttttcttttctactgtttaacatacacaggctatttatacacgtccccagctcccatctgaaacctgtgactcaggtttatgaatggtgtttgtgtagcaacacattgtgtgctatgtttattaaaatgcagcgacaa

SEQ ID NO: 4379 - DNA, 21063 bp, Homo sapiens
  source 1..21063: mol_type = unassigned DNA
aactttgcaacccgagcgcgcacgctctgcgctcggccctgccagggcggcacgggagggcggcgcaggaggtgggacctgcgccgggaaggctccgggacgccagcgcacgcggagcggggaccccggagagccagcaggcgagaagaccggccgagggagagccgatcgcgcctcgagagatccgaggaagtggtcgcgggccgggaggctcccgtgccgagccgaggccaggggtctggggtcgcagcccggcgtgcctgcagctgccgtcgctcgggagcagcagctgtgcccgggatcccggcggcggcgggggaaggaggagctgcagctggactgtggcagctggagggagagggccgggctcccctggcggagccgcgctgggacgactggctgaccgcggccatgcagtcttgacggagtcgctcgggcgcaggggagcagccgcgggcgcgccctcccgggaaggggcaccggagcgcaggcagcagcactttatctgcgactctccagcccagcgagaggcgaagcggtttaccatggaacccgtgaccaagtggagccccaaacaagtggtggactggactagagggttggatgactgcctgcaacaatatgtccacaagtttgaacgagagaagatcaacggcgagcagctgctgcagatttcccatcaggacctggaggagctgggggtcacacggattggacaccaggagcttgtgttggaggctgtggaccttctctgtgcactgaattatggcctcgaaactgataacatgaagaacttggttctgaaactgagagcatcttcccacaatttacagaattacataagtagccgacggaaaagtcccgcttacgatggcaacacctcccgcaaggcccccaatgagttcctgacctcggtggtggagctcatcggcgccgccaaggccctgctggcgtggctggaccgggctccgtttacagggatcactgatttctcagtcacgaagaacaaaattatccagctttgcttggacctgaccactacagtccagaaggattgctttgtagcggaaatggaggataaagttttaactgtggtcaaggttttaaatggcatctgtgacaaaacaatccgatctaccacagatcctgtgatgagccagtgtgcatgtctggaggaagttcacttaccaaacattaaacctggggaaggcctgggcatgtacatcaaatcaacctatgatgggttacacgtgattactggaaccacagaaaattctcctgcagacagatctcagaagattcatgctggtgacgaagtcattcaagttaatcagcaaactgtggtgggatggcagctgaaaaatctggtgaagaaattgagagagaatcccaccggagttgtgttactgcttaagaagcgccccaccgggtctttcaactttactcctgctcccctgaaaaacctacggtggaagccacctcttgtacagacctcacctccacccgcgacaacccagtcccctgaaagcactatggatacctcactgaagaaggagaagtcagccatcctggatctttatattcctcctccgcctgctgttccctactctccccgggatgagaatggcagttttgtttatggagggtccagtaagtgcaaacaaccattgcctggtcctaagggttcagagtccccgaattccttcttggaccaggaaagccggagacgaagattcaccattgcagactcggatcagttgcctgggtactcggtggaaaccaacattctgcccacaaaaatgagagagaaaacaccatcttatggcaagccacggcctttgtccatgcctgctgatgggaactggatggggattgtggacccttttgccagacctcgaggtcatggcaggaaaggggaggatgccctttgccggtatttcagtaacgagcggattcctccgatcattgaagagagctcctctcccccataccggttctccagacccacgaccgagcggcatctggtccggggtgcggactacatccgaggaagcaggtgctacatcaactcagatctccacagcagcgccacgattccattccaggaggaagggaccaaaaagaaatctggctcctcagctacgaagtcctcgtccacagaaccgtccctcctggtcagctggtttacgcgcctcaaactgttgactcactgagagggaccctgctcaggccacctgcctggctcctgccccaagtgccttgcttttacagtggacagcctcttctcgtttcagcctcagtattatgtagggaccttatgcaatttctttttcttttgaaaagttatctactgcccttcttggaagtttgcaggattggatgggaacaaattcagaggatcttaggtgctggcttgtggagacaaaaggagggaaatgggtagagcctgtttgtcttgcttccccagagatagaatgtgaagacacgcgctagaaatcgcagtcctggccagagacgttatggtcattgtgagggactggtggcattgttcctttttgaggggctggggggactcaaattggtggctgttttcacacagatgtgttggtttgtggtccaacttctttatctgaaaaagccagtgagaaaacatttttgatttgatttttctaaactatctaccatattttaagtgtagcagctttgactttgcaataacgtggcaagtatctgatttctcctttgaggcagaggtttaagtgtaggcctgttacacttgtttgatacctttttcatgacagtctcagtatagatcagttggtacagaaatacatgaacacattttgatagggcttatttcacacaaagaagtttatggttatttgtgtggggtggtgttgttatatattattgtctttaagggaaaagaagctataagattcgctgacagccaaagtatcatttagaaaagtgaagcaacaagatttaggttgatgaaagatacatgagtttgcattttgacctgttcagtgtctgtcttccagcacggtgtgtacacttcttcaaaattgtacacagtttgctaattagaaatatcttggaaagcctcatggtcactaattttcaactagcatcaggtattttgaaaacgtgtgtctggatattaactcttgtttaaactgaatgtatgatattttgttagaatggaaaagtactatcttgttaatttaagtattttaaatatagttgtatatttttcttactcttagtcacctgtaattgaaatatttctgttttgcgtcatacacgaagctagtgaaaaagaaagtgcaaggcattttcagatgagcaagtgactatcgtggctgttgccagcagggcagtattgttaaaaaaaatcaaaataaaccctcccaagcattttgggattttatggattagaaatggaagaacaggagaagcatatgcaaagtgaaattgcacgaggggaattttctgaggtatcttcctaggcagagccgaaatctcctactccaaaatgccctttctcataccaccggaattgttgagtttgctgaactgcctggaattcagcccatgaaaatcactggagttaggaaacatcttccctttaaaatgcttctggtgtggttaaaggaactagcaaccactcatgtataattactgtgactgaattcagtcaggctggttttttttgtttgtttgtttgtttttgagatggagtctcaatctgtcacccaggctggagtgcagtggcgcaatctcagctcactgcaacctccaccttccaggttcaagcgattctcctgcctcagcctcccatgtagctgggattataggtgcccgccaccatgcctggctaatttttgtatttttagtggagacggggtttcactacgttggccaggctggtctcaaactcccaacctcaactgatctgccggcctcagcctcccaaagtgctgggattacaggcatgagccaccacacccggctcagtctggctgttttcttctctacctctaagacaactgccatgaagatctggtatttcggcctggcgcagtggctcatgcctgtaattccagaactttggggggccaaggtgggtggattacctggggtcaggagttcaagaccagcctggccaacatggtgaaaccctgtctctactaaaaatcagcttcgcatggtggtgggcacctgtagtcccagctactcgggaggctgaggcaggagaatcacttgaaccctggaggcggaggttgtagtgagccaagatcaggccactgcactccagcctgggtgacagaaggagactctgtctcaaaaaaaaaacaaaaagaaaaagatctggtatttcatggagacatggagacccaagggtgtttggcagatggagagaagaggcttgcagtgtgtgaccacagggtgttcaacacactaggagggtggggtgtgggctggggaggtctcgtgtagggcactggtgatgaggagggagctgtgtacgaggggcgagccagccctgcctgttttactcttgtcttgagctggctttatgcccaggaagtgggtggcaacatctcctcttactccccagattgtggggagaactctaagagctgtagttccactggatgatgagttaaatcactctggaggccttagctggctggtgagctctttttctgtggggaaaatgccacttgtgaattgaacagccatcctttaagtgaatattcggcagtcagtcttcattataggcagtggccaaccagattggtgcttttcagcctttgttccctggagtcccaggacccgcgagagaagttcctggctcctctacttgcagtcaccctccacagcttcatctttctttttatttgaggttttctcctgaattgtgtttgaaaaatatattgctgctaaaaaaaaaaaacctttgtaaacctctactatggacatacataaataatagtttaatatggatttcttagaaattaatggaaactgcttgcctcagtagtaatccaggtttaattgtggacgtgtgttcacatatgaagttgcttgatgatgctttttgacaggattctttatttttatttctttaaaaaaaatttttttttttttctgagacagattctcactctgtcacccaggctagagtgcagtggtacaatctcaactcactgcagcctctgcctcccaggttcaggcaattctcctgcctcagcctcccaagtagctgggattacaggtgcccgccaccacacctggctaatttttgtatttttagtagagatggagtttcaccatgttggccaggctgatcttgaactccttgacaggatactttacaagagtgattgttaaaactctcccagacacaactcaacacctacccctattataatattttatagcatcacttttcaatcttcaaatgaaaatcatggatgatgaagcttaccttcactcataaaaacatcactccatttactattctgaaatgaaactagcaggtaatataactagcctctaaaacatacccatcagtgacgttctaactgaaacagataagatattttataatgaaataattattttcatatgtacatattctagcatggttatattacaagatgtaattaaactactaagcagggcacatactttgtatgtgtgtgtataaatataaatatgtgaaaaatcaccatgaatgtggtagttaccaattcagacctgctgcattggcagttcaataccaggaaaggggtcgatgtcagcagtatgattttctaaaatgtggccaattctttagataaagttctaggcatacctagtctgtaatggcttcactcatatagtgcttgctgtgtgcctggcattgttctaatacctttctaataaatctatgaggtgagtactgctgttagtcccgttttgcatatgagggagttacccaggttatgtgctagtcatcctggttatgtgctaataatggcagagctgggattaaaatgaaagcagcctggctctggctttcttgctcataatcactcagtatataggcttccttccatttatagaattctctcattgcattcttgaaaaatccaaagcatattaaaactgggctgaaaattctgtgtgtttatatataaaatgaaatgagatcatagatttgttattgtaaactgagttcccatctatatgaatattgggcggggcaattgaaagttgtgttgatgagtcagctctttgttgtgagggctgtaagctgcagggcttgtgtatcacgcatgctccaacaggttaaatctcagtagtggccgcccatcagtggcacccctaacatgctcacatttccagaactgcctcttgggcggaggtgggggagggtaccatctctttcagaacaagtattttaaaagaaatcctgtatcctccttaagtagtatttcagtctatatatttgtccatttcctatctctgcttctctctcagttctttccccaccaaacctgaaatttcagaatctattttgtgggctttctttttttaattttttccctggaagaccatgaacattcctctttaggttgttagtattgcagcaaaccctgaggtattgacacaaaacttttcatccgccaaagagctcgagtaagtaaatctgtctgacatttgaatgtcaccagcaaagcatgagactcatgctgccttttgccaccataggcatgaatggtatggagaagtaggcctgacttgttttcttctattgtagatgagattagttttgtagaccattagttcacattttgctcctacccttgtgcataaaatcactgcatcatttccgtggggatgagactactgcaagctacttccttggagattctgtggaagatggacatcttaaaagtaaactacttttggtatgactgctcattggcttggccagtgatacttgatgttatttattttgtgagttactctgtgtcttaatcagctcaggctgcaataacaaaataccatacactgggtagcttaaatgacagaaatttctcaccgttctggaggctgggaagtccaagatcaaggtgagttcctggtgagcacccttaccctggtttgctgatagccatcatcttcccattgcatccttacatggcagagagagagaaaggaagcaagcaagctctcctttcccttcttgtgagggcgctaatattcatgagggctccaccctcaggacctactcacttcccaaaggcccacttatggtattagctccgcctcctaataccattgctttggagattagggtttcaacagatgaattttgggaggacataaacatgcaatccatagcactctgcttttgtatatttttcaaacctttcatgctaatcagctggaaggtgaatattttaaaatctattttaaaactggcttaaggagcacacaaaagctgatttctgatgtttcttccaatacgtggaaaattttgcatgatgtattaacccctagttagggtccctcaaccccagttgaggacctcaacacacatttggtaatacctaagggaatttaaatatatattttgtagcctatagcatatggaattagaaaaaaattagtctctttactgtaaaatttaccttttaattatttggaaatttcacaattgccaagtttcaacttaaagtttctatttatttggggccagaattattgccagaagtgtgctaatttgacaaagggtaccttttacataagtaaaggaaaaagtgattacatcatgttcagacctgctagagggccttgtttttcctctagttttaggggtgtggagtctgtcccaaaccctatatatgtgtgcatttgtgtatgtaaaagacaaattttttatactcaaaagtttgtcttaaataatggcctatggcctactgatttggatagaggagagaaattttgtctataagcaacaaaaaatgctacacagccaggagactgtcacacacagtttttcagaacctttgggccacatactgcactccccttccatagaaatacacatggggtcagtgattaaggactcaattctggttgtgacttggccatccataggcatattctaaagttctatggcaacctttatgaagctcgtcttctgagttgatcacctgttcatgcgctgcccatttacaacatacctcagggattaaaacgtgaggctacacctaaggaaagtcggtcctaatcctgcgtttcctcctgcatgtcactgaccattggagtcactgctctctgaggaagacagtttacagcctgagcattcatgtcacgctcacagccaacctgttacttgctggcctcctttaccaagctccttgtttcatgaagaagttgtgaaactgaagttggaggaaaaaaattaagaaataaacctcaaaggtatttaaaagggcagtagagtaattactcctcacacccagggataaggatattctcatcattttctctcctcttgcctggagcataaacattcagatgtttgtgaagaaatgattaaaaggagagaaaatatcaggagaaaaatgattaaaatgagagaaatgttcttccactgactagacccattaaaggggaggatttaactttattgttagaggggtgaaaactggattttaagatatttcttcaccattttgacatatcttgggctgaacattttgattattttagagaatcagggagcttcagaaatgaagtttaatataaagtaagattgtctctgaaggaagaaattgtccttttaactcagtgtcaggttccgttttcttactcatatctaaacttcctgtcactccaactgaggctgcaccaggataagaggagggatttgaggaattagcgcgaatttagaagcctttgacttttgggaatttgcatcaagcagatagaagcaggcgggggctcagcttttgaagttggatcatccagctgtctcactttgccacttatgggatctgtgacttgaagcaggtgactgacctctccactcctcagttatctatgaaatggggataatactagcatctacttcgaaggcttatggtgattaaatgagataatgtttttaaggccctttcttcgcatagtctggcacacagcatttaagagatgttgactcgtgttcctgtagtagcagtactgactccatctcagcctctagtgaataaggtattcagagctggccaacaggaaattgctcattcttttgtccataagcagcaaaataatgccagtgtgacactgtcagagggctgcagtgtggtcagtggcctagagatgcagcttttactgttagaaaactcactcggatgttttagccgattcagaactcaagaaatgacaaaagtctgtgattggacacacttttttttttttttttgagacggagtttcagtcttgttgcccaggctggagtgcaatggtacgatcttggctcaccgcaacttccgcctactgggttcaagtgattctcctgcctcagactcccaagtagctgggattacaggcatgtgccaccacacccggctaattttgtatttttagtagatggggtttcttcgtgttggtcaggctggtctcgaactcccgacctcaggtgatccgctcacctcagcctcccaaagtgttgggattacaggcgtgagccactgcgccccgcctagagtattctttcaatattgacttgatttgtcatcatcatatcttttctattaaatcccttccacttccttcaatgaaatcgtatatgaaaacaaagggaatcggagcattttgcccacctcctagttggctgaattatttttgcctcccattcccatcttgaagtggtattcctcaaactcgtttctatgtttcctgtggttttaaataaaggaataatgtagaatggtatctattttggacattctcatcgtgaaaaggaactcttacacaaatacaaagccaagagattgtgttgccattgttgaagctgaaaaggacagtcactggatgcctccccacccaaggccaaggctttggtaggtccaggaagtgaaaaggaaagagaagctatgggagagacaaagggaagtaaaaaatggttgttcggctcagcataacaatcacttttgtggggcttattggttgtgcataaatttcatccatttgggcacacacacagatgtgacacccagaccactcagacacttggctaacactgatgccgtcatcctgaatgttgtttctggaaggactttcatgaatagaatctatttcagattggccgtaagtctcgatttattgatccgcaccactggactggggtggggttgtgtccactttttccctgccccttccctgctttggctcttgtgattgtgtcctccgtgtgtcaggcagagccctgtgaaggtgtggatatgtggccatattttacctgcataatctgcagttcatatgattcagcctaatgggttgcaatgccctgaggacagagaccatactttttcttcctttgtctttttagcgaaattcaatcctgttctgcgcctgcgccacagttgcaggctgtactgtctgccctgtgcatctcacacacccccactgcactgtgcacctagtgatggccgcagatttgcttttactcatcttccagggcctaccctgttaattccatcacagttgcaggctgtactgtctgccctgtgcatctcacacacccccactgcactgtgcacctagtgatggccgcagatttgcttttactcatctgtttgcagggcctaccctgttaattccatcacagttgcaggctctactgtctgccctgtgcatgcatctcacacacccactggactgtgcacctagttgatgaccacagatttgctcttacccatctatttccagggcctgccactgttaattcctaggaaaaaagaaaaaacaagcatggtggattggttaaattggcattttatattgtttgtgttcatggccatgccaatgataaacaagagctggtcatgggcattcagatcagatgagcaattaaatcccctccaaaaaacagaaacctacttttagagaagaaaagaattaaaccaagatctttcagggttttgcttctccttttgtttttaaggcacttaaataaatggaagaacatgtaagctaaccgtgtttagagtactatgttttactagaaagtgctacccttctgcagatttctcctcaatgaaagaatgccactgaagcacctttaatggtgcctttatcctatagtcttattgaatcattctctttagccaacataaaatacaaagccagggtataagacttcatgtaggtggtaatttaaactaacaattagtgaggccgggcgcggtgggtcacgcctgtaatcccagcactttgggaggctgaggcaggtggatcacaaggtcaggagatcgagaccatcctggctaacacggtgaaaccccgtctctactaaaaatataaaaaaaaaaaaattagccgggcgtggtggcgggcgcctgtagtcccagctactcgggaggttgaggcaggagaatggcgtgaacccgggaggcgcaacttgcagtgagccgagattgcgccactgcactccagcctgggagacagagcgagactccgtctcaaaaaaaaaaaaaaaagaaaacaattagtgaatttttgctgatgctttccttaaaccccttacttagcacttagttctggattcttaaatcctgataatggactcatccttctcggtctagttaccccagtaagtcccaaggtcatccatatgaggtcctccttgatcttactctgaatagaattaactggtctcttctgtttttccatagcattgactcatcgtgttagaccagcttgaattgtgagcctttctaaagcagggtctgtataatttacccttatatttgctctgtaggcagagaaaatattattgaagtaactagatggtaaaattaactgtgcaatcagaaaagaagttagaaaaaattattaaaattttctgtgaaaattgttttaattttattaatatattaaagcattttgcagactattccataaagaattttattacattggctctcattttaaagaaaacattataccaggtgtcagaactcaatcatatttgtaggaagaataagccttggccatcaacaacgcttctttggttacaggattacaggaactgctgagaatgtaagcactttccgaagtccacaaagaactcatttaaagctcgtacaggcagtttcaaattagccagggaaaagttaatggtggggaggtaaggtcatagaatgctctataaatggaggcgacgtggaggacagttgcagttgtataacatttgattgaaggagagggatttggacctgaggaaaccaggtctataaatactaaggctggctgggcacagttggctcatgcctgtaatctcagcattttgggaggctgaggccggtggattgcttgagcccaggagtttgagaccagcctggacaacatggtgaaaccctgcctccaaacaaacaaaattaaccgagtgtggtggtgtgcacctgtagtcccagctactcaggaggctgagatgggaggatctcttgagcctgagaggtagaggctgcagtaagcccagattgcaccactgcactccagcctggtgacagagtgagactccatctcaaacaaacaaaacgtacatgcatatataggctgtagactaaatagtgaaatattactaagaaccttcatcccaaggggttgagtggtagaaccactgagaatattgttgctgctcttttggagacaacaaactgcattaataaaagtctgagaacaagaaagttgagttttcaagtaatgtcctttgcatattgctacatagggctcatctgagtctgtgatgttctactttgttgatgaaagaaaacaagtggaaattctgctcccccacacatcctgcactgcaaaaagataacaagtagcaggagatactcaattatgatgcagttcaacaaagaaaacaaattaaaataaagagatcctgggtggttaaatacagagtctcctttgtaaacagcaatggatgatgatgatgactgttaccagggctctgtatgatcattttcccaattctttggagtacttttttcaaaagcactcttgtagaattaactggaaacatagactacccttcactcattacatgggaaatgggattgaattctcttcttggcaatggaaaatacttgatgcatgcaaataagaaaactcttactttttccttctctccttgcagggggagcacgcgtcctaagcttgccaggaagccctgctctcctgccctgggcacctccgttccacttgaccttttccacctgtactccctgcattttggtctcttgctctggtctttagccttcgcattttcctgatgcagcccaaaccagtcacctctctcctagattcattctctgtgctcagaccatctctttcctttagttcctgtgacgaaagaaaatgtatttggccattggaggtataagcaacaaagaatccaacccacacagctttatatatgcaggttctctatatgctcttcttgtgaacagcgtggggagaggaaaatagacttggcaagaggactaagaacagaatcggacagttatctgatggctttcctaaggttcaggaaagaacagtggtccctttgttgggcctttctgttgtttctttgttttcaatttcactgatttctgctttttattttctattttcttctgtttcctttggaattcttctttttttttttttttttttttacttcttgtattaggctcatgctataacaaacaacccccaaatctcagtgactttacacactaagagtttacattttcctcatcaacgtccactttggatgttccaggttgggtaatgctctgtggctgtcctctagctagtgactcagggacttgggttgctcctggtgtctccagcgtggttatggtgtctccaattttggacttcaaggtgacccaggcattatccacctggtaaattgggagatgggtcccaggaaagtgaatactcaaccaacctggcctagaagtgacaataataaggccatgtgtggtggctaacagtcagaaacccaacaattgggagattgagctgggaggattgcttgagaccagaagttcaagaccagctgggcaccatagtgagaccctatctttcaaaaaaatataacaaccaggcttggtggtgtacacctgtggtcccagctatttgggaggctgaggtgggataatcgctggagcccaggagtttgaggttacagtaaaccaggtttacaccactgcactccagtctggatgacaaagcaaaaccctcatctcacaaaagaaaagaaatgacaatcacagccactgcaacttcaaggaaggttgggagagtgatattggtcaggatgagtggtctctgacatgtttcttaagttggatatttagcttattaatttacaactcttttctaatattaatactcaagactacattttccccaaaacatttattttgccatgttttgcaaggcttggtatatggcattttcattactctttaattctaactaatttttaatttctattatgatttattatttgatctatgaatcattttgaaatttgtttttgtaaccttggatagggaaagatttcttatagaagacagtaaaagggctgagtacaaaagaaaagactaataaattcagctacgctaaagcttagaacttttcctcatcataggacaccttaaagaaaatttttaaaaagttacaaattgggagaagattaaaaagtcctaagggttagcagtaagaatatatacatataattattacaaattggcaagagaatgacaaatcaacacaaaaacgagcgaaaaggcattttgcaaaagagaatcagatggtccatatgcatgtgaagcgattttcactagcgagcagggaaagtgaagtcaaaatcacagggagatgctgctctctacctgactggcaaaactgaaatgattagaaaatacttggaggatatcctagaacgatcagtgggatctggtatattatgtgtatgaggttaaattagcagtgagtattcacataccctatgactcagcagtttcattcctagatatatatcctggggattagaaacactaagtaggtgggtgcagtggctcacacctacaatcccagcactttgggaggccaaggcaggtggatcacttgaggtcaggggttcgagaccagactggccaacatggtgaaaccccatctctactaaaaatacaaaaattagccaggcgtggtggcgggcacctgtaatcccagctacttgggaggctgaggtgggagaatcgcttgaaccccggaggtggaggttgcagtgagctgagattgtgccactgtactccagcctgggcgacagaatgagactccatctccaaacaaacaaacaaacaaacaaaccactaactacctcagaggacaatgctaacatttcaaagtgttctagaagttggtttcccagaaaagaagtcaggctcttgtggagctccatggaaactggcaatgacccatgacttagggcagtgaagtctcatcaaatgcaaggcttagaccccattctgctgctgccgtcaggggaggcaagggctccttgttccccaaacatcgatgctaatgaagcaaatcctgctgctagtttgcagtgttgcctagctgcaaacacaacctctgatgatgccaatagagaggctggtgcctccttcatcatagagcttacaatccccacaaggtttcgggaccctcttttggattctgagggtgggctcctttagccatctgtttagtgccccagatgaaattgacagcaggggacctgcactccttctactgctttttctcaaggcatccccagcagagggtctctagggtgcctgttatgtgtgctgtttggccatctgcctttgtagaacacagcccaatgtctgttggcaaaaaaaggtttacatgtggtatattcttaccatggaatattctgcagcaagtaaaaatgaataaattacagctattcatatcaaagagatggattttattaatatagtgctgagtgggaaaaagcatcagaagacaacatataatggtacactctttttttttttttgagatggagtctctctctgttgcccaggctggagtgcagtggctccatctcggctcactgcaacctccacctcccaggttcgagcgattctcctgcctcagctgcccgagtagctgggactacaggtgcgcaccaccacaccaagctaatttttgtatttttaatagtgacggggtttcaccatgttggccaggatggtctctgtctcttgacctcatgatccgcctgcctcagccttccaaagtgctgggattacaggcatgagccaccatgcccagctacattctttttaaacattcagaaacaggtaaaactgaaaaatatataatttagacacaacacttatgtgaaaagaccaagtttaggatgttggttacctgtgacggggcagcaagattgtgggaaaggaaggaagctacaggtatgtgacagagagttgcattagcccaaatctctacagagctggtgtcaaggatgaaactattggtgttttatttggaagatacaagcccaaggcgaggtgagaaaaaagagaagggaagcaaaagaagacacaaagtgacacaaaatggcatgaactaaattacgttctctccaaattcacatattgaagtcctaaccccagtacctcagaatgtaactgtatttggagattcggtctttaaagaagtgattcaggctgggcctgattgctcacgcctgtaatcccagcactttgggaggccgaggcaggcggatcatgaggtcaggagattgagactatcctggctaacacgatgaaaccctgtctctactaaaaatacaaaaaattagccagttgtggtggcaggcgcctgtagtctcagctacttgggaagttgagggaggagaatggtgtgaacccaggaggtggagcttgcagtgagccgagattgtgccactgcactccagcctgggtgacagagtgagaccccgtctcaaaaaaagaaaaaaagtgattcagttaaaatgcagtcattatggtgggctcaatcaaggacatgtggacacagatatgtatgcacatggaggaaagaccatgtgaagtcggggagaagaaaaccagctacacactaaagaaagaggcgtcaggccgggcgcgatggctcccgcttgtaatcctagcagtttgggaggccaaggtgggcaaatcacttgaggtcaggagttcgagaccagcctggccagaatggtgaaaccctctctctactaaaaatataaaaattagctgggcgtggtggcatgtgcctgtaatcccagctacttgggaggctgaggcaggagaatcacttgaacccgggaggtggaggttgcagtgagccgagatggagccactgcactccagcctgggcaacagagtgagactccatctcaaaaaaaaaaaaaaaaaaaagcctcagaagaaaccagtgctgctgacaccttgatcagtcttccacctgcagagctgtgagaagacacatttctgttgtttaagctacccagtctgtggtattttgttatggcagccccaacaaactaatacacaaaatgatgcacagccttgctgactatcacttcaaaatgagccaaacagagacacaacggggcactaggcaattgtgtcccactcagtgaaacttctctggaaagctgtaaggtatagtccagagacgagaggaagggaagaagaaatttatcctctgggagcctcccatttcctgtctcctaatagtgagaatttttccatgagaagttaatgtccctatactttcacaatgtgttaccttcttttgttgctgttcaagatgccaagcctatgccctgcagtgtggccttttgtcagagtccataaagggcaggaggaactaggaactctgggtgtgtatggttggcccagctgcagagttgacagtcaaggggataaccaactctaatcagcctagaagggaacttggtagcctaggtgagttggtcaggcacaggctggggctaaggcaaggcaaatggctgaggtctaagacgtaggtggtgctgagaaaatgtggggaagcatacaagatttgtgactgatgagtaatattctagttcttggttaggataatgggtacatggggtgttccttttattattttcaaaatgaaatgaaataaaagagggatatgtgtggactgatgatgatgtataatgaatcaaagattatgattaacttaactctgcatacttgagtttgtttatttttctataaaaggagaatagcaatattaagtcttacagcccaggaatgaaatgtctttccatttgtttgtgtcttctttaatttatttcatcagtattttgtagttttcagtatacaagtctttcacctccttagttaagtttattcccaagtattttattattttgggtgctattatatatgggattgtttcgctaatttcctttttagatagttctgtgttaatgtatagaaatcgcaactgatttttgtatgttgattttgtattatgcaactttattgaattcctttattctaacatgtttaaaaaatggagtcttagggcgttctatatatgagacgatgtcatctgaagacagggacaaaacaattctacagtccatatgaaaccacaaaagaccatgaatagccatatcaatcttgagaaagaagaacaaagatagaggcatcacattgcttgatttcagaatgtataacaaaactacagtaatcaaaacagtatgttactggccaacagatagacatatatgtgaatggaacagaatagagagtccagaaatagattcacatgtatattgtcaactgatcttcaacaatggtgccaagaatacataatggggaaaggatagtctcttcaacacatggtattgagaaaatcagatatccatgtgcaaaagggggaaactggacttttatcttacatcacatacaaaacccaactcaaaatggattaaagatttaaacataaaatctgaagctgtaaaactcctagaagaaaacataggcgaaaagctctttgacattggtcttgtcaatgatttcatggatatgacccccaaaacacaggcaacaaaaacaaaaataagcaaagttacatcaaatcacaaagcttctcacagcaaaggcaacaatcaacagagtgaaaagaaaacctatgaaatgggagaaagtatttgcaagcgatgtatgtgataagggttgacatctaaaatatgtaaggaattcataactcaatagcaaaaaaaaaaaaacccaatttttacaaatgggccaaggatctgaatagcatgggctctggcatcttgaacagcaatgaaagaagctagttgacacattgcgagagtatagggatattaacctctcatgggcaaattctcatcaatgagaggaaatgggaggctcccagaggataaaaggtgctcatcatcactgatcatcagggcaatgcaaatcaaaaccaccgtgagatatcaactctcacctgtcaggatggctatcattgaagaaccaaaacacaacaaatattggtgaagaagtggacaaattggaacccttgcatactgttgatgggaatgcaaaatggtgcagccactaaggaaaacagtatgggtgttcctaaaaaatgtaaaaatagaactgccatgtgacctagcaaccctatttctggatatttatccaaaaaaattgaaatcaggatcccaaagaggtattagcatttgcaggttcattgccgcattattcacaatatccaagatacacaaacaatctaagcgtccatcggcggagaaatgaataaagaaaatgtatatacacatacaatggaatactatttagcttttaaaaagaaggaaattctgcaattattcaacaacatggataaatcttaaggacattacgctaagtgaaataaactattaacagaaagactaatatggcaggattcaatttatgtgggatatttaaaatagtcaacttcatagaaccaaagagtgaaatgatggtggccaggggctgaggggagtggggagttactaatcaataggcataaagtttcagtgaagtcaggtgaataagctctagagatttgtggtacaatattgcacctatagtcaacaatactgcagtgtacactgaacaatttgttaagatagatctcaccttgtgttcttactgaaaaaaaaaaagaaagaaaatagaacagaaaagcaattggattttaattctggaaactcctttctcttccttacatccaggaaatttgctgtttattttgaaaagcaaatttaaacctatttaagggagagagagctcttgtaaaaattcatttattagttctggaccaatgttatttataagctattatttcaaatgataaaaaataaatgcataatacatttgatgatagaacatttttctttttaaataaggcctgatttttcaaaaagcattgaatatgtttgtttctaatttccaaagcttgacagtttcttatgtttcattaaaagcagaagaattgttatgtatgcatgttcatatcacttttgaatgactcatgtggctacaaatgcagcaatctgtggttatcatggaccatgaactagataaacattcctgcttttcttaacattcctttcctgtgcctcattaactaatgtacataataaaacatctttatttcattttctttgca

SEQ ID NO: 4380 - DNA, 2347 bp, Homo sapiens
  source 1..2347: mol_type = unassigned DNA
gtcagtgtgttaatgaatgttttgttgaacccttttcatctatcaaggactgaaatatctgatttaatctcagtggtgcttaaaataaacttttgtggctgagtttactcaagcccttatttgaaagctattcttataggcaggcccagagctaaagactgccagcttgttggcccactgctgtctgttcctgggggcacattgggagccgtcgtcaggtttcttgacttggacttctgacttactactctctggacagtctggagagtaggtggatttcagttcagttatttttgattgctttgtagcggaaatggaggataaagttttaactgtggtcaaggttttaaatggcatctgtgacaaaacaatccgatctaccacagatcctgtgatgagccagtgtgcatgtctggaggaagttcacttaccaaacattaaacctggggaaggcctgggcatgtacatcaaatcaacctatgatgggttacacgtgattactggaaccacagaaaattctcctgcagacagatctcagaagattcatgctggtgacgaagtcattcaagttaatcagcaaactgtggtgggatggcagctgaaaaatctggtgaagaaattgagagagaatcccaccggagttgtgttactgcttaagaagcgccccaccgggtctttcaactttactcctgctcccctgaaaaacctacggtggaagccacctcttgtacagacctcacctccacccgcgacaacccagtcccctgaaagcactatggatacctcactgaagaaggagaagtcagccatcctggatctttatattcctcctccgcctgctgttccctactctccccgggatgagaatggcagttttgtttatggagggtccagtaagtgcaaacaaccattgcctggtcctaagggttcagagtccccgaattccttcttggaccaggaaagccggagacgaagattcaccattgcagactcggatcagttgcctgggtactcggtggaaaccaacattctgcccacaaaaatgagagagaaaacaccatcttatggcaagccacggcctttgtccatgcctgctgatgggaactggatggggattgtggacccttttgccagacctcgaggtcatggcaggaaaggggaggatgccctttgccggtatttcagtaacgagcggattcctccgatcattgaagagagctcctctcccccataccggttctccagacccacgaccgagcggcatctggtccggggtgcggactacatccgaggaagcaggtgctacatcaactcagatctccacagcagcgccacgattccattccaggaggaagggaccaaaaagaaatctggctcctcagctacgaagtcctcgtccacagaaccgtccctcctggtcagctggtttacgcgcctcaaactgttgactcactgagagggaccctgctcaggccacctgcctggctcctgccccaagtgccttgcttttacagtggacagcctcttctcgtttcagcctcagtattatgtagggaccttatgcaatttctttttcttttgaaaagttatctactgcccttcttggaagtttgcaggattggatgggaacaaattcagaggatcttaggtgctggcttgtggagacaaaaggagggaaatgggtagagcctgtttgtcttgcttccccagagatagaatgtgaagacacgcgctagaaatcgcagtcctggccagagacgttatggtcattgtgagggactggtggcattgttcctttttgaggggctggggggactcaaattggtggctgttttcacacagatgtgttggtttgtggtccaacttctttatctgaaaaagccagtgagaaaacatttttgatttgatttttctaaactatctaccatattttaagtgtagcagctttgactttgcaataacgtggcaagtatctgatttctcctttgaggcagaggtttaagtgtaggcctgttacacttgtttgatacctttttcatgacagtctcagtatagatcagttggtacagaaatacatgaacacattttgatagggcttatttcacacaaagaagtttatggttatttgtgtggggtggtgttgttatatattattgtctttaagggaaaagaagctataagattcgctgacagccaaagtatcatttagaaaagtgaagcaacaagatttaggttgatgaaagatacatgagtttgcattttgacctgttcagtgtctgtcttccagcacggtgtgtacacttcttcaaaattgtacacagtttgctaattagaaatatcttggaaa

SEQ ID NO: 4381 - DNA, 2023 bp, Homo sapiens
  source 1..2023: mol_type = unassigned DNA
acatgaataaacacggtgcagtccagaggggcagaagggagaagtgatgaatcttgctggtgaggaagctggtgcgtggttggtgtccagagaaggcctcaaaaaggaggagaagcttctggggagccttggaggatcaggaggagttggccagaccagatagggttggatgactgcctgcaacaatatgtccacaagtttgaacgagagaagatcaacggcgagcagctgctgcagatttcccatcaggacctggaggagctgggggtcacacggattggacaccaggagcttgtgttggaggctgtggaccttctctgtgcactgaattatggcctcgaaactgataacatgaagaacttggttctgaaactgagagcatcttcccacaatttacagaattacataagtagccgacggaaaagtcccgcttacgatggcaacacctcccgcaaggcccccaatgagttcctgacctcggtggtggagctcatcggcgccgccaaggccctgctggcgtggctggaccgggctccgtttacagggatcactgatttctcagtcacgaagaacaaaattatccagctttgcttggacctgaccactacagtccagaaggattgctttgtagcggaaatggaggataaagttttaactgtggtcaaggttttaaatggcatctgtgacaaaacaatccgatctaccacagatcctgtgatgagccagtgtgcatgtctggaggaagttcacttaccaaacattaaacctggggaaggcctgggcatgtacatcaaatcaacctatgatgggttacacgtgattactggaaccacagaaaattctcctgcagacagatctcagaagattcatgctggtgacgaagtcattcaagttaatcagcaaactgtggtgggatggcagctgaaaaatctggtgaagaaattgagagagaatcccaccggagttgtgttactgcttaagaagcgccccaccgggtctttcaactttactcctgctcccctgaaaaacctacggtggaagccacctcttgtacagacctcacctccacccgcgacaacccagtcccctgaaagcactatggatacctcactgaagaaggagaagtcagccatcctggatctttatattcctcctccgcctgctgttccctactctccccgggatgagaatggcagttttgtttatggagggtccagtaagtgcaaacaaccattgcctggtcctaagggttcagagtccccgaattccttcttggaccaggaaagccggagacgaagattcaccattgcagactcggatcagttgcctgggtactcggtggaaaccaacattctgcccacaaaaatgagagagaaaacaccatcttatggcaagccacggcctttgtccatgcctgctgatgggaactggatggggattgtggacccttttgccagacctcgaggtcatggcaggaaaggggaggatgccctttgccggtatttcagtaacgagcggattcctccgatcattgaagagagctcctctcccccataccggttctccagacccacgaccgagcggcatctggtccggggtgcggactacatccgaggaagcaggtgctacatcaactcagatctccacagcagcgccacgattccattccaggaggaagggaccaaaaagaaatctggctcctcagctacgaagtcctcgtccacagaaccgtccctcctggtcagctggtttacgcgcctcaaactgttgactcactgagagggaccctgctcaggccacctgcctggctcctgccccaagtgccttgcttttacagtggacagcctcttctcgtttcagcctcagtattatgtagggaccttatgcaatttctttttcttttgaaaagttatctactgcccttcttggaagtttgcaggattggatgggaacaaattcagaggatcttaggtgctggcttgtggagacaaaaggagggaaatgggtagagcctgtttgtctt

SEQ ID NO: 4382 - DNA, 536 bp, Homo sapiens
  source 1..536: mol_type = unassigned DNA; mol_type = unassigned DNA
aacattaaacctggggaaggcctgggcatgtacatcaaatcaacctatgatgggttacacgtgattactggaaccacagaaaatgtgggatggcagctgaaaaatctggtgaagaaattgagagagaatcccaccggagttgtgttactgcttaagaagcgccccaccgggtctttcaactttactcctgctcccctgaaaaacctacggtggaagccacctcttgtacagacctcacctccacccgcgacaacccagtcccctgaaagcactatggatacctcactgaagaaggagaagtcagccatcctggatctttatattcctcctccgcctgctgttccctactctccccgggatgagaatggcagttttgtttatggagggtccagtaagtgcaaacaaccattgcctggtcctaagggttcagagtccccgaattccttcttggaccaggaaagccggagacgaagattcaccattgcagactcggatcagttgcctgggtactcggtggaaaccaacattctgcccac

SEQ ID NO: 4383 - DNA, 776 bp, Homo sapiens
  source 1..776: mol_type = unassigned DNA
gtcagtgtgttaatgaatgttttgttgaacccttttcatctatcaaggactgaaatatctgatttaatctcagtggtgcttaaaataaacttttgtggctgagtttactcaagcccttatttgaaagctattcttataggcaggcccagagctaaagactgccagcttgttggcccactgctgtctgttcctgggggcacattgggagccgtcgtcaggtttcttgacttggacttctgacttactactctctggacagtctggagagtaggtggatttcagttcagttatttttgattgctttgtagcggaaatggaggataaagttttaactgtggtcaaggttttaaatggcatctgtgacaaaacaatccgatctaccacagatcctgtgatgagccagtgtgcatgtctggaggaagttcacttaccaaacattaaacctggggaaggcctgggcatgtacatcaaatcaacctatgatgggttacacgtgattactggaaccacagaaaattctcctgcagacagatctcagaagattcatgctggtgacgaagtcattcaagttaatcagcaaactgtggtgggatggcagctgaaaaatctggtgaagaaattgagagagaatcccaccggagttgtgttactgcttaagaagcgccccaccgggtctttcaactttactcctgctcccctgaaaaacctacggtggaagccacctcttgtacagctctatgcaagagatattatcagtatcactcctttacagaaga

SEQ ID NO: 4384 - DNA, 5217 bp, Homo sapiens
  source 1..5217: mol_type = unassigned DNA
gggtgcccgctccgccccccgggctatgtaaagcggccgggctcgggtcgtgccaccgctggactcccgtgtccctccgcgcaggcgggcggccccggagcgctggtgccggcagaggcggcgacggtggcgcccctcctcatcatgaacagaggcttctcccgaaaaagccacacattcctgcccaagatcttcttccgcaagatgtcatcctcaggggccaaggacaagcctgagctgcagtttcccttccttcaggatgaggacacagtggccacgctgctagagtgcaagacgctcttcatcttgcgcggcctgccaggaagcggcaagtccacgctggcacgggtcatcgtggacaagtaccgtgatggcaccaagatggtgtcggctgacgcttacaagatcacccccggcgctcgaggagccttctccgaggagtacaagcggctcgatgaggacctggctgcctactgccgccgccgggacatcagaattcttgtgcttgatgacaccaaccacgaacgggaacggctggagcagctctttgaaatggccgaccagtaccagtaccaggtggtgctggtggagcccaagacggcgtggcggctggactgtgcccagctcaaggagaagaaccagtggcagctgtcggctgatgacctgaagaagctgaagcctgggctggagaaggacttcctgccgctctacttcggctggttcctgaccaagaagagctctgagaccctccgcaaagccggccaggtcttcctggaagagctggggaaccacaaggccttcaagaaggagctgcgacaattcgtccctggggatgagcccagggagaagatggacttggtcacctactttggaaagagacccccaggcgtgctgcattgcacaaccaagttttgtgactacgggaaggctcccggggcagaggagtacgctcaacaagatgtgttaaagaaatcttactccaaggccttcacgctgaccatctctgccctctttgtgacacccaagacgactggggcccgggtggagttaagcgagcagcaactgcagttgtggccgagtgatgtggacaagctgtcacccactgacaacctgccgcgggggagccgcgcccacatcaccctcggctgtgcagctgacgtagaggccgtgcagacgggccttgacctcttagagattctgcggcaggagaaggggggcagccgaggcgaggaggtgggcgagctaagccggggcaagctctattccttgggcaatgggcgctggatgctgaccctggccaagaacatggaggtcagggccatcttcacggggtactacgggaaaggcaaacctgtgcccacgcaaggtagccggaaggggggcgccttgcagtcctgcaccatcatatgagtgttctcaccaccacttatgcccctagaagggaaggggagagggaaacgtgccctctgtttgatccttgttttgtgacattttttttttttttttttttactcaaagttaacctacctgtaactttttaaaaacttgtaaaataactgaccctcccttcctgtccgccctcttcccctctaatgctcacgctcccaacacaaggtgggcagggaggcaccattcaggaacctggaccaaagctgacgaggctgggccaagccagggatggggccacagccagaaccccgagccctacttccaggttctggttagctcagccccagcccagcccagctgctctgcccagagctgggtgagtggggagacacctcagagccccgcaaaacccactgaccggaggcaaaaggcagtggggctgggggtagttttccatggtcacagagaactagtggtggctctgagaaggggaggacctctgggctttgattccatctccttgtcttttttctttgtttttagagacagggtcctgctatttcccaagctggagtgcagtggtgcgatcatggctcactgcagcctcgaactcctgggctcaagcaatcctcctgagtgatcccatttcttaatcagtgtagccccaagaaggctggggctatttaccagggtagaaaaaggagcttacctcccacctttggtcctaagtccctgccccctccccttcacaccataactaggtaacagtttgataactagggaagaaagcagaacagttaagcagccgccacatccccgctggctgggggcctcactccaggaaggggctggactggctgtcctttccagtggcctggctccgctgtgtggatggggagatcggggccagaggcagaaccctggtgaggaagctccagtcctgctctctacccagcccatcttgcctccatggtgcctctggaggcctctgggcctcctctaacaggggctggtgggcaccaagagccaatggagtagacccctggctggtaagggccaagtcccaccggttgcttctgggaaggggtttctaacactagtctgtgtgctgtggttcctggggtgccctccactgccctctgttcagtaacagggccttgctaatcgggttgtcactcaacaaaagtgctttggatttaagttactatcctggctttgcccaacctcagcaacctgtaagactgataatgaaataaatcatgttaatcctagctgtgtgcagtctctcttacccttctgtgcccagctcagtcttccctagggctgggtgtattaggactggctttgtcccacagcttggggccatcggtcctgtctcccctctgctggccgggcacagctgtggtgaggttgggcagctgaacagtgttggctttcatgaggaggcagaaagcagaggctggcctcagactcatacagaaggtgggggttggctgggtacgagggatgtggagcacaaaagcctctcatcccccattaaccagggcaccaagcccacaggtgtccccagcccactggatcagaaagagttcagtaagaccggaagctcctggtatgggtttctcccagttctctagggaaggccacctgcaggtcactgaaacttcaagcaccagggaagatctaacatttgagtcccttccaggccatcagaggcctagtcagccacatgggaaacttccaagacctgactcaggcatcattccaccatggctaaggcaccagccggggaagacttgaaagaaaggggcaggagctcagatgaagagaaatcctaagttacctttctaggtcaaggcctgtccctggccatctctgaacttcagctagagcttcaagtctgtgcctggagctcctgggaaggctactcaccttgaacaccacgcttgacaggacagcatggtgcatgccgctgcatccgtgagcagtgtgtctcctgcatgcagaaagggagcagagaaggccaggggcttttgctaaaaatagtggccagaccagagctctggagccacctgtcccacctcaaatgggtctgggggtcaggaggcagggttttatctctgtctaccatctccctcgaacccacactgcaacaggaactgtgagagtctttgtaagtaaactgccctgtctaggtcagtacccacctgagctttggacgcacacagcttttagtacccacctgagctttggacacacacagcttctagtgatttctggggccccaccgtaaagtgagcatgctttctgaactcgcttctctgtgactgatgttaggctgggcccagaggcacagccggggcctgcctagcactcacatgctggacaggtctgggagaggcagagtgccccacctgccactaggctgggtgcccacagcccgcatgcagcagcttgctgcaccccaagtccaggtcgggctcagctctggctcacagactggagacaatgcagatgccagagcaaagggccaggaagggtcaaaacattttattctcttttttttttcttttttaataaagttaaacagtaaaacaaaaattcacaagctgcctccctgtccacccccgcctccctcccctgccctcggtcttcggcattggttccctttgctccaccccactcacagagacacagggcatccaactgagaaaacgaaactgctctaagcacacggagacgtgatgaagggaggaggtgaactgtttccacattcaagattaaactgagtgaatctgcattttctgggttctgggtggttgcccttcattagccaaattgaaaaaagaaattccctggaccagatgctgaaagagaaaagaggggttggtagttggctatggattttctaaggaagatcactttgctctgattatggaaaagtcttcaagggctgcttcaaactcaaacacagagagaaactctatgggtatcaaacagctcaggctgtttttgggtgcaagagggagcacgtgactgtattatacatgggtagcttctgacctcagcattatctatatagtacctttgctcttgcagagaagccttggtactaggcagttagagatgcctccctgaccctgcagagatgcggtggctaaaggtcccaaggcaaggggtgcctgggaaccttcctgtcttcatccttagcaacagccgagtggatagatgccctgctagatgagaattcagctgcccccgctcatgggcccctctgactcccaaagagctgcctaagaggcaatgagtgtgttggcttgtgatctgggaactcccaagaacagcaggcccacctaccttcaaagctgaagccgccaggaccgccaaagaatgccttgaagatattgtttggatcaaaatctgtagagcagggcaagtaacatggaagggaagaaaaggtgaaaaattagaaatgttcgaagagaactgatgacactgagaacagatctccaaagctttcctggagagtctcactcccctcctttcccaacacttcagactgcaagtgagcaaacctgccccatcccgtgcaaaacatgctacctgatcccactcctaggacatgttcccttctccttccaactgctgccccaaaggaagctttctctgcttcagcttgcttcattgggctgttttctcaacaaatggaatgccatttgcacttacacaagactttccccatactctgtctccctataatgctggagcggctactaaaaaggataaaatgtatcacttaaatgttaccaaaaataaatataagagcaa

SEQ ID NO: 4385 - DNA, 1019 bp, Homo sapiens
  source 1..1019: mol_type = unassigned DNA; mol_type = unassigned DNA
gctatgtaaagcggccgggctcgggtcgtgccaccgctggactcccgtgtccctccgcgcaggcgggcggccccggagcgctggtgccggcagaggcggcgacggtggcgcccctcctcatcatgtcgtccctggggatgagcccagggagaagatggacttggtcacctactttggaaagagacccccaggcgtgctgcattgcacaaccaagttttgtgactacgggaaggctcccggggcagaggagtacgctcaacaagatgtgttaaagaaatcttactccaaggccttcacgctgaccatctctgccctctttgtgacacccaagacgactggggcccgggtggagttaagcgagcagcaactgcagttgtggccgagtgatgtggacaagctgtcacccactgacaacctgccgcgggggagccgcgcccacatcaccctcggctgtgcagctgacgtagaggccgtgcagacgggccttgacctcttagagattctgcggcaggagaaggggggcagccgaggcgaggaggtgggcgagctaagccggggcaagctctattccttgggcaatgggcgctggatgctgaccctggccaagaacatggaggtcagggccatcttcacggggtactacgggaaaggcaaacctgtgcccacgcaaggtagccggaaggggggcgccttgcagtcctgcaccatcatatgagtgttctcaccaccacttatgcccctagaagggaaggggagagggaaacgtgccctctgtttgatccttgttttgtgacattttttttttttttttttttactcaaagttaacctacctgtaactttttaaaaacttgtaaaataactgaccctcccttcctgtccgccctcttcccctctaatgctcacgctcccaacacaaggtgggcagggaggcaccattcaggaacctggaccaaagctgacgaggctgggccaagccagggatggggccacagccagaaccccgagccctacttccag

SEQ ID NO: 4386 - DNA, 576 bp, Homo sapiens
  source 1..576: mol_type = unassigned DNA; mol_type = unassigned DNA
accgctggactcccgtgtccctccgcgcaggcgggcggccccggagcgctggtgccggcagaggcggcgacggtggcgcccctcctcatcatgccgtggcagctgtggcttggcccagacacagagacccccacctccaaagaggacgtccttagtaggtgccaagcatataagagtgaggccagtcccagaaccgcaggctcctggcgcgccccgcatgcctccagcacgtttacctttccgaagtggcaggaatggggaaagcgcacgcttaggagagcttcagacaagcttccctcttcctcctccacgaccagaagcggaaaggtgctcccggaccgaaagggaaagaaggtccagcactgccccgcttgggaaggcacccacaaccagtctagggactaggggtaaggccggcggggagcccgcgaatgacctgggctgacatctcttcccctccttacacagaacagaggcttctcccgaaaaagccacacattcctgcccaagatcttcttccgcaagatgtcatcctcaggggccaaggacaagcctgagctgcagtttcccttcctt

SEQ ID NO: 4387 - DNA, 587 bp, Homo sapiens
  source 1..587: mol_type = unassigned DNA; mol_type = unassigned DNA
gctggactcccgtgtccctccgcgcaggcgggcggccccggagcgctggtgccggcagaggcggcgacggtggcgcccctcctcatcatgccgtggcagctgtggcttggcccagacacagagacccccacctccaaagaggacgtccttaaacagaggcttctcccgaaaaagccacacattcctgcccaagatcttcttccgcaagatgtcatcctcaggggccaaggacaagcctgagctgcagtttcccttccttcaggatgaggacacagtggccacgctgctagagtgcaagacgctcttcatcttgcgcggcctgccaggaagcggcaagtccacgctggcacgggtcatcgtggacaagtaccgtgatggcaccaagatggtgtcggctgacgcttacaagatcacccccggcgctcgaggagccttctccgaggagtacaagcggctcgatgaggacctggctgcctactgccgccgccgggacatcagaattcttgtgcttgatgacaccaaccacgaacgggaacggctggagcagctctttgaaatggccgaccagtaccagtaccaggtggtgc

SEQ ID NO: 4388 - DNA, 581 bp, Homo sapiens
  source 1..581: mol_type = unassigned DNA; mol_type = unassigned DNA
gctggactcccgtgtccctccgcgcaggcgggcggccccggagcgctggtgccggcagaggcggcgacggtggcgcccctcctcatcatggatgaggacacagtggccacgctgctagagtgcaagacgctcttcatcttgcgcggcctgccaggaagcggcaagtccacgctggcacgggtcatcgtggacaagtaccgtgatggcaccaagatggtgtcggctgacgcttacaagatcacccccggcgctcgaggagccttctccgaggagtacaagcggctcgatgaggacctggctgcctactgccgccgccgggacatcagaattcttgtgcttgatgacaccaaccacgaacgggaacggctggagcagctctttgaaatggccgaccagtaccagtaccaggtggtgctggtggagcccaagacggcgtggcggctggactgtgcccagctcaaggagaagaaccagtggcagctgtcggctgatgacctgaagaagctgaagcctgggctggagaaggacttcctgccgctctacttcggctggttcctgaccaagaagagctctgagaccct

SEQ ID NO: 4389 - DNA, 2583 bp, Homo sapiens
  source 1..2583: mol_type = unassigned DNA; mol_type = unassigned DNA
ctccgcgcaggcgggcggccccggagcgctggtgccggcagaggcggcgacggtggcgcccctcctcatcatgaggcttctcccgaaaaagccacacattcctgcccaagatcttcttccgcaagatgtcatcctcaggggccaaggacaagcctgagctgcagtttcccttccttcaggatgaggacacagtggccacgctgctagagtgcaagacgctcttcatcttgcgcggcctgccaggaagcggcaagtccacgctggcacgggtcatcgtggacaagtaccgtgatggcaccaagatggtgtcggctgacgcttacaagatcacccccggcgctcgaggagccttctccgaggagtacaagcggctcgatgaggacctggctgcctactgccgccgccgggacatcagaattcttgtgcttgatgacaccaaccacgaacgggaacggctggagcagctctttgaaatggccgaccagtaccagtaccaggtggtgctggtggagcccaagacggcgtggcggctggactgtgcccagctcaaggagaagaaccagtggcagctgtcggctgatgacctgaagaagctgaagcctgggctggagaaggacttcctgccgctctacttcggctggttcctgaccaagaagagctctgagaccctccgcaaagccggccaggtcttcctggaagagctggggaaccacaaggccttcaagaaggagctgcgacaattcgtccctggggatgagcccagggagaagatggacttggtcacctactttggaaagagacccccaggcgtgctgcattgcacaaccaagttttgtgactacgggaaggctcccggggcagaggagtacgctcaacaagatgtgttaaagaaatcttactccaaggccttcacgctgaccatctctgccctctttgtgacacccaagacgactggggcccgggtggagttaagcgagcagcaactgcagttgtggccgagtgatgtggacaagctgtcacccactgacaacctgccgcgggggagccgcgcccacatcaccctcggctgtgcagctgacgtagaggccgtgcagacgggccttgacctcttagagattctgcggcaggagaaggggggcagccgaggcgaggaggtgggcgagctaagccggggcaagctctattccttgggcaatgggcgctggatgctgaccctggccaagaacatggaggtcagggccatcttcacggggtactacgggaaaggcaaacctgtgcccacgcaaggtagccggaaggggggcgccttgcagtcctgcaccatcatatgagtgttctcaccaccacttatgcccctagaagggaaggggagagggaaacgtgccctctgtttgatccttgttttgtgacattttttttttttttttttttactcaaagttaacctacctgtaactttttaaaaacttgtaaaataactgaccctcccttcctgtccgccctcttcccctctaatgctcacgctcccaacacaaggtgggcagggaggcaccattcaggaacctggaccaaagctgacgaggctgggccaagccagggatggggccacagccagaaccccgagccctacttccaggttctggttagctcagccccagcccagcccagctgctctgcccagagctgggtgagtggggagacacctcagagccccgcaaaacccactgaccggaggcaaaaggcagtggggctgggggtagttttccatggtcacagagaactagtggtggctctgagaaggggaggacctctgggctttgattccatctccttgtcttttttctttgtttttagagacagggtcctgctatttcccaagctggagtgcagtggtgcgatcatggctcactgcagcctcgaactcctgggctcaagcaatcctcctgagtgatcccatttcttaatcagtgtagccccaagaaggctggggctatttaccagggtagaaaaaggagcttacctcccacctttggtcctaagtccctgccccctccccttcacaccataactaggtaacagtttgataactagggaagaaagcagaacagttaagcagccgccacatccccgctggctgggggcctcactccaggaaggggctggactggctgtcctttccagtggcctggctccgctgtgtggatggggagatcggggccagaggcagaaccctggtgaggaagctccagtcctgctctctacccagcccatcttgcctccatggtgcctctggaggcctctgggcctcctctaacaggggctggtgggcaccaagagccaatggagtagacccctggctggtaagggccaagtcccaccggttgcttctgggaaggggtttctaacactagtctgtgtgctgtggttcctggggtgccctccactgccctctgttcagtaacagggccttgctaatcgggttgtcactcaacaaaagtgctttggatttaagttactatcctggctttgcccaacctcagcaacctgtaagactgataatgaaataaatcatgttaatcctagc

SEQ ID NO: 4390 - DNA, 622 bp, Homo sapiens
  source 1..622: mol_type = unassigned DNA; mol_type = unassigned DNA
atcatggtgagaggccgggcggggccgggcacggggtagcaccagggcgggaaacgagtgtcggggcccctcgggaggaagcgtcttgcaaacgaggacccggggctccgggttcgacttccagttttcttgaacagaggcttctcccgaaaaagccacacattcctgcccaagatcttcttccgcaagatgtcatcctcaggggccaaggacaagcctgagctgcagtttcccttccttcaggatgaggacacagtggccacgctgctagagtgcaagacgctcttcatcttgcgcggcctgccaggaagcggcaagtccacgctggcacgggtcatcgtggacaagtaccgtgatggcaccaagatggtgtcggctgacgcttacaagatcacccccggcgctcgaggagccttctccgaggagtacaagcggctcgatgaggacctggctgcctactgccgccgccgggacatcagaattcttgtgcttgatgacaccaaccacgaacgggaacggctggagcagctctttgaaatggccgaccagtaccagtaccaggtggtgctggtggagcccaagacggcgtggcggctggactgtgcccagctcaaggagaaga

SEQ ID NO: 4391 - DNA, 516 bp, Homo sapiens
  source 1..516: mol_type = unassigned DNA; mol_type = unassigned DNA
gtcccttgtggcttctagaagataggaaaacaagtggctccgagaggcgcttctgacacacagcacagcggcgggtagagctggatcctaattgcagaacagaggcttctcccgaaaaagccacacattcctgcccaagatcttcttccgcaagatgtcatcctcaggggccaaggacaagcctgagctgcagtttcccttccttcaggatgaggacacagtggccacgctgctagagtgcaagacgctcttcatcttgcgcggcctgccaggaagcggcaagtccacgctggcacgggtcatcgtggacaagtaccgtgatggcaccaagatggtgtcggctgacgcttacaagatcacccccggcgctcgaggagccttctccgaggagtacaagcggctcgatgaggacctggctgcctactgccgccgccgggacatcagaattcttgtgcttgatgacaccaaccacgaacgggaacggctggagcagctctttgaaatggccgaccagta

SEQ ID NO: 4392 - DNA, 689 bp, Homo sapiens
  source 1..689: mol_type = unassigned DNA; mol_type = unassigned DNA
agtcccagaaccgcaggctcctggcgcgccccgcatgcctccagcacgtttacctttccgaagtggcaggaatggggaaagcgcacgcttaggagagcttcagacaagcttccctcttcctcctccacgaccagaagcggaaaggtgctcccggaccgaaagggaaagaagaacagaggcttctcccgaaaaagccacacattcctgcccaagatcttcttccgcaagatgtcatcctcaggggccaaggacaagcctgagctgcagtttcccttccttcaggatgaggacacagtggccacgctgctagagtgcaagacgctcttcatcttgcgcggcctgccaggaagcggcaagtccacgctggcacgggtcatcgtggacaagtaccgtgatggcaccaagatggtgtcggctgacgcttacaagatcacccccggcgctcgaggagccttctccgaggagtacaagcggctcgatgaggacctggctgcctactgccgccgccgggacatcagaattcttgtgcttgatgacaccaaccacgaacgggaacggctggagcagctctttgaaatggccgaccagtaccagtaccaggtggtgctggtggagcccaagacggcgtggcggctggactgtgcccagctcaaggagaagaaccagtggcagctgtcggctgatgacct

SEQ ID NO: 4393 - DNA, 1517 bp, Homo sapiens
  source 1..1517: mol_type = unassigned DNA; mol_type = unassigned DNA
atttttagtagagacagggtttcaccatcttgaccaggctggtcggtagcacaaaagaaaggaggggcccttggcccaagatgggacgaatcaagcttgacaggatgattgccagatcttttttttttttttttttgagacgggggtcttgctctgtcgcccaggctggagtgcagtggggcaattcggcttactgcaacctccatctcccgggttcaagcaattctcctgcctcagccacccaagtagctgggattacaggcacccgccaccatacctggctaatttataaatttttagtagagacagggtttcaccatgttggccaggctggtctcaaacgccccgcctcaatttcccaaattgccgggattacaggtgcgagccactatgcccagcctattttatttgtaaaggaaaactggatttttctgcccaggattagagcaggagaaatgtaatgggccagcaaggctgctctcaggagaggccttcctcccctgtggagggcgagacatcctcatggggactcaattcagaacataacaggaaaaagcgagtgactccaaagacagccacaggtgtggagtctggaaatcaaaatcacagatactccactcctctttgtgtcttccagccccataatgtcaccccattatagtccaagacccttcctgtaccaggaggcccccccataggcctgcaaggtgtgtattaaactgatggtgacgttgtgactgcttgtccagatgggcccctgagtgaaatggggcactactgatagttccctggtggtcctgggaacactggggtatatggtcaccctaactgttgtgctggattgatagatagggttggtcacttgcccgaggccgatggctggtacatggcagagctgagatattcactgtgttctggctgtttccaccgtaccatgttgttcccagccctctgttttctttccaccccacttcccatgacttgcttcccctttgagacgtggtgctagtaaatcttagattcccttggcctgtactgcctgcctctgttacaaatgccttagagtttggagaagagatggaaagatctatacaatgtaaagccagagaattttaacttttttttttttttttttggagacggagtcttgctctgttgcctaggctggagtgcagtggcactatctcggctcgctgtatcctctgcctcctgggttcaagcaattctctacctcagcctcccaagtagctgggattacaggcgcccgccaccacgcctggctaatttctttgtatttttagtagagacggggtttcaccatcttggccaggctggtcttgaattcctgaccttgtgatccacccacctcggcctcccagagtgctgggattacaggtgtgaaccaccgcacctggcctgagaattttaactttttattgctctaaagttgccattagtttgaccaactaaccaatgaatgagctgtagtgggttgctggagaggtgatgcttagtgt

SEQ ID NO: 4394 - DNA, 572 bp, Homo sapiens
  source 1..572: mol_type = unassigned DNA; mol_type = unassigned DNA
agtaaatcttagattcccttggcctgtactgcctgcctctgttacaaatgccttagagtttggagaagagatggaaagatctatacaattcgtccctggggatgagcccagggagaagatggacttggtcacctactttggaaagagacccccaggcgtgctgcattgcacaaccaagttttgtgactacgggaaggctcccggggcagaggagtacgctcaacaagatgtgttaaagaaatcttactccaaggccttcacgctgaccatctctgccctctttgtgacacccaagacgactggggcccgggtggagttaagcgagcagcaactgcagttgtggccgagtgatgtggacaagctgtcacccactgacaacctgccgcgggggagccgcgcccacatcaccctcggctgtgcagctgacgtagaggccgtgcagacgggccttgacctcttagagattctgcggcaggagaaggggggcagccgaggcgaggaggtgggcgagctaagccggggcaagctctattccttgggcaatgggcgctggatgctgaccctggccaaga

SEQ ID NO: 4395 - DNA, 911 bp, Homo sapiens
  source 1..911: mol_type = unassigned DNA; mol_type = unassigned DNA
aggctggtcttgaattcctgaccttgtgatccacccacctcggcctcccagagtgctgggattacaggtgtgaaccaccgcacctggcctgagaattttaactttttattgctctaaagttgccattagtttgaccaactaaccaatgaatgagctgtagtgggttgctggagaggtgatgcttagtgtccgagtgttttgcgctgggcctcggtggtcctggtggcggatgttggtatgcccctgctcccctgccctgactgcacccgttttctcccggcagtcgtccctggggatgagcccagggagaagatggacttggtcacctactttggaaagagacccccaggcgtgctgcattgcacaaccaagttttgtgactacgggaaggctcccggggcagaggagtacgctcaacaagatgtgttaaagaaatcttactccaaggccttcacgctgaccatctctgccctctttgtgacacccaagacgactggggcccgggtggagttaagcgagcagcaactgcagttgtggccgagtgatgtggacaagctgtcacccactgacaacctgccgcgggggagccgcgcccacatcaccctcggctgtgcagctgacgtagaggccgtgcagacgggccttgacctcttagagattctgcggcaggagaaggggggcagccgaggcgaggaggtgggcgagctaagccggggcaagctctattccttgggcaatgggcgctggatgctgaccctggccaagaacatggaggtcagggccatcttcacggggtactacgggaaaggcaaacctgtgcccacgcaaggtagccggaaggggggcgccttgcagtcctgcaccatcatatgagtgttctcaccaccacttatgcccctagaagggaaggg

SEQ ID NO: 4396 - DNA, 560 bp, Homo sapiens
  source 1..560: mol_type = unassigned DNA; mol_type = unassigned DNA
aatgccgggagagcaaagccgctgagagtttgtcccgttagatccaggcgtgaaggacggactgtactacagggagcagatccccctagctcagtcggaggcgttcctaacggatcttttggagaaagtctgtgagcgaatgaacgactacaagcttgaggaagaccctgtgacgaaggagagaactttcaagagattcgctcctaggaaaggagacaaaatataccaagaatttaaaaaattgtatttttattctgatgcttacagacctttgaaatttgcgtgtgaaactataatagaagagtatgaagatgaaatatcctcacttatcgcccaggagacacactatctagctgacaagctgtgcagtgaaaaatcagatctgtgtgaaacttctgctaatcatactgagctctaggagtgccgttctgctggtcgtagagaggagtaaagtcacacccaaaggtttcagatgaggaaaccaaggcccagagaggaaaaggcacagcaggcatgacaccagtgccatcggtgtttgcttcacccttgcagattacgag

SEQ ID NO: 4397 - DNA, 2378 bp, Homo sapiens
  source 1..2378: mol_type = unassigned DNA; mol_type = unassigned DNA
aatcctcttggtgggtgctgaaacaatgccgggagagcaaagccgctgagagtttgtcccgttagatccaggcgtgaaggacggactgtactacagggagcagatccccctagctcagtcggaggcgttcctaacggatcttttggagaaagtctgtgagcgaatgaacgactacaagcttgaggaagaccctgtgacgaaggagagaactttcaagagattcgctcctaggaaaggagacaaaatataccaagaatttaaaaaattgtatttttattctgatgcttacagacctttgaaatttgcgtgtgaaactataatagaagagtatgaagatgaaatatcctcacttatcgcccaggagacacactatctagctgacaagctgtgcagtgaaaaatcagatctgtgtgaaacttctgctaatcatactgagctctaggagtgccgttctgctggtcgtagagaggagtaaagtcacacccaaaggtcaatgtctgcattttatgtttgcatgttgtctttcatgataagaaaaattttgtctcttgtttataccgtgtttgtctccgtttatgattcattttgaaaatctgttggttgacatcatgacaaaccctgcgtttttttataggtgaagctgaggagtacatgaaacttaaattaacctttgcagattttgataaatcaagcttgacaatagaggatttaattctgtattgaggaaaaaagcgaagacatttcataaacaaaatagggatttcataatgtatgctgcttattttataacagtgtatgtgcacatatgcaagcgcagtggctgtctgataagaactggatttgaatcctcaaatacttgattgcctataaatttaaggaaatacatggcaacaaattcaaaatgtggccttctgggtgagatatggctattagtgaaagaaacccactttttatcaggaatgaaattaaaatttttagaaaccacaagtttaaaaacccatctctaaaatttagtggaatgtgtaaaaactaatgaatgctttaatttatagtaaacaataattatattggcctctcaaacaccattctgagtttaagtggcttagaaagttgatttattattgcatcaggtgttaaaagatgacactagtgattgcgttttgtttcgctccaaactcttctggcttgtttgtttttcttctaaacgttttttttttggctcacatttagtgtgttgagtttactactaaataatctaccattcttctacaggaatggaaaaagagttgggacctggtgggaaattatcttttggccacacttaatatacaaagtctagtaacaatcactcccggaaatttctttatctctgttacatttgcattcaatggaatctgactttaatgattaaaaatgtcagggtatggtctacaccagtttctaaaaagagattctcattgtctttggtgacaatcaagtgggtaggatgctacaaatcccccccccaacccccccgacccaaaactctttgccatattgttacttagttgcttaaaaagcacattatgtgtttaaatcattctcctgactcttcagcaggaaacaattcttaaatttaggaaaatttaccaaagctaaggggaagggctttccatgccccctccccacctaaactctgattaaaagttagtgagttaatgtcacttaattacttgggtgcttcttttttgtcttgtctgtggctgcttaagtctgatggctcctacataacccagcgaactcgcacccgagctgacacacgatggaaatagaactgaataataattaacactattttccagtagggtaggacaattgttatttaaaacatagtccctatagctttatttaaacgtatctagttaaggttaatttggcatttaaagtagtaaatcaggaacattctcctaacttggattttcttgggaaatgcactaaacaggacaattattcctgaaaacctagtgaccttcacaggaacatggcgggacctgtgacactaagtaagcttcagtgaaaactgttcacggtcgtaaccgtagaagtgttgccaaatctgtttccatactctctttgatcatcatcaaacattctcaaatgtaggcaatgctaacactaattatagaaattaagaaaatgtgggctcctgtttgtaactaaacggacgtggggaggtgcacctcctgtcactgaggggtgcctttcatggacagtgatgctttgctttgaatggagagggcgaggaaccttgacttacagtgactatctaaggttgtgataaatatggcatttcaggtttttttcttggatttcccattaaaaatagtcttgtatcttgc

SEQ ID NO: 4398 - DNA, 1637 bp, Homo sapiens
  source 1..1637: mol_type = unassigned DNA; mol_type = unassigned DNA
actgcactccagcctgggtgacagagcaagactctgtctcaaaaaataaataaatgaataaataggaaagcacatttgaaggctgcacatggtggctgatacttgtaatcccagcaattcaggaggccaagcgtgcagggcgctgatggacgagatagagcacgacatcaccaaggctcggcagaagaagaccaaggtgggatccttccgaatcaatcccgatgggactcaggagaggagaaagatccccctagctcagtcggaggcgttcctaacggatcttttggagaaagtctgtgagcgaatgaacgactacaagcttgaggaagaccctgtgacgaaggagagaactttcaagagattcgctcctaggaaaggagacaaaatataccaagaatttaaaaaattgtatttttattctgatgcttacagacctttgaaatttgcgtgtgaaactataatagaagagtatgaagatgaaatatcctcacttatcgcccaggagacacactatctagctgacaagctgtgcagtgaaaaatcagatctgtgtgaaacttctgctaatcatactgagctctaggagtgccgttctgctggtcgtagagaggagtaaagtcacacccaaaggtcaatgtctgcattttatgtttgcatgttgtctttcatgataagaaaaattttgtctcttgtttataccgtgtttgtctccgtttatgattcattttgaaaatctgttggttgacatcatgacaaaccctgcgtttttttataggtgaagctgaggagtacatgaaacttaaattaacctttgcagattttgataaatcaagcttgacaatagaggatttaattctgtattgaggaaaaaagcgaagacatttcataaacaaaatagggatttcataatgtatgctgcttattttataacagtgtatgtgcacatatgcaagcgcagtggctgtctgataagaactggatttgaatcctcaaatacttgattgcctataaatttaaggaaatacatggcaacaaattcaaaatgtggccttctgggtgagatatggctattagtgaaagaaacccactttttatcaggaatgaaattaaaatttttagaaaccacaagtttaaaaacccatctctaaaatttagtggaatgtgtaaaaactaatgaatgctttaatttatagtaaacaataattatattggcctctcaaacaccattctgagtttaagtggcttagaaagttgatttattattgcatcaggtgttaaaagatgacactagtgattgcgttttgtttcgctccaaactcttctggcttgtttgtttttcttctaaacgttttttttttggctcacatttagtgtgttgagtttactactaaataatctaccattcttctacaggaatggaaaaagagttgggacctggtgggaaattatcttttggccacacttaatatacaaagtctagtaacaatcactcccggaaatttctttatctctgttacatttgcattcaatggaatctgactttaatgattaaaaatgtcagggtatggtctacaccagtttctaaaaagagattctcattgtctttggtgacaatcaagtgggtaggatgctacaaa

SEQ ID NO: 4399 - DNA, 2259 bp, Homo sapiens
  source 1..2259: mol_type = unassigned DNA; mol_type = unassigned DNA
ggggctcgatctgcctccgcgccagctggccgcgcgcccctgcccagcaccctcctgccggctgccgccctgaatcgctgcccggcgctctgagcatcgtggcatgtcctggggtctctgggccgggagtagctttgctgagagaaccctgattttgttcagctttgccaagagctgcagaggactggctggcccttcccagcccctgagggtgcggccccattggcctcagccaaacaccatcattgcgtctccacgccaggacgggggctgggccaggctgcgggacagctttggccaatgggagcgggaaggggcttgcgggggtgtcaggcaacgttttccttacaaatggaagttgacagggcagtagtgatcctccacacctccagatgtagggctctgagggtttgaagcttagaaccgcggacaccatctgacatccctgtgggaagaccaagaacgttgcagagaggtggagacagagtcaggaggtgcctgaggggctgaggccaccagtgctgacgagccaacctgtggacgtcttgccctgtggacatgagatttccccttactgctggttatggcttaattgtgtctgccccaaattcatgtgaaattcctaacccctaatgtgactgtgtgtgaagatgggcccagtgacctctaaagaggtcattaaggtaacatgggatcttggggtgggccctttagacaaggcccatattaaacttatgactggtgtccttataagaagagaagattaggacacagacacacacagagggacggccacgtgaggacatagggagaagacagctgtctgcaagtcaaggaggggcctcagaaggaaccaaccctcctgacaccttgatcttggacttccagctgcagaacgcgtgcagggcgctgatggacgagatagagcacgacatcaccaaggctcggcagaagaagaccaaggtgggatccttccgaatcaatcccgatgggactcaggagaggagaaagatccccctagctcagtcggaggcgttcctaacggatcttttggagaaagtctgtgagcgaatgaacgactacaagcttgaggaagaccctgtgacgaaggagagaactttcaagagattcgctcctaggaaaggagacaaaatataccaagaatttaaaaaattgtatttttattctgatgcttacagacctttgaaatttgcgtgtgaaactataatagaagagtatgaagatgaaatatcctcacttatcgcccaggagacacactatctagctgacaagctgtgcagtgaaaaatcagatctgtgtgaaacttctgctaatcatactgagctctaggagtgccgttctgctggtcgtagagaggagtaaagtcacacccaaaggtgaagctgaggagtacatgaaacttaaattaacctttgcagattttgataaatcaagcttgacaatagaggatttaattctgtattgaggaaaaaagcgaagacatttcataaacaaaatagggatttcataatgtatgctgcttattttataacagtgtatgtgcacatatgcaagcgcagtggctgtctgataagaactggatttgaatcctcaaatacttgattgcctataaatttaaggaaatacatggcaacaaattcaaaatgtggccttctgggtgagatatggctattagtgaaagaaacccactttttatcaggaatgaaattaaaatttttagaaaccacaagtttaaaaacccatctctaaaatttagtggaatgtgtaaaaactaatgaatgctttaatttatagtaaacaataattatattggcctctcaaacaccattctgagtttaagtggcttagaaagttgatttattattgcatcaggtgttaaaagatgacactagtgattgcgttttgtttcgctccaaactcttctggcttgtttgtttttcttctaaacgttttttttttggctcacatttagtgtgttgagtttactactaaataatctaccattcttctacaggaatggaaaaagagttgggacctggtgggaaattatcttttggccacacttaatatacaaagtctagtaacaatcactcccggaaatttctttatctctgttacatttgcattcaatggaatctgactttaatgattaaaaatgtcagggtatggtctacaccagtttctaaaaagagattctcattgtctttggtgacaatcaagtgggtaggatgctacaaa

SEQ ID NO: 4400 - DNA, 6031 bp, Homo sapiens
  source 1..6031: mol_type = unassigned DNA; mol_type = unassigned DNA
cgagagggagccagagacagcgcgagcggagggagcggcagggactgcgcgagcgggacgaggcgacgggcgcccgggctggcggagacgggcggccccacgccgggccaggcggggctcgcgggaggacccagtgaagagcctgggaaggggcgaggctcgccggcggtcggagcagcggggcgccagtcccggtcgctgtcgcgggcgggcgctggagaccgggacgccggcgctcggacggactgacttgctgaccgcccgccggaggcacaccccactccaccccaccccgcctcgccagcagcccggcgccggcgccgcctcccgcacgctactccctctgccaccccttccttctccacttcttttccgcctccgcctcttcttgtctcccgcggcgccagcgccttcccttggcccgggcgggggcctcggctccctgcagagctctccgtagtcagtgggggatatttcgttctagcggacaaccagcccctgagctgggcgagaggtgccaagggagcttctgtcccgaggaccaggggatgcgaagggattgccccctgtgggtcactttctcagtcattttgagctcagcctaatcaaagactgaggttatgaagtcgatcctagatggccttgcagataccaccttccgcaccatcaccactgacctcctgtacgtgggctcaaatgacattcagtacgaagacatcaaaggtgacatggcatccaaattagggtacttcccacagaaattccctttaacttcctttaggggaagtcccttccaagagaagatgactgcgggagacaacccccagctagtcccagcagaccaggtgaacattacagaattttacaacaagtctctctcgtccttcaaggagaatgaggagaacatccagtgtggggagaacttcatggacatagagtgtttcatggtcctgaaccccagccagcagctggccattgcagtcctgtccctcacgctgggcaccttcacggtcctggagaacctcctggtgctgtgcgtcatcctccactcccgcagcctccgctgcaggccttcctaccacttcatcggcagcctggcggtggcagacctcctggggagtgtcatttttgtctacagcttcattgacttccacgtgttccaccgcaaagatagccgcaacgtgtttctgttcaaactgggtggggtcacggcctccttcactgcctccgtgggcagcctgttcctcacagccatcgacaggtacatatccattcacaggcccctggcctataagaggattgtcaccaggcccaaggccgtggtggcgttttgcctgatgtggaccatagccattgtgatcgccgtgctgcctctcctgggctggaactgcgagaaactgcaatctgtttgctcagacattttcccacacattgatgaaacctacctgatgttctggatcggggtcaccagcgtactgcttctgttcatcgtgtatgcgtacatgtatattctctggaaggctcacagccacgccgtccgcatgattcagcgtggcacccagaagagcatcatcatccacacgtctgaggatgggaaggtacaggtgacccggccagaccaagcccgcatggacattaggttagccaagaccctggtcctgatcctggtggtgttgatcatctgctggggccctctgcttgcaatcatggtgtatgatgtctttgggaagatgaacaagctcattaagacggtgtttgcattctgcagtatgctctgcctgctgaactccaccgtgaaccccatcatctatgctctgaggagtaaggacctgcgacacgctttccggagcatgtttccctcttgtgaaggcactgcgcagcctctggataacagcatgggggactcggactgcctgcacaaacacgcaaacaatgcagccagtgttcacagggccgcagaaagctgcatcaagagcacggtcaagattgccaaggtaaccatgtctgtgtccacagacacgtctgccgaggctctgtgagcctgatgcctccctggcagcacaggaaaagaatttttttttttaagctcaaaatctagaagagtctattgtctccttggttatatttttttaactttaccatgctcaatgaaaaggtgattgtcaccatgatcacttatcagtttgctaatgtttccatagtttaggtactcaaactccattctccaggggtttacagtgaagaaagcctgttgtttaagtgactgaacgatccttcaaagtctcaatgaaataggagggaaacctttggctacacaattggaagtctaagaacccatggaaaaatgccatcaaatgaataatgcctttgtaaccacaactttcactataatgtgaaatgtaactgtccgtagtatcagagatgtccatttttacaagttatagtactagagatattttgtaaaatgtattatgtcctgtgagatgtgtatcagtgtttatgtgctattaatatttgtttagttcagcaaaactgaaaggtagacttttatgagaacaatggacaagcagtggatacgtgtcaatgtgtgcactttttttctatattattgcccatgatataactttagaaataaaccttaatatttcttcaaatatctctatttaattttgacactgaaataaccgtaaaggtttatttttctgttacctcaacaagaagaatttgaagacttcaaaatattgagcagaattcattcatacttaaaaatttattagccctgcattttcataggaagacacattatcttctggactatagctgttctaatggattataatcagaatggaagagagaaagcatattgactttttttgagcgacatctctgactttctttagtctttagctattactggatctcttaagacagcatgtgttaatcttaatgtatatcgttatcactgtgcagttgctgtttacttgaatagtattgtgttcctatattccaggtttaagtagatttcatgcctgggtggccaaacaacagtcttcattttttttaattgaaaagaagtagtgtctggatcagtaaaattatactgtgtgtgagtgtgaatataaatgtgtgtatgtgtgtttctgtcctgtaactgttacagtaatgtcataaagtgagaaaactgtgaccaagtataaacttttaccacttgctgcactcttgcacatggattcagtttctaaaattgagttcttcctgtaatcttgttgataaaaatactgactccaaccattcaaaaatttcaccccatccctccttaagagattggatcaagtattactaaattgacctttaggtattacacaagaccagtgcttagcaaaaaataatgacaggcatccaaggaagggatgtatttgtagtgttattgccaggaaaggagagtactttggtttctgagcaccgaatattgagcaatatgtcagtcactaaaaggaagacagttctacagaaaaacaatggtaacatttttcaatagcgtgtgtagatagtatgcactatatacatcacgttaaagtaggactatcacacccagcccatgtggctaaaaaagctgaatcagacagtggatgagacacacaacggcagtgaagaaccgatacacttggcattgacgtctagctatgctgtatctgtgctttgcccacatgcccttggtgacagctgagcacccagctctgtcttggtaggtttgggctaaggaacaaatctctcctttgctcgtggttagcaagatacactcaagcatgaagataaacacagctgctttcttcttacaccccggtctcatgctccttaatggcgccatgggtgcttgttgggcctttttccagtaaggaatgatattgctgaagaatctacttaaccctgacaaattttaattataatctcttcttatacagataaaacatgactcctacaaggccccaaggtttacatagtctgaagtgaagtacagagctggcatctatctggtgatttctagctctcgagatacccaagcagcctgatggggcagttccccttcttacggttcacgctctaaggcaggatgtggcttatgagatactttgcattgtctgtctgcacaccttgaatctgcctgctggctcccttactttacctctctgtcatgtgcagatgaaggctcagggtgctagaggattagtaagatctctttctaaagacaggagagattatttacaagaagaactcaccagggtttagtttgcatttaagaattgccagtcttttgtcctgcatcatcttgaacattaatccacatgtttcagagctcaccaggcagtaccaatgctcttttcacagctatgaagagctagagaaattcttgttatggtagaaaaatttcacgattcatttttgaaactgcatttgtgcgtatgcagtgtagattttatagtgtgttgtgctttcaagatctaaatcatatataataaattaagggacaatggggctgacagcactaaacttggtgcttattgatattctaagaaatatctgtgaaatatcatcacgtatgttatacaaccttcatttaaaaaggtttaaaactagttagattcactttgacacttttcatatcatttcttaacccaagtgacgaaaacattgtccccaatgaatatactcattagaattaccatttgttaatatcactcattaattaaccccataattagatccattaatttaaatgatttaaatttaagtaagttttataaggtctgacatcagaggtatcttactttcctctgaggatgatgtacttgccctgaccatgcattttaccatcacacatgttcagaaagggccaaattcccaacctgctcattttttttttatcagagtcatgatgaatcagtcctagaatgtttcatttgcacaagtagggctgcctccaagaggaacctctgatttattttgtatgaaatatatgtgaaaggatatgaatctgagagatgctgtagacatctgtcctacacttgagatgatttccaagcctctctggcactttgagttaagtctatctggtattaaatgccaaggaccttttgctgcctaaatccactctgcaggaaataggcccaaccaccagatgagaattaggccctggatgagtagcgctatagttactgtcctgttgattaatttctgccatttcatgtccataaaagagaccacccatatcatgcacacaattagatttctcacactctaactgtatatttgtatgatattttaaaatctcctaaatgctgggcaatggctattaacaattaattgtcttgcactggccttctgatgaaatgttaacaatgcctattgtaatatagaaaaaaacattctatctactgatttgggctgaatgtatgtaaataggtttctaaaaagtcagatgtttgagcagtggcctacaaatcagtaattttcggatgggagagtttctttacattgccgtggcatcttaaaagctatcttcatgtaaattgactgtactaggcctactggggatcagagttcccaagaaaggaaaccttttcttgtatctggattcaaatttatttccaatgtttcaagcgggaaacatgactctttattgtctgtaaatctaacattattacttttcctcttagaagaatattgtattgttagatgtttgttgagctggtaacatcgttgcaaccactgcaatatcttcgttagtaatctgtataatactttgtatacaagtactggtaagattgttattaaatgtagcttcagtcattaaattactatagcaaagtagtacttcttctgtaatatttacaatgtattaagcccacagtatattttatttcaatgtaattaaactgttaacttattcaaagagaaaacatctcatcatgtctattgtccaaagttacctggaatcaaataaaaattctagattaccatgaagaacataaaa

SEQ ID NO: 4401 - DNA, 5549 bp, Homo sapiens
  source 1..5549: mol_type = unassigned DNA; mol_type = unassigned DNA
ttagcttatcaggagaacttactgtaaaccgactctttttgtttcaaagatgtctcccactccaggcgaggagcgctcttggctgaggattgccccctgtgggtcactttctcagtcattttgagctcagcctaatcaaagactgaggttatgaagtcgatcctagatggccttgcagataccaccttccgcaccatcaccactgacctcctgtacgtgggctcaaatgacattcagtacgaagacatcaaaggtgacatggcatccaaattagggtacttcccacagaaattccctttaacttcctttaggggaagtcccttccaagagaagatgactgcgggagacaacccccagctagtcccagcagaccaggtgaacattacagaattttacaacaagtctctctcgtccttcaaggagaatgaggagaacatccagtgtggggagaacttcatggacatagagtgtttcatggtcctgaaccccagccagcagctggccattgcagtcctgtccctcacgctgggcaccttcacggtcctggagaacctcctggtgctgtgcgtcatcctccactcccgcagcctccgctgcaggccttcctaccacttcatcggcagcctggcggtggcagacctcctggggagtgtcatttttgtctacagcttcattgacttccacgtgttccaccgcaaagatagccgcaacgtgtttctgttcaaactgggtggggtcacggcctccttcactgcctccgtgggcagcctgttcctcacagccatcgacaggtacatatccattcacaggcccctggcctataagaggattgtcaccaggcccaaggccgtggtggcgttttgcctgatgtggaccatagccattgtgatcgccgtgctgcctctcctgggctggaactgcgagaaactgcaatctgtttgctcagacattttcccacacattgatgaaacctacctgatgttctggatcggggtcaccagcgtactgcttctgttcatcgtgtatgcgtacatgtatattctctggaaggctcacagccacgccgtccgcatgattcagcgtggcacccagaagagcatcatcatccacacgtctgaggatgggaaggtacaggtgacccggccagaccaagcccgcatggacattaggttagccaagaccctggtcctgatcctggtggtgttgatcatctgctggggccctctgcttgcaatcatggtgtatgatgtctttgggaagatgaacaagctcattaagacggtgtttgcattctgcagtatgctctgcctgctgaactccaccgtgaaccccatcatctatgctctgaggagtaaggacctgcgacacgctttccggagcatgtttccctcttgtgaaggcactgcgcagcctctggataacagcatgggggactcggactgcctgcacaaacacgcaaacaatgcagccagtgttcacagggccgcagaaagctgcatcaagagcacggtcaagattgccaaggtaaccatgtctgtgtccacagacacgtctgccgaggctctgtgagcctgatgcctccctggcagcacaggaaaagaatttttttttttaagctcaaaatctagaagagtctattgtctccttggttatatttttttaactttaccatgctcaatgaaaaggtgattgtcaccatgatcacttatcagtttgctaatgtttccatagtttaggtactcaaactccattctccaggggtttacagtgaagaaagcctgttgtttaagtgactgaacgatccttcaaagtctcaatgaaataggagggaaacctttggctacacaattggaagtctaagaacccatggaaaaatgccatcaaatgaataatgcctttgtaaccacaactttcactataatgtgaaatgtaactgtccgtagtatcagagatgtccatttttacaagttatagtactagagatattttgtaaaatgtattatgtcctgtgagatgtgtatcagtgtttatgtgctattaatatttgtttagttcagcaaaactgaaaggtagacttttatgagaacaatggacaagcagtggatacgtgtcaatgtgtgcactttttttctatattattgcccatgatataactttagaaataaaccttaatatttcttcaaatatctctatttaattttgacactgaaataaccgtaaaggtttatttttctgttacctcaacaagaagaatttgaagacttcaaaatattgagcagaattcattcatacttaaaaatttattagccctgcattttcataggaagacacattatcttctggactatagctgttctaatggattataatcagaatggaagagagaaagcatattgactttttttgagcgacatctctgactttctttagtctttagctattactggatctcttaagacagcatgtgttaatcttaatgtatatcgttatcactgtgcagttgctgtttacttgaatagtattgtgttcctatattccaggtttaagtagatttcatgcctgggtggccaaacaacagtcttcattttttttaattgaaaagaagtagtgtctggatcagtaaaattatactgtgtgtgagtgtgaatataaatgtgtgtatgtgtgtttctgtcctgtaactgttacagtaatgtcataaagtgagaaaactgtgaccaagtataaacttttaccacttgctgcactcttgcacatggattcagtttctaaaattgagttcttcctgtaatcttgttgataaaaatactgactccaaccattcaaaaatttcaccccatccctccttaagagattggatcaagtattactaaattgacctttaggtattacacaagaccagtgcttagcaaaaaataatgacaggcatccaaggaagggatgtatttgtagtgttattgccaggaaaggagagtactttggtttctgagcaccgaatattgagcaatatgtcagtcactaaaaggaagacagttctacagaaaaacaatggtaacatttttcaatagcgtgtgtagatagtatgcactatatacatcacgttaaagtaggactatcacacccagcccatgtggctaaaaaagctgaatcagacagtggatgagacacacaacggcagtgaagaaccgatacacttggcattgacgtctagctatgctgtatctgtgctttgcccacatgcccttggtgacagctgagcacccagctctgtcttggtaggtttgggctaaggaacaaatctctcctttgctcgtggttagcaagatacactcaagcatgaagataaacacagctgctttcttcttacaccccggtctcatgctccttaatggcgccatgggtgcttgttgggcctttttccagtaaggaatgatattgctgaagaatctacttaaccctgacaaattttaattataatctcttcttatacagataaaacatgactcctacaaggccccaaggtttacatagtctgaagtgaagtacagagctggcatctatctggtgatttctagctctcgagatacccaagcagcctgatggggcagttccccttcttacggttcacgctctaaggcaggatgtggcttatgagatactttgcattgtctgtctgcacaccttgaatctgcctgctggctcccttactttacctctctgtcatgtgcagatgaaggctcagggtgctagaggattagtaagatctctttctaaagacaggagagattatttacaagaagaactcaccagggtttagtttgcatttaagaattgccagtcttttgtcctgcatcatcttgaacattaatccacatgtttcagagctcaccaggcagtaccaatgctcttttcacagctatgaagagctagagaaattcttgttatggtagaaaaatttcacgattcatttttgaaactgcatttgtgcgtatgcagtgtagattttatagtgtgttgtgctttcaagatctaaatcatatataataaattaagggacaatggggctgacagcactaaacttggtgcttattgatattctaagaaatatctgtgaaatatcatcacgtatgttatacaaccttcatttaaaaaggtttaaaactagttagattcactttgacacttttcatatcatttcttaacccaagtgacgaaaacattgtccccaatgaatatactcattagaattaccatttgttaatatcactcattaattaaccccataattagatccattaatttaaatgatttaaatttaagtaagttttataaggtctgacatcagaggtatcttactttcctctgaggatgatgtacttgccctgaccatgcattttaccatcacacatgttcagaaagggccaaattcccaacctgctcattttttttttatcagagtcatgatgaatcagtcctagaatgtttcatttgcacaagtagggctgcctccaagaggaacctctgatttattttgtatgaaatatatgtgaaaggatatgaatctgagagatgctgtagacatctgtcctacacttgagatgatttccaagcctctctggcactttgagttaagtctatctggtattaaatgccaaggaccttttgctgcctaaatccactctgcaggaaataggcccaaccaccagatgagaattaggccctggatgagtagcgctatagttactgtcctgttgattaatttctgccatttcatgtccataaaagagaccacccatatcatgcacacaattagatttctcacactctaactgtatatttgtatgatattttaaaatctcctaaatgctgggcaatggctattaacaattaattgtcttgcactggccttctgatgaaatgttaacaatgcctattgtaatatagaaaaaaacattctatctactgatttgggctgaatgtatgtaaataggtttctaaaaagtcagatgtttgagcagtggcctacaaatcagtaattttcggatgggagagtttctttacattgccgtggcatcttaaaagctatcttcatgtaaattgactgtactaggcctactggggatcagagttcccaagaaaggaaaccttttcttgtatctggattcaaatttatttccaatgtttcaagcgggaaacatgactctttattgtctgtaaatctaacattattacttttcctcttagaagaatattgtattgttagatgtttgttgagctggtaacatcgttgcaaccactgcaatatcttcgttagtaatctgtataatactttgtatacaagtactggtaagattgttattaaatgtagcttcagtcattaaattactatagcaaagtagtacttcttctgtaatatttacaatgtattaagcccacagtatattttatttcaatgtaattaaactgttaacttattcaaagagaaaacatctcatcatgtctattgtccaaagttacctggaatcaaataaaaattctagattaccatg

SEQ ID NO: 4402 - DNA, 2122 bp, Homo sapiens
  source 1..2122: mol_type = unassigned DNA
tcggcttatttgttttccctcctcttaggattgccccctgtgggtcactttctcagtcattttgagctcagcctaatcaaagactgaggttatgaagtcgatcctagatggccttgcagataccaccttccgcaccatcaccactgacctcctgtacgtgggctcaaatgacattcagtacgaagacatcaaaggtgacatggcatccaaattagggtacttcccacagaaattccctttaacttcctttaggggaagtcccttccaagagaagatgactgcgggagacaacccccagctagtcccagcagaccaggtgaacattacagaattttacaacaagtctctctcgtccttcaaggagaatgaggagaacatccagtgtggggagaacttcatggacatagagtgtttcatggtcctgaaccccagccagcagctggccattgcagtcctgtccctcacgctgggcaccttcacggtcctggagaacctcctggtgctgtgcgtcatcctccactcccgcagcctccgctgcaggccttcctaccacttcatcggcagcctggcggtggcagacctcctggggagtgtcatttttgtctacagcttcattgacttccacgtgttccaccgcaaagatagccgcaacgtgtttctgttcaaactgggtggggtcacggcctccttcactgcctccgtgggcagcctgttcctcacagccatcgacaggtacatatccattcacaggcccctggcctataagaggattgtcaccaggcccaaggccgtggtggcgttttgcctgatgtggaccatagccattgtgatcgccgtgctgcctctcctgggctggaactgcgagaaactgcaatctgtttgctcagacattttcccacacattgatgaaacctacctgatgttctggatcggggtcaccagcgtactgcttctgttcatcgtgtatgcgtacatgtatattctctggaaggctcacagccacgccgtccgcatgattcagcgtggcacccagaagagcatcatcatccacacgtctgaggatgggaaggtacaggtgacccggccagaccaagcccgcatggacattaggttagccaagaccctggtcctgatcctggtggtgttgatcatctgctggggccctctgcttgcaatcatggtgtatgatgtctttgggaagatgaacaagctcattaagacggtgtttgcattctgcagtatgctctgcctgctgaactccaccgtgaaccccatcatctatgctctgaggagtaaggacctgcgacacgctttccggagcatgtttccctcttgtgaaggcactgcgcagcctctggataacagcatgggggactcggactgcctgcacaaacacgcaaacaatgcagccagtgttcacagggccgcagaaagctgcatcaagagcacggtcaagattgccaaggtaaccatgtctgtgtccacagacacgtctgccgaggctctgtgagcctgatgcctccctggcagcacaggaaaagaatttttttttttaagctcaaaatctagaagagtctattgtctccttggttatatttttttaactttaccatgctcaatgaaaaggtgattgtcaccatgatcacttatcagtttgctaatgtttccatagtttaggtactcaaactccattctccaggggtttacagtgaagaaagcctgttgtttaagtgactgaacgatccttcaaagtctcaatgaaataggagggaaacctttggctacacaattggaagtctaagaacccatggaaaaatgccatcaaatgaataatgcctttgtaaccacaactttcactataatgtgaaatgtaactgtccgtagtatcagagatgtccatttttacaagttatagtactagagatattttgtaaaatgtattatgtcctgtgagatgtgtatcagtgtttatgtgctattaatatttgtttagttcagcaaaactgaaaggtagacttttatgagaacaatggacaagcagtggatacgtgtcaatgtgtgcactttttttctatattattgcccatgatataactttagaaataaaccttaatatttcttc

SEQ ID NO: 4403 - DNA, 1252 bp, Homo sapiens
  source 1..1252: mol_type = unassigned DNA
atgaagtcgatcctagatggccttgcagataccaccttccgcaccatcaccactgacctcctgtacgtgggctcaaatgacattcagtacgaagacatcaaaggagaatgaggagaacatccagtgtggggagaacttcatggacatagagtgtttcatggtcctgaaccccagccagcagctggccattgcagtcctgtccctcacgctgggcaccttcacggtcctggagaacctcctggtgctgtgcgtcatcctccactcccgcagcctccgctgcaggccttcctaccacttcatcggcagcctggcggtggcagacctcctggggagtgtcatttttgtctacagcttcattgacttccacgtgttccaccgcaaagatagccgcaacgtgtttctgttcaaactgggtggggtcacggcctccttcactgcctccgtgggcagcctgttcctcacagccatcgacaggtacatatccattcacaggcccctggcctataagaggattgtcaccaggcccaaggccgtggtggcgttttgcctgatgtggaccatagccattgtgatcgccgtgctgcctctcctgggctggaactgcgagaaactgcaatctgtttgctcagacattttcccacacattgatgaaacctacctgatgttctggatcggggtcaccagcgtactgcttctgttcatcgtgtatgcgtacatgtatattctctggaaggctcacagccacgccgtccgcatgattcagcgtggcacccagaagagcatcatcatccacacgtctgaggatgggaaggtacaggtgacccggccagaccaagcccgcatggacattaggttagccaagaccctggtcctgatcctggtggtgttgatcatctgctggggccctctgcttgcaatcatggtgtatgatgtctttgggaagatgaacaagctcattaagacggtgtttgcattctgcagtatgctctgcctgctgaactccaccgtgaaccccatcatctatgctctgaggagtaaggacctgcgacacgctttccggagcatgtttccctcttgtgaaggcactgcgcagcctctggataacagcatgggggactcggactgcctgcacaaacacgcaaacaatgcagccagtgttcacagggccgcagaaagctgcatcaagagcacggtcaagattgccaaggtaaccatgtctgtgtccacagacacgtctgccgaggctctgtga

SEQ ID NO: 4404 - DNA, 1320 bp, Homo sapiens
  source 1..1320: mol_type = unassigned DNA
atgaagtcgatcctagatggccttgcagataccaccttccgcaccatcaccactgacctcctgggaagtcccttccaagagaagatgactgcgggagacaacccccagctagtcccagcagaccaggtgaacattacagaattttacaacaagtctctctcgtccttcaaggagaatgaggagaacatccagtgtggggagaacttcatggacatagagtgtttcatggtcctgaaccccagccagcagctggccattgcagtcctgtccctcacgctgggcaccttcacggtcctggagaacctcctggtgctgtgcgtcatcctccactcccgcagcctccgctgcaggccttcctaccacttcatcggcagcctggcggtggcagacctcctggggagtgtcatttttgtctacagcttcattgacttccacgtgttccaccgcaaagatagccgcaacgtgtttctgttcaaactgggtggggtcacggcctccttcactgcctccgtgggcagcctgttcctcacagccatcgacaggtacatatccattcacaggcccctggcctataagaggattgtcaccaggcccaaggccgtggtggcgttttgcctgatgtggaccatagccattgtgatcgccgtgctgcctctcctgggctggaactgcgagaaactgcaatctgtttgctcagacattttcccacacattgatgaaacctacctgatgttctggatcggggtcaccagcgtactgcttctgttcatcgtgtatgcgtacatgtatattctctggaaggctcacagccacgccgtccgcatgattcagcgtggcacccagaagagcatcatcatccacacgtctgaggatgggaaggtacaggtgacccggccagaccaagcccgcatggacattaggttagccaagaccctggtcctgatcctggtggtgttgatcatctgctggggccctctgcttgcaatcatggtgtatgatgtctttgggaagatgaacaagctcattaagacggtgtttgcattctgcagtatgctctgcctgctgaactccaccgtgaaccccatcatctatgctctgaggagtaaggacctgcgacacgctttccggagcatgtttccctcttgtgaaggcactgcgcagcctctggataacagcatgggggactcggactgcctgcacaaacacgcaaacaatgcagccagtgttcacagggccgcagaaagctgcatcaagagcacggtcaagattgccaaggtaaccatgtctgtgtccacagacacgtctgccgaggctctgtga

SEQ ID NO: 4405 - DNA, 1550 bp, Homo sapiens
  source 1..1550: mol_type = unassigned DNA
cagttgcataaagaacatagatgagagctttcattccctgctgaaaaggatgccatgcctccaccagtgattgccccctgtgggtcactttctcagtcattttgagctcagcctaatcaaagactgaggttatgaagtcgatcctagatggccttgcagataccaccttccgcaccatcaccactgacctcctgtacgtgggctcaaatgacattcagtacgaagacatcaaaggtgacatggcatccaaattagggtacttcccacagaaattccctttaacttcctttaggggaagtcccttccaagagaagatgactgcgggagacaacccccagctagtcccagcagaccaggtgaacattacagaattttacaacaagtctctctcgtccttcaaggagaatgaggagaacatccagtgtggggagaacttcatggacatagagtgtttcatggtcctgaaccccagccagcagctggccattgcagtcctgtccctcacgctgggcaccttcacggtcctggagaacctcctggtgctgtgcgtcatcctccactcccgcagcctccgctgcaggccttcctaccacttcatcggcagcctggcggtggcagacctcctggggagtgtcatttttgtctacagcttcattgacttccacgtgttccaccgcaaagatagccgcaacgtgtttctgttcaaactgggtggggtcacggcctccttcactgcctccgtgggcagcctgttcctcacagccatcgacaggtacatatccattcacaggcccctggcctataagaggattgtcaccaggcccaaggccgtggtggcgttttgcctgatgtggaccatagccattgtgatcgccgtgctgcctctcctgggctggaactgcgagaaactgcaatctgtttgctcagacattttcccacacattgatgaaacctacctgatgttctggatcggggtcaccagcgtactgcttctgttcatcgtgtatgcgtacatgtatattctctggaaggctcacagccacgccgtccgcatgattcagcgtggcacccagaagagcatcatcatccacacgtctgaggatgggaaggtacaggtgacccggccagaccaagcccgcatggacattaggttagccaagaccctggtcctgatcctggtggtgttgatcatctgctggggccctctgcttgcaatcatggtgtatgatgtctttgggaagatgaacaagctcattaagacggtgtttgcattctgcagtatgctctgcctgctgaactccaccgtgaaccccatcatctatgctctgaggagtaaggacctgcgacacgctttccggagcatgtttccctcttgtgaaggcactgcgcagcctctggataacagcatgggggactcggactgcctgcacaaacacgcaaacaatgcagccagtgttcacagggccgcagaaagctgcatcaagagcacggtcaagattgccaaggtaaccatgtctgtgtccacagacacgtctgccgaggctctgtga

SEQ ID NO: 4406 - DNA, 591 bp, Homo sapiens
  source 1..591: mol_type = unassigned DNA
gcagagctctccgtagtcagtgggggatatttcgttctagcggacaaccagcccctgagctgggcgagaggtgccaagggagcttctgtcccgaggaccaggggatgcgaaggatgtctcccactccaggcgaggagcgctcttggctgagggcaaagagattgaaagaggggagtcacataatcagcatacgtttatgaagattacccccacagctgtgtggcaagtgatcaaaaaggaacaggaccagagaagagcaggaaaactggtcagaaagcaggcgccctaaccctggattgccccctgtgggtcactttctcagtcattttgagctcagcctaatcaaagactgaggttatgaagtcgatcctagatggccttgcagataccaccttccgcaccatcaccactgacctcctgtacgtgggctcaaatgacattcagtacgaagacatcaaaggtgacatggcatccaaattagggtacttcccacagaaattccctttaacttcctttaggggaagtcccttccaagagaagatgactgcgggagacaacccccagctagtcccagcagaccaggtgaacatt

SEQ ID NO: 4407 - DNA, 1910 bp, Homo sapiens
  source 1..1910: mol_type = unassigned DNA
gcggcggcagcggaggcggcggctccagccggcgcggcgcgaggctcggcggtgggatccggcgggcggtgctagctccgcgctccctgcctcgctcgctgccgggggcggtcggaaggcgcggcgcgaagcccgggtggcccgagggcgcgatggctgctcctgtcccgtgggcctgctgtgctgtgcttgccgccgccgccgcagttgtctacgcccagagacacagtccacaggaggcaccccatgtgcagtacgagcgcctgggctctgacgtgacactgccatgtgggacagcaaactgggatgctgcggtgacgtggcgggtaaatgggacagacctggcccctgacctgctcaacggctctcagctggtgctccatggcctggaactgggccacagtggcctctacgcctgcttccaccgtgactcctggcacctgcgccaccaagtcctgctgcatgtgggcttgccgccgcgggagcctgtgctcagctgccgctccaacacttaccccaagggcttctactgcagctggcatctgcccacccccacctacattcccaacaccttcaatgtgactgtgctgcatggctccaaaattatggtctgtgagaaggacccagccctcaagaaccgctgccacattcgctacatgcacctgttctccaccatcaagtacaaggtctccataagtgtcagcaatgccctgggccacaatgccacagctatcacctttgacgagttcaccattgtgaagcctgatcctccagaaaatgtggtagcccggccagtgcccagcaaccctcgccggctggaggtgacgtggcagaccccctcgacctggcctgaccctgagtcttttcctctcaagttctttctgcgctaccgacccctcatcctggaccagtggcagcatgtggagctgtccgacggcacagcacacaccatcacagatgcctacgccgggaaggagtacattatccaggtggcagccaaggacaatgagattgggacatggagtgactggagcgtagccgcccacgctacgccctggactgaggaaccgcgacacctcaccacggaggcccaggctgcggagaccacgaccagcaccaccagctccctggcacccccacctaccacgaagatctgtgaccctggggagctgggcagcggcgggggaccctcggcacccttcttggtcagcgtccccatcactctggccctggctgccgctgccgccactgccagcagtctcttgatctgagcccggcaccccatgaggacatgcagagcacctgcagaggagcaggaggccggagctgagcctgcagaccccggtttctattttgcacacgggcaggaggaccttttgcattctcttcagacacaatttgtggagaccccggcgggcccgggcctgccgccccccagccctgccgcaccaagctggccctccttcctccctcaggggaggtgggccatgcagctaacccacccaccaaagaccccctcaccctggccccttgggctggaccctccaatgccagcgactcccaggagcccttgggggacgtgaggggagcctctcacatccgatttctcctcctgccccagcctcctgtctatcccagggtctctgttgccaccatcagattataagctcctgatgctgggggggcccagccatccccctccccccagcacccacaattttcagtcccctcccctctgccctgttttgtatacccctcccctgaccctgctcctatcccacagtatttaatgccctgtcagtcccttctagtctgactcaatggtaacttgctgtatttgaattttttatagatgtatatacagggtggggggagtgggcggttctcattaaacgtcaccatttcatgag

SEQ ID NO: 4408 - DNA, 2052 bp, Homo sapiens
  source 1..2052: mol_type = unassigned DNA
ctgaagagccggtgcagagcgggcggcggcggcggcggcagcggaggcggcggctccagccggcgcggcgcgaggctcggcggtgggatccggcgggcggtgctagctccgcgctccctgcctcgctcgctgccgggggcggtcggaaggcgcggcgcgaagcccgggtggcccgagggcgcgactctagccttgtcacctcatcttgcccccttggttttggaagtcctgaagagttggtctggaggaggaggaggacattgatgtgcttggtgtgtggccagtggtgaagagatggctgctcctgtcccgtgggcctgctgtgctgtgcttgccgccgccgccgcagttgtctacgcccagagacacagtccacaggaggcaccccatgtgcagtacgagcgcctgggctctgacgtgacactgccatgtgggacagcaaactgggatgctgcggtgacgtggcgggtaaatgggacagacctggcccctgacctgctcaacggctctcagctggtgctccatggcctggaactgggccacagtggcctctacgcctgcttccaccgtgactcctggcacctgcgccaccaagtcctgctgcatgtgggcttgccgccgcgggagcctgtgctcagctgccgctccaacacttaccccaagggcttctactgcagctggcatctgcccacccccacctacattcccaacaccttcaatgtgactgtgctgcatggctccaaaattatggtctgtgagaaggacccagccctcaagaaccgctgccacattcgctacatgcacctgttctccaccatcaagtacaaggtctccataagtgtcagcaatgccctgggccacaatgccacagctatcacctttgacgagttcaccattgtgaagcctgatcctccagaaaatgtggtagcccggccagtgcccagcaaccctcgccggctggaggtgacgtggcagaccccctcgacctggcctgaccctgagtcttttcctctcaagttctttctgcgctaccgacccctcatcctggaccagtggcagcatgtggagctgtccgacggcacagcacacaccatcacagatgcctacgccgggaaggagtacattatccaggtggcagccaaggacaatgagattgggacatggagtgactggagcgtagccgcccacgctacgccctggactgaggaaccgcgacacctcaccacggaggcccaggctgcggagaccacgaccagcaccaccagctccctggcacccccacctaccacgaagatctgtgaccctggggagctgggcagcggcgggggaccctcggcacccttcttggtcagcgtccccatcactctggccctggctgccgctgccgccactgccagcagtctcttgatctgagcccggcaccccatgaggacatgcagagcacctgcagaggagcaggaggccggagctgagcctgcagaccccggtttctattttgcacacgggcaggaggaccttttgcattctcttcagacacaatttgtggagaccccggcgggcccgggcctgccgccccccagccctgccgcaccaagctggccctccttcctccctcaggggaggtgggccatgcagctaacccacccaccaaagaccccctcaccctggccccttgggctggaccctccaatgccagcgactcccaggagcccttgggggacgtgaggggagcctctcacatccgatttctcctcctgccccagcctcctgtctatcccagggtctctgttgccaccatcagattataagctcctgatgctgggggggcccagccatccccctccccccagcacccacaattttcagtcccctcccctctgccctgttttgtatacccctcccctgaccctgctcctatcccacagtatttaatgccctgtcagtcccttctagtctgactcaatggtaacttgctgtatttgaattttttatagatgtatatacagggtggggggagtgggcggttctcattaaacgtcaccatttcatgag

SEQ ID NO: 4409 - DNA, 921 bp, Homo sapiens
  source 1..921: mol_type = unassigned DNA
gcacggggaccacagccgtcttgagggcgcgcccgagaaaggactctagccttgtcacctcatcttgcccccttggttttggaagtcctgaagagttggtctggaggaggaggaggacattgatgtgcttggtgtgtggccagtggtgaagagatggctgctcctgtcccgtgggcctgctgtgctgtgcttgccgccgccgccgcagttgtctacgcccagagacacagtccacaggaggcaccccatgtgcagtacgagcgcctgggctctgacgtgacactgccatgtgggacagcaaactgggatgctgcggtgacgtggcgggtaaatgggacagacctggcccctgacctgctcaacggctctcagctggtgctccatggcctggaactgggccacagtggcctctacgcctgcttccaccgtgactcctggcacctgcgccaccaagtcctgctgcatgtgggcttgccgccgcgggagcctgtgctcagctgccgctccaacacttaccccaagggcttctactgcagctggcatctgcccacccccacctacattcccaacaccttcaatgtgactgtgctgcatggctccaaaattatggtctgtgagaaggacccagccctcaagaaccgctgccacattcgctacatgcacctgttctccaccatcaagtacaaggtctccataagtgtcagcaatgccctgggccacaatgccacagctatcacctttgacgagttcaccattgtgaagcctgatcctccagaaaatgtggtagcccggccagtgcccagcaaccctcgccggctggaggtgacgtggcagaccccctcgacctggcctgaccctgagtcttttcctctcaagttctttctgcgctaccgacccctcatcctggaccagtggcagcat

SEQ ID NO: 4410 - DNA, 1926 bp, Homo sapiens
  source 1..1926: mol_type = unassigned DNA
ccggggctgcgcgtgaagcacggggaccacagccgtcttgagggcgcgcccgagaaaggactctagccttgtcacctcatcttgcccccttggttttggaagtcctgaagagttggtctggaggaggaggaggacattgatgtgcttggtgtgtggccagtggtgaagagatggctgctcctgtcccgtgggcctgctgtgctgtgcttgccgccgccgccgcagttgtctacgcccagagacacagtccacaggaggcaccccatgtgcagtacgagcgcctgggctctgacgtgacactgccatgtgggacagcaaactgggatgctgcggtgacgtggcgggtaaatgggacagacctggcccctgacctgctcaacggctctcagctggtgctccatggcctggaactgggccacagtggcctctacgcctgcttccaccgtgactcctggcacctgcgccaccaagtcctgctgcatgtgggcttgccgccgcgggagcctgtgctcagctgccgctccaacacttaccccaagggcttctactgcagctggcatctgcccacccccacctacattcccaacaccttcaatgtgactgtgctgcatggctccaaaattatggtctgtgagaaggacccagccctcaagaaccgctgccacattcgctacatgcacctgttctccaccatcaagtacaaggtctccataagtgtcagcaatgccctgggccacaatgccacagctatcacctttgacgagttcaccattgtgaagcctgatcctccagaaaatgtggtagcccggccagtgcccagcaaccctcgccggctggaggtgacgtggcagaccccctcgacctggcctgaccctgagtcttttcctctcaagttctttctgcgctaccgacccctcatcctggaccagtggcagcatgtggagctgtccgacggcacagcacacaccatcacagatgcctacgccgggaaggagtacattatccaggtggcagccaaggacaatgagattgggacatggagtgactggagcgtagccgcccacgctacgccctggactgaggaaccgcgacacctcaccacggaggcccaggctgcggagaccacgaccagcaccaccagctccctggcacccccacctaccacgaagatctgtgaccctggggagctgggcagcggcgggggaccctcggcacccttcttggtcagcgtccccatcactctggccctggctgccgctgccgccactgccagcagtctcttgatctgagcccggcaccccatgaggacatgcagagcacctgcagaggagcaggaggccggagctgagcctgcagaccccggtttctattttgcacacgggcaggaggaccttttgcattctcttcagacacaatttgtggagaccccggcgggcccgggcctgccgccccccagccctgccgcaccaagctggccctccttcctccctcaggggaggtgggccatgcagctaacccacccaccaaagaccccctcaccctggccccttgggctggaccctccaatgccagcgactcccaggagcccttgggggacgtgaggggagcctctcacatccgatttctcctcctgccccagcctcctgtctatcccagggtctctgttgccaccatcagattataagctcctgatgctgggggggcccagccatccccctccccccagcacccacaattttcagtcccctcccctctgccctgttttgtatacccctcccctgaccctgctcctatcccacagtatttaatgccctgtcagtcccttctagtctgactcaatggtaacttgctgtatttgaattttttatagatgtatatacagggtggggggagtgggcggttctcattaaacgtcaccatttcatg

SEQ ID NO: 4411 - DNA, 4000 bp, Homo sapiens
  source 1..4000: mol_type = unassigned DNA
ggcaggcgggccagacagcgccccgcggcctgtccatgagcggcccatgcattatggaagacgcgcgctgggctcgctccctggtccttaaatgacagcaaatgaggtcctttctcagcctccagctgggctgtccccaagctgagctgaggctcttctcctccgatccccacctctgcccggacatccaccatggggacagccaccaggaggaagccacacctgctgctggtagctgctgtggcccttgtctcctcttcaggtgaagatactgaggctcagaagagttctataactttcccaaggtcccacagctagtagagggccagcctagtccccaggcccaggcctcgttggtccacactgccccagtaagggtattaggctccagggacacacatcctctctgcatgtttgtggctggcgacgtctcatgcacctcacaccccacagatcagttcttctgtaagggtcccttgaaagccccctgggaggtagaactgcttccattctgaggccccagcatcttgaactttatggcatttgctaccttgcactgtcaatttcctgtctccctccttggaccgcaagccccttgaagaagagggactgtgtcttaatcatctttacaagccagtctctagcccagtgctgggtatagagcaggtgctcaatacctaagtgtaggatgggtgattgattgaactagtatggccagatggggcctgcccagcctatttaaattcaaatttaaattaattaagtaatataaaatgtaaaatgtcgttcttcagtcgcaatagccacatgtcaagtgctcgatagccctacgtggctagtggttaccacattgaacagtgcagaaaatgggacattcccatcatcagagaaagttttactggacagcacagcccaagaggccaggctccagccaggccaaggctctgaggcatctggtggtgtcatcacctgcagcttggagttcagccctgggatcccaaaccaccttcgggcctgtctttgaagaccagcccctcagtgtgctattcccagaggagtccacggaggagcaggtgttgctggcatgccgcgcccgggccagccctccagccacctatcggtggaagatgaatggtaccgagatgaagctggagccaggttcccgtcaccagctggtggggggcaacctggtcatcatgaaccccaccaaggcacaggatgccggggtctaccagtgcctggcctccaacccagtgggcaccgttgtcagcagggaggccatcctccgcttcggctgtgagacccgcgggggaccaagacactttgggggagggggagagggggctaggagaaattactgagaaaggataagggacaccctcaagccgggccttcctgacctcacatgacatgccttagtgaactgctgcttctccgtgaaggatgagtcggggaggggctcgcaggccaggaggacagtgcctgagcccctggtctctgcctccagttctgcaggaattctccaaggaggagcgagacccagtgaaagctcatgaaggctggggggtgatgttgccctgtaacccacctgcccactacccaggcttgtcctaccgctggctcctcaacgagttccccaacttcatcccgacggacgggcgtcacttcgtgtcccagaccacagggaacctgtacattgcccgaaccaatgcctcagacctgggcaactactcctgtttggccaccagccacatggacttctccaccaagagcgtcttcagcaagtttgctcagctcaacctggctgctgaagatacccggctctttgcacccagcatcaaggcccggttcccagcagagacctatgcactggtggggcagcaggtcaccctggagtgcttcgcctttgggaaccctgtcccccggatcaagtggcgcaaagtggacggctccctgtccccgcagtggaccacagctgagcccaccctgcagatccccagcgtcagctttgaggatgagggcacctacgagtgtgaggcggagaactccaagggccgagacaccgtgcagggccgcatcatcgtgcaggctcagcctgagtggctaaaagtgatctcggacacagaggctgacattggctccaacctgcgttggggctgtgcagccgccggcaagccccggcctacagtgcgctggctgcggaacggggagcctctggcctcccagaaccgggtggaggtgttggctggggacctgcggttctccaagctgagcctggaagactcgggcatgtaccagtgtgtggcagagaataagcacggtaccatctacgccagcgccgagctagccgtgcaagcactcgcccctgacttcaggctgaatcccgtgaggcgtctgatccccgcggcccgcgggggagagatccttatcccctgccagccccgggcagctccaaaggccgtggtgctctggagcaaaggcacggagattttggtcaacagcagcagagtgactgtaactccagatggcaccttgatcataagaaacatcagccggtcagatgaaggcaaatacacctgctttgctgagaacttcatgggcaaagccaacagcactggaatcctatctgtgcgagatgcaaccaaaatcactctagccccctcaagtgccgacatcaacttgggtgacaacctgaccctacagtgccatgcctcccacgaccccaccatggacctcaccttcacctggaccctggacgacttccccatcgactttgataagcctggagggcactaccggagaactaatgtgaaggagaccattggggatctgaccatcctgaacgcccagctgcgccatggggggaagtacacgtgcatggcccagacggtggtggacagcgcgtccaaggaggccacagtcctggtccgaggtccgccaggtcccccaggaggtgtggtggtgagggacattggcgacaccaccatccagctcagctggagccgtggcttcgacaaccacagccccatcgctaagtacaccctgcaagctcgcactccacctgcagggaagtggaagcaggttcggaccaatcctgcaaacatcgagggcaatgccgagactgcacaggtgctgggcctcaccccctggatggactatgagttccgggtcatagccagcaacattctgggcactggggagcctagtgggccctccagcaaaatccggaccagggaagcagccccctcggtggcaccctcaggactcagcggaggaggtggagcccccggagagctcatcgtcaactggacgcccatgtcacgggagtaccagaacggagacggcttcggctacctgctgtccttccgcaggcagggcagcactcactggcagaccgcccgggtgcctggcgccgatgcccagtactttgtctacagcaacgagagcgtccggccctacacgccctttgaggtcaagatccgcagctacaaccgccgcggggatgggcccgagagcctcactgcactcgtgtactcagctgaggaagagcccagggtggcccctaccaaggtgtgggccaaaggggtctcatcctcagagatgaacgtgacctgggaacccgtgcagcaggacatgaatggtatcctcctggggtatgagatccgctactggaaagctggggacaaagaagcagctgcggaccgagtgaggacagcagggctggacaccagtgcccgagtcagcggcctgcatcccaacaccaagtaccatgtgaccgtgagggcctacaaccgggctggcactgggcctgccagcccttctgccaacgccacgaccatgaagccccctccgcggcgacctcctggcaacatctcctggactttctcaagctctagtcttagcattaagtgggaccctgtggtccctttccgaaatgagtctgcagtcaccggctataagatgctgtaccagaatgacttacacctgactcccacgctcc

SEQ ID NO: 4412 - DNA, 4447 bp, Homo sapiens
  source 1..4447: mol_type = unassigned DNA
gtccatgagcggcccatgcattatggaagacgcgcgctgggctcgctccctggtccttaaatgacagcaaatgaggtcctttctcagcctccagctgggctgtccccaagctgagctgaggctcttctcctccgatccccacctctgcccggacatccaccatggggacagccaccaggaggaagccacacctgctgctggtagctgctgtggcccttgtctcctcttcagcttggagttcagccctgggatcccaaaccaccttcgggcctgtctttgaagaccagcccctcagtgtgctattcccagaggagtccacggaggagcaggtgttgctggcatgccgcgcccgggccagccctccagccacctatcggtggaagatgaatggtaccgagatgaagctggagccaggttcccgtcaccagctggtggggggcaacctggtcatcatgaaccccaccaaggcacaggatgccggggtctaccagtgcctggcctccaacccagtgggcaccgttgtcagcagggaggccatcctccgcttcggctttctgcaggaattctccaaggaggagcgagacccagtgaaagctcatgaaggctggggggtgatgttgccctgtaacccacctgcccactacccaggcttgtcctaccgctggctcctcaacgagttccccaacttcatcccgacggacgggcgtcacttcgtgtcccagaccacagggaacctgtacattgcccgaaccaatgcctcagacctgggcaactactcctgtttggccaccagccacatggacttctccaccaagagcgtcttcagcaagtttgctcagctcaacctggctgctgaagatacccggctctttgcacccagcatcaaggcccggttcccagcagagacctatgcactggtggggcagcaggtcaccctggagtgcttcgcctttgggaaccctgtcccccggatcaagtggcgcaaagtggacggctccctgtccccgcagtggaccacagctgagcccaccctgcagatccccagcgtcagctttgaggatgagggcacctacgagtgtgaggcggagaactccaagggccgagacaccgtgcagggccgcatcatcgtgcaggctcagcctgagtggctaaaagtgatctcggacacagaggctgacattggctccaacctgcgttggggctgtgcagccgccggcaagccccggcctacagtgcgctggctgcggaacggggagcctctggcctcccagaaccgggtggaggtgttggctggggacctgcggttctccaagctgagcctggaagactcgggcatgtaccagtgtgtggcagagaataagcacggtaccatctacgccagcgccgagctagccgtgcaagcactcgcccctgacttcaggctgaatcccgtgaggcgtctgatccccgcggcccgcgggggagagatccttatcccctgccagccccgggcagctccaaaggccgtggtgctctggagcaaaggcacggagattttggtcaacagcagcagagtgactgtaactccagatggcaccttgatcataagaaacatcagccggtcagatgaaggcaaatacacctgctttgctgagaacttcatgggcaaagccaacagcactggaatcctatctgtgcgagatgcaaccaaaatcactctagccccctcaagtgccgacatcaacttgggtgacaacctgaccctacagtgccatgcctcccacgaccccaccatggacctcaccttcacctggaccctggacgacttccccatcgactttgataagcctggagggcactaccggagaactaatgtgaaggagaccattggggatctgaccatcctgaacgcccagctgcgccatggggggaagtacacgtgcatggcccagacggtggtggacagcgcgtccaaggaggccacagtcctggtccgaggtccgccaggtcccccaggaggtgtggtggtgagggacattggcgacaccaccatccagctcagctggagccgtggcttcgacaaccacagccccatcgctaagtacaccctgcaagctcgcactccacctgcagggaagtggaagcaggttcggaccaatcctgcaaacatcgagggcaatgccgagactgcacaggtgctgggcctcaccccctggatggactatgagttccgggtcatagccagcaacattctgggcactggggagcctagtgggccctccagcaaaatccggaccagggaagcagccccctcggtggcaccctcaggactcagcggaggaggtggagcccccggagagctcatcgtcaactggacgcccatgtcacgggagtaccagaacggagacggcttcggctacctgctgtccttccgcaggcagggcagcactcactggcagaccgcccgggtgcctggcgccgatgcccagtactttgtctacagcaacgagagcgtccggccctacacgccctttgaggtcaagatccgcagctacaaccgccgcggggatgggcccgagagcctcactgcactcgtgtactcagctgaggaagagcccagggtggcccctaccaaggtgtgggccaaaggggtctcatcctcagagatgaacgtgacctgggaacccgtgcagcaggacatgaatggtatcctcctggggtatgagatccgctactggaaagctggggacaaagaagcagctgcggaccgagtgaggacagcagggctggacaccagtgcccgagtcagcggcctgcatcccaacaccaagtaccatgtgaccgtgagggcctacaaccgggctggcactgggcctgccagcccttctgccaacgccacgaccatgaagccccctccgcggcgacctcctggcaacatctcctggactttctcaagctctagtcttagcattaagtgggaccctgtggtccctttccgaaatgagtctgcagtcaccggctataagatgctgtaccagaatgacttacacctgactcccacgctccacctcaccggcaagaactggatagaaatcccagtgcctgaagacattggccatgccctggtacaaattcggaccacagggcccggaggggatgggatccctgcagaagtccacatcgtgaggaatggaggcacaagcatgatggtggagaacatggcagtccgcccagcaccacaccctggcaccgtcatttcccactccgtggcgatgctgatcctcataggctccctggagctctgatcctggaacccctccctctgcgccgcagctggacgccacctccgacggacacagccagccccttcctgctgccaaggtggcctgacactgtgccagagagtggctggttttaaatacctactttaaacagtgccctttttgtaggaggtaggatattttatattctgccgcaggatagaacccacgcaaggattttctttaaattgagaggcaccaggcagtaacttccatgatgacactgacgcctatacctgagctctaggctgcctggagggaaggaacaggcccatgggaagaagggggttttaaaaacatgtcttcaactcagcagagatggccctctgggaccctatacggactccgccacttgagagcagtcctaggcccggcaggaacaccagacatgaacaggttgaagaactggagcgaagtgcacacctcaccatccttcagtctaaggaagaagggcaagccctgggaccaagagctctcccgccttctccctcgagcagcagcaaggaccctgacgctgtccccgataactccctaggggctcctgcctgcccaagcggctgagaaccagcgccccgatgcctgaggctgggagcctgagccccttcagctttgaggggggtgatactccaggctgtttggggtgggagccaaaaagagttgagaggccagggcccttggtggaaaggggcaccagccttggtctgagatagtcacaacccaggtgacgatgccctctcagccaacactgccaacctgaccctgtcatcccgattgacagcgccacttcaggtggctgggtgactaaagggcttgtcttggtggggtctcccacccctccaagacccattctgcacagtccctccagggtttgggcaggagatggccaatcatgcgcccacctctccagtgctgcctgcagtcagctcggcctccccgacctgcagccccagactctgctctcccagcactgactcactcctgcctgggaggggaatgcagcattcatgctgtgtgtcctggtattgggaggtttctgggaagggcagaggataaatgtggccctgcctgctcccaggtatacctaggaccacctggccagatccgctcccagacggccttggactgcttgcatttccccggagaaaaag

SEQ ID NO: 4413 - DNA, 7999 bp, Homo sapiens
  source 1..7999: mol_type = unassigned DNA
gaggaccagagccagccagtgagcggagcctgggagagggaggagcacatcttgatgcagagatgctgcagtggctccgggcgcgctcacacacacgcgccctcacccgccaccgccgccgcggccgccgccgcacccggacagcgagcggctgaggccgccagggcccaaaggacagcggcccagacaggggctggcggcccggccggccccggctcaccgactcgggcagcatccacctgccccagccaacacccttctctcgccccaggtcctttctcagcctccagctgggctgtccccaagctgagctgaggctcttctcctccgatccccacctctgcccggacatccaccatggggacagccaccaggaggaagccacacctgctgctggtagctgctgtggcccttgtctcctcttcagcttggagttcagccctgggatcccaaaccaccttcgggcctgtctttgaagaccagcccctcagtgtgctattcccagaggagtccacggaggagcaggtgttgctggcatgccgcgcccgggccagccctccagccacctatcggtggaagatgaatggtaccgagatgaagctggagccaggttcccgtcaccagctggtggggggcaacctggtcatcatgaaccccaccaaggcacaggatgccggggtctaccagtgcctggcctccaacccagtgggcaccgttgtcagcagggaggccatcctccgcttcggctttctgcaggaattctccaaggaggagcgagacccagtgaaagctcatgaaggctggggggtgatgttgccctgtaacccacctgcccactacccaggcttgtcctaccgctggctcctcaacgagttccccaacttcatcccgacggacgggcgtcacttcgtgtcccagaccacagggaacctgtacattgcccgaaccaatgcctcagacctgggcaactactcctgtttggccaccagccacatggacttctccaccaagagcgtcttcagcaagtttgctcagctcaacctggctgctgaagatacccggctctttgcacccagcatcaaggcccggttcccagcagagacctatgcactggtggggcagcaggtcaccctggagtgcttcgcctttgggaaccctgtcccccggatcaagtggcgcaaagtggacggctccctgtccccgcagtggaccacagctgagcccaccctgcagatccccagcgtcagctttgaggatgagggcacctacgagtgtgaggcggagaactccaagggccgagacaccgtgcagggccgcatcatcgtgcaggctcagcctgagtggctaaaagtgatctcggacacagaggctgacattggctccaacctgcgttggggctgtgcagccgccggcaagccccggcctacagtgcgctggctgcggaacggggagcctctggcctcccagaaccgggtggaggtgttggctggggacctgcggttctccaagctgagcctggaagactcgggcatgtaccagtgtgtggcagagaataagcacggtaccatctacgccagcgccgagctagccgtgcaagcactcgcccctgacttcaggctgaatcccgtgaggcgtctgatccccgcggcccgcgggggagagatccttatcccctgccagccccgggcagctccaaaggccgtggtgctctggagcaaaggcacggagattttggtcaacagcagcagagtgactgtaactccagatggcaccttgatcataagaaacatcagccggtcagatgaaggcaaatacacctgctttgctgagaacttcatgggcaaagccaacagcactggaatcctatctgtgcgagatgcaaccaaaatcactctagccccctcaagtgccgacatcaacttgggtgacaacctgaccctacagtgccatgcctcccacgaccccaccatggacctcaccttcacctggaccctggacgacttccccatcgactttgataagcctggagggcactaccggagaactaatgtgaaggagaccattggggatctgaccatcctgaacgcccagctgcgccatggggggaagtacacgtgcatggcccagacggtggtggacagcgcgtccaaggaggccacagtcctggtccgaggtccgccaggtcccccaggaggtgtggtggtgagggacattggcgacaccaccatccagctcagctggagccgtggcttcgacaaccacagccccatcgctaagtacaccctgcaagctcgcactccacctgcagggaagtggaagcaggttcggaccaatcctgcaaacatcgagggcaatgccgagactgcacaggtgctgggcctcaccccctggatggactatgagttccgggtcatagccagcaacattctgggcactggggagcctagtgggccctccagcaaaatccggaccagggaagcagccccctcggtggcaccctcaggactcagcggaggaggtggagcccccggagagctcatcgtcaactggacgcccatgtcacgggagtaccagaacggagacggcttcggctacctgctgtccttccgcaggcagggcagcactcactggcagaccgcccgggtgcctggcgccgatgcccagtactttgtctacagcaacgagagcgtccggccctacacgccctttgaggtcaagatccgcagctacaaccgccgcggggatgggcccgagagcctcactgcactcgtgtactcagctgaggaagagcccagggtggcccctaccaaggtgtgggccaaaggggtctcatcctcagagatgaacgtgacctgggaacccgtgcagcaggacatgaatggtatcctcctggggtatgagatccgctactggaaagctggggacaaagaagcagctgcggaccgagtgaggacagcagggctggacaccagtgcccgagtcagcggcctgcatcccaacaccaagtaccatgtgaccgtgagggcctacaaccgggctggcactgggcctgccagcccttctgccaacgccacgaccatgaagccccctccgcggcgacctcctggcaacatctcctggactttctcaagctctagtcttagcattaagtgggaccctgtggtccctttccgaaatgagtctgcagtcaccggctataagatgctgtaccagaatgacttacacctgactcccacgctccacctcaccggcaagaactggatagaaatcccagtgcctgaagacattggccatgccctggtacaaattcggaccacagggcccggaggggatgggatccctgcagaagtccacatcgtgaggaatggaggcacaagcatgatggtggagaacatggcagtccgcccagcaccacaccctggcaccgtcatttcccactccgtggcgatgctgatcctcataggctccctggagctctgatcctggaacccctccctctgcgccgcagctggacgccacctccgacggacacagccagccccttcctgctgccaaggtggcctgacactgtgccagagagtggctggttttaaatacctactttaaacagtgccctttttgtaggaggtaggatattttatattctgccgcaggatagaacccacgcaaggattttctttaaattgagaggcaccaggcagtaacttccatgatgacactgacgcctatacctgagctctaggctgcctggagggaaggaacaggcccatgggaagaagggggttttaaaaacatgtcttcaactcagcagagatggccctctgggaccctatacggactccgccacttgagagcagtcctaggcccggcaggaacaccagacatgaacaggttgaagaactggagcgaagtgcacacctcaccatccttcagtctaaggaagaagggcaagccctgggaccaagagctctcccgccttctccctcgagcagcagcaaggaccctgacgctgtccccgataactccctaggggctcctgcctgcccaagcggctgagaaccagcgccccgatgcctgaggctgggagcctgagccccttcagctttgaggggggtgatactccaggctgtttggggtgggagccaaaaagagttgagaggccagggcccttggtggaaaggggcaccagccttggtctgagatagtcacaacccaggtgacgatgccctctcagccaacactgccaacctgaccctgtcatcccgattgacagcgccacttcaggtggctgggtgactaaagggcttgtcttggtggggtctcccacccctccaagacccattctgcacagtccctccagggtttgggcaggagatggccaatcatgcgcccacctctccagtgctgcctgcagtcagctcggcctccccgacctgcagccccagactctgctctcccagcactgactcactcctgcctgggaggggaatgcagcattcatgctgtgtgtcctggtattgggaggtttctgggaagggcagaggataaatgtggccctgcctgctcccaggtatacctaggaccacctggccagatccgctcccagacggccttggactgcttgcatttccccggagaaaaaggggttaataaatgggccatcctttcctgagctctgggtatactaccagtcacagaacgtcagagctggaagaagccttagagctcaacttcttcaagcccctcactttacagatgaggaaatggaggtggtccagagagggtctgggattcccaaggtcacacagcccagaagagatggggctgggttaagaactcgagtcttccacctttctgttcaaggctgtttgtctacccagaggaaggaggcactgctgaatggctatggcctggctaagaaggtgattagtcagtagggtgtgaaaattctacttcaaggggttcggattggtgatcatggggattggcatggctgggttcccgtccaaggtgtgggcagagcttctaccaaacttcaacatggagggctgacttgaagctccctgtccccctcactcttgccccaagaaaagaggccaaagcaagagcagattccctaggcaagagcagcagcacaactaggaaaccccaaagcccatgctccgacaggtggcccttcacagggggcagcgggacaggcatcttgaagggcatatgtcctcggaagctccgagcctgttttctgtagtttatagttagagctctattttgttatggttttttaaacttttaagtcctgctctattttcctgggcaggtttatgttgatgtttacccactacaattttttaaaaatataagctcacatgccttttccctgccacagccaaacccccactgcaccctacccacccacccctagcccaggtcagctttcctggagctggctaatgaaagcctcctcacctcttcccaacccttacaagcaagggtgctaggggctcagctatacgaccattctccctgacagggagtccaaacttggcctagcatccctcctggcccccctctggccacgacttggcctgtgcctggttctctatcagaaaggggatgctgaacaaaacctccttccaagttttatccaattcgttcctcattgcctcgggctgcgtcaggggaagcaggggacaggtgtccagttgctgggccgagggaggagctggtttggcataggacctaaccagtgaagctagaggctacagccactaaacttgcttcaggccaacgatagttactcacaagtaagtaccttaatgctaatgaggtccactaaaaaggggaggaaggcagacctcctgggagacccacgaagggtttttagccagggaaaactgagccccaggaaaacctaaccactgggcaggcagaatttgtttgagggatagaacgacaacaaaataaatgttcctgcagcctgagatttcaggtagagtactgactaaggtttaataagacaataggtgacctgaggacatgcaagcttgtaaaatgcaacagcctcctgctagagtgacttgtacatgagcttgcttgcagaagactagattagatgtttctcaggatcccctcctgcgcaggggttctctgattttcgtgttctctgcccagatgggctgggggagttgagagtgtgcttattttcactgcgatcatgagaccacagttctgggttatctcctctcatacatcaagccccagaggaggcggcaagaggaacagccacaaacaagtactttaccccacagcttagtggccagtaaacaccctggggactaggaaaaggaaccaactgtaggcacctctccagggcctagggagacaagtgtcctctcttctgcatacatttgggctccccttacagagccctttgccctggctctctggtccttgttgctctaacagtccagatgtacacccagcctcagggggaaggcagctctctccagacagagtctcagggcccagcaaggtcaggttatctgctttcattcagggcaacaaatgatacaaatggtgccagggagtggcaaggccatgggggtaggtgggggtgtctttttcttttcataaagtaacaacagacgagactgaggttaaacatcagaaaaaaacctctggaatgaccttcctcattccaggaggccctggaataaggaagaggcttctttctgagggagctttgaggaattttgacagctgttgacatgggatttgggaaaggtgaagctgtgactggaggggcaggagatggtccaagtgtccatccagagatgagactcttagaatcaaagtgttcagcccaggaagtcttggagatcccaccttctgtggccctgcaccttatgggaagccattaagggggctcatctaggaattctggttacagcccagtgctcatcccagcgtatgctgcctctttagggcagccccaagggccagccagcctgtactctgggcaagagcccaaaatggctaggaatgtttgactcccttaatctcttccccagctacagaggaatcttttctctgcctggtctcagaatgggactgccaactggctcattggtgggagacacagtatcctcaaacctgtggccactggcatgacagtggtgctctgtctccctgggtgacacccaccctaggcttcctcctggatgtgatggggattgccagagaggctcttagcataaaaggcattaggtgggcatttttctgtgtgcccccaaaaagctccatggaaacaggcacctggtagctgcggaacacccgtggacttgtgtatatggtcataggctttgggaagacaggacgtaaaggaaaatgagagaaacaaaatgggtcagatagctttggccacagccccaggcagcctttggggcctatgacacttagtgcccttagatgggatacatcttgcctcggccccaagactcctccaacttacccgtcccatccagggcctgcacagcttagagaggctcacagcttggcaaatgctagggcttcatcagaccactgacttgactcagtgtttgttaaaatggaaccactcccgttggcctactgtttctctcctgtacttcttgtaatgatagttatttattgactctggtagcaggcagttcttaaataaagatggtttctcaacctgttggggaagctggcacgagctgtgggtgttatcatcaggctaaagcatacctccttgtcctgttcttcactccagaggcttttatccaagaatttctttaccccccacacagtgaaatataagtaagttacaacatacagtctatattgcttcatccagtcccaggaggagggaaaaattaggccaagatcttaaggcaggtccaagcagagcacaggcaggcatttggctagaatcagttggctttacctaatacagtggcagtaaacaatgcttatgtga

SEQ ID NO: 4414 - DNA, 3733 bp, Homo sapiens
  source 1..3733: mol_type = unassigned DNA
agtggctccgggcgcgctcacacacacgcgccctcacccgccaccgccgccgcggccgccgccgcacccggacagcgagcggctgaggccgccagggcccaaaggacagcggcccagacaggggctggcggcccggccggccccggctcaccgactcgggcagcatccacctgccccagccaacacccttctctcgccccaggtcctttctcagcctccagctgggctgtccccaagctgagctgaggctcttctcctccgatccccacctctgcccggacatccaccatggggacagccaccaggaggaagccacacctgctgctggtagctgctgtggcccttgtctcctcttcagcttggagttcagccctgggatcccaaaccaccttcgggcctgtctttgaagaccagcccctcagtgtgctattcccagaggagtccacggaggagcaggtgttgctggcatgccgcgcccgggccagccctccagccacctatcggtggaagatgaatggtaccgagatgaagctggagccaggttcccgtcaccagctggtggggggcaacctggtcatcatgaaccccaccaaggcacaggatgccggggtctaccagtgcctggcctccaacccagtgggcaccgttgtcagcagggaggccatcctccgcttcggctgtgagacccgcgggggaccaagacactttgggggagggggagagggggctaggagaaattactgagaaaggataagggacaccctcaagccgggccttcctgacctcacatgacatgccttagtgaactgctgcttctccgtgaaggatgagtcggggaggggctcgcaggccaggaggacagtgcctgagcccctggtctctgcctccagttctgcaggaattctccaaggaggagcgagacccagtgaaagctcatgaaggctggggggtgatgttgccctgtaacccacctgcccactacccaggtgagtccagacctggggccagggttagagagggcacaggaagggcttccagatgcttggcagaggaaggatggaataaaaggagacccctggaaatgacccttagaagcacccatccctgggaccctaactttaaatgatctgtgtttcctttataggtctgtcactttccatcgttgtgccctgcttccgccttcaaactgggtggcccctgagggctgcgatccctggcagacttagcgctccctgagggcaggaataaagtcacttcttccctctaggtctccccttagccccagttcagagcatggtggctgtcaggacagggcttgcagaaccgcaccagcatgctggggtcccacccagagtggccctgttagcccagcaccccctggtttcctcaaactcctcacatcctaggcttgtcctaccgctggctcctcaacgagttccccaacttcatcccgacggacgggcgtcacttcgtgtcccagaccacagggaacctgtacattgcccgaaccaatgcctcagacctgggcaactactcctgtttggccaccagccacatggacttctccaccaagagcgtcttcagcaagtttgctcagctcaacctggctgctgaagatacccggctctttgcacccagcatcaaggcccggttcccagcagagacctatgcactggtggggcagcaggtcaccctggagtgcttcgcctttgggaaccctgtcccccggatcaagtggcgcaaagtggacggctccctgtccccgcagtggaccacagctgagcccaccctgcagatccccagcgtcagctttgaggatgagggcacctacgagtgtgaggcggagaactccaagggccgagacaccgtgcagggccgcatcatcgtgcaggctcagcctgagtggctaaaagtgatctcggacacagaggctgacattggctccaacctgcgttggggctgtgcagccgccggcaagccccggcctacagtgcgctggctgcggaacggggagcctctggcctcccagaaccgggtggaggtgttggctggggacctgcggttctccaagctgagcctggaagactcgggcatgtaccagtgtgtggcagagaataagcacggtaccatctacgccagcgccgagctagccgtgcaagcactcgcccctgacttcaggctgaatcccgtgaggcgtctgatccccgcggcccgcgggggagagatccttatcccctgccagccccgggcagctccaaaggccgtggtgctctggagcaaaggcacggagattttggtcaacagcagcagagtgactgtaactccagatggcaccttgatcataagaaacatcagccggtcagatgaaggcaaatacacctgctttgctgagaacttcatgggcaaagccaacagcactggaatcctatctgtgcgagatgcaaccaaaatcactctagccccctcaagtgccgacatcaacttgggtgacaacctgaccctacagtgccatgcctcccacgaccccaccatggacctcaccttcacctggaccctggacgacttccccatcgactttgataagcctggagggcactaccggagaactaatgtgaaggagaccattggggatctgaccatcctgaacgcccagctgcgccatggggggaagtacacgtgcatggcccagacggtggtggacagcgcgtccaaggaggccacagtcctggtccgaggtccgccaggtcccccaggaggtgtggtggtgagggacattggcgacaccaccatccagctcagctggagccgtggcttcgacaaccacagccccatcgctaagtacaccctgcaagctcgcactccacctgcagggaagtggaagcaggttcggaccaatcctgcaaacatcgagggcaatgccgagactgcacaggtgctgggcctcaccccctggatggactatgagttccgggtcatagccagcaacattctgggcactggggagcctagtgggccctccagcaaaatccggaccagggaagcagccccctcggtggcaccctcaggactcagcggaggaggtggagcccccggagagctcatcgtcaactggacgcccatgtcacgggagtaccagaacggagacggcttcggctacctgctgtccttccgcaggcagggcagcactcactggcagaccgcccgggtgcctggcgccgatgcccagtactttgtctacagcaacgagagcgtccggccctacacgccctttgaggtcaagatccgcagctacaaccgccgcggggatgggcccgagagcctcactgcactcgtgtactcagctgaggaagagcccagggtggcccctaccaaggtgtgggccaaaggggtctcatcctcagagatgaacgtgacctgggaacccgtgcagcaggacatgaatggtatcctcctggggtatgaggtgagcaccaacctgggacttgggagaggaaggggtgctggggcttcaaagccaggtgggaacaactcacagaccactaatcattcctcctggcgtccctggttcgctgacatggcaaactgagcatccagtctgtgtagcactgtgaatgcaaatttcactaagaccccatggcaggccaggcgcggtggctcatgcctgtaatcccatcactttgggaggctgaggcggtagatctcctgagatcaggagtttgagaccagcctggcc

SEQ ID NO: 4415 - DNA, 4146 bp, Homo sapiens
  source 1..4146: mol_type = unassigned DNA
ggctccgggcgcgctcacacacacgcgccctcacccgccaccgccgccgcggccgccgccgcacccggacagcgagcggctgaggccgccagggcccaaaggacagcggcccagacaggggctggcggcccggccggccccggctcaccgactcgggcagcatccacctgccccagccaacacccttctctcgccccaggtcctttctcagcctccagctgggctgtccccaagctgagctgaggctcttctcctccgatccccacctctgcccggacatccaccatggggacagccaccaggaggaagccacacctgctgctggtagctgctgtggcccttgtctcctcttcagcttggagttcagccctgggatcccaaaccaccttcgggcctgtctttgaagaccagcccctcagtgtgctattcccagaggagtccacggaggagcaggtgttgctggcatgccgcgcccgggccagccctccagccacctatcggtggaagatgaatggtaccgagatgaagctggagccaggttcccgtcaccagctggtggggggcaacctggtcatcatgaaccccaccaaggcacaggatgccggggtctaccagtgcctggcctccaacccagtgggcaccgttgtcagcagggaggccatcctccgcttcggctttctgcaggaattctccaaggaggagcgagacccagtgaaagctcatgaaggctggggggtgatgttgccctgtaacccacctgcccactacccaggcttgtcctaccgctggctcctcaacgagttccccaacttcatcccgacggacgggcgtcacttcgtgtcccagaccacagggaacctgtacattgcccgaaccaatgcctcagacctgggcaactactcctgtttggccaccagccacatggacttctccaccaagagcgtcttcagcaagtttgctcagctcaacctggctgctgaagatacccggctctttgcacccagcatcaaggcccggttcccagcagagacctatgcactggtggggcagcaggtcaccctggagtgcttcgcctttgggaaccctgtcccccggatcaagtggcgcaaagtggacggctccctgtccccgcagtggaccacagctgagcccaccctgcagatccccagcgtcagctttgaggatgagggcacctacgagtgtgaggcggagaactccaagggccgagacaccgtgcagggccgcatcatcgtgcaggctcagcctgagtggctaaaagtgatctcggacacagaggctgacattggctccaacctgcgttggggctgtgcagccgccggcaagccccggcctacagtgcgctggctgcggaacggggagcctctggcctcccagaaccgggtggaggtgttggctggggacctgcggttctccaagctgagcctggaagactcgggcatgtaccagtgtgtggcagagaataagcacggtaccatctacgccagcgccgagctagccgtgcaagcactcgcccctgacttcaggctgaatcccgtgaggcgtctgatccccgcggcccgcgggggagagatccttatcccctgccagccccgggcagctccaaaggccgtggtgctctggagcaaaggcacggagattttggtcaacagcagcagagtgactgtaactccagatggcaccttgatcataagaaacatcagccggtcagatgaaggcaaatacacctgctttgctgagaacttcatgggcaaagccaacagcactggaatcctatctgtgcgagatgcaaccaaaatcactctagccccctcaagtgccgacatcaacttgggtgacaacctgaccctacagtgccatgcctcccacgaccccaccatggacctcaccttcacctggaccctggacgacttccccatcgactttgataagcctggagggcactaccggagaactaatgtgaaggagaccattggggatctgaccatcctgaacgcccagctgcgccatggggggaagtacacgtgcatggcccagacggtggtggacagcgcgtccaaggaggccacagtcctggtccgaggtccgccaggtcccccaggaggtgtggtggtgagggacattggcgacaccaccatccagctcagctggagccgtggcttcgacaaccacagccccatcgctaagtacaccctgcaagctcgcactccacctgcagggaagtggaagcaggttcggaccaatcctgcaaacatcgagggcaatgccgagactgcacaggtgctgggcctcaccccctggatggactatgagttccgggtcatagccagcaacattctgggcactggggagcctagtgggccctccagcaaaatccggaccagggaagcagccccctcggtggcaccctcaggactcagcggaggaggtggagcccccggagagctcatcgtcaactggacgcccatgtcacgggagtaccagaacggagacggcttcggctacctgctgtccttccgcaggcagggcagcactcactggcagaccgcccgggtgcctggcgccgatgcccagtactttgtctacagcaacgagagcgtccggccctacacgccctttgaggtcaagatccgcagctacaaccgccgcggggatgggcccgagagcctcactgcactcgtgtactcagctgaggaagagcccagggtggcccctaccaaggtgtgggccaaaggggtctcatcctcagagatgaacgtgacctgggaacccgtgcagcaggacatgaatggtatcctcctggggtatgagatccgctactggaaagctggggacaaagaagcagctgcggaccgagtgaggacagcagggctggacaccagtgcccgagtcagcggcctgcatcccaacaccaagtaccatgtgaccgtgagggcctacaaccgggctggcactgggcctgccagcccttctgccaacgccacgaccatgaagccccctccgcggcgacctcctggcaacatctcctggactttctcaagctctagtcttagcattaagtgggaccctgtggtccctttccgaaatgagtctgcagtcaccggctataagatgctgtaccagaatgacttacacctgactcccacgctccacctcaccggcaagaactggatagaaatcccagtgcctgaagacattggccatgccctggtacaaattcggaccacagggcccggaggggatgggatccctgcagaagtccacatcgtgaggaatggagagatggccctctgggaccctatacggactccgccacttgagagcagtcctaggcccggcaggaacaccagacatgaacaggttgaagaactggagcgaagtgcacacctcaccatccttcagtctaaggaagaagggcaagccctgggaccaagagctctcccgccttctccctcgagcagcagcaaggaccctgacgctgtccccgataactccctaggggctcctgcctgcccaagcggctgagaaccagcgccccgatgcctgaggctgggagcctgagccccttcagctttgaggggggtgatactccaggctgtttggggtgggagccaaaaagagttgagaggccagggcccttggtggaaaggggcaccagccttggtctgagatagtcacaacccaggtgacgatgccctctcagccaacactgccaacctgaccctgtcatcccgattgacagcgccacttcaggtggctgggtgactaaagggcttgtcttggtggggtctcccacccctccaagacccattctgcacagtccctccagggtttgggcaggagatggccaatcatgcgcccacctctccagtgctgcctgcagtcagctcggcctccccgacctgcagccccagactctgctctcccagcactgactcactcctgcctgggaggggaatgcagcattcatgctgtgtgtcctggtattgggaggtttctgggaagggcagaggataaatgtggccctgcctgctcccaggtatacctaggaccacctggccagatccgctcccagacggccttggactgcttgcatttccccggagaaaaaggggttaataaatgggc

SEQ ID NO: 4416 - DNA, 1539 bp, Homo sapiens
  source 1..1539: mol_type = unassigned DNA
gggcgcgctcacacacacgcgccctcacccgccaccgccgccgcggccgccgccgcacccggacagcgagcggctgaggccgccagggcccaaaggacagcggcccagacaggggctggcggcccggccggccccggctcaccgactcgggcagcatccacctgccccagccaacacccttctctcgccccaggtcctttctcagcctccagctgggctgtccccaagctgagctgaggctcttctcctccgatccccacctctgcccggacatccaccatggggacagccaccaggaggaagccacacctgctgctggtagctgctgtggcccttgtctcctcttcaggtgaagatactgaggctcagaagagttctataactttcccaaggtcccacagctagtagagggccagcctagtccccaggcccaggcctcgttggtccacactgccccagtaagggtattaggctccagggacacacatcctctctgcatgtttgtggctggcgacgtctcatgcacctcacaccccacagatcagttcttctgtaagggtcccttgaaagccccctgggaggtagaactgcttccattctgaggccccagcatcttgaactttatggcatttgctaccttgcactgtcaatttcctgtctccctccttggaccgcaagccccttgaagaagagggactgtgtcttaatcatctttacaagccagtctctagcccagtgctgggtatagagcaggtgctcaatacctaagtgtaggatgggtgattgattgaactagtatggccagatggggcctgcccagcctatttaaattcaaatttaaattaattaagtaatataaaatgtaaaatgtcgttcttcagtcgcaatagccacatgtcaagtgctcgatagccctacgtggctagtggttaccacattgaacagtgcagaaaatgggacattcccatcatcagagaaagttttactggacagcacagcccaagaggccaggctccagccaggccaaggctctgaggcatctggtggtgtcatcacctgcagcttggagttcagccctgggatcccaaaccaccttcgggcctgtctttgaagaccagcccctcagtgtgctattcccagaggagtccacggaggagcaggtgttgctggcatgccgcgcccgggccagccctccagccacctatcggtggaagatgaatggtaccgagatgaagctggagccaggttcccgtcaccagctggtggggggcaacctggtcatcatgaaccccaccaaggcacaggatgccggggtctaccagtgcctggcctccaacccagtgggcaccgttgtcagcagggaggccatcctccgcttcggctttctgcaggaattctccaaggaggagcgagacccagtgaaagctcatgaaggctggggggtgatgttgccctgtaacccacctgcccactacccaggcttgtcctaccgctggctcctcaacgagttccccaacttcatcccgacggacgggcgtc

SEQ ID NO: 4417 - DNA, 4318 bp, Homo sapiens
  source 1..4318: mol_type = unassigned DNA
tcacacacacgcgccctcacccgccaccgccgccgcggccgccgccgcacccggacagcgagcggctgaggccgccagggcccaaaggacagcggcccagacaggggctggcggcccggccggccccggctcaccgactcgggcagcatccacctgccccagccaacacccttctctcgccccaggtcctttctcagcctccagctgggctgtccccaagctgagctgaggctcttctcctccgatccccacctctgcccggacatccaccatggggacagccaccaggaggaagccacacctgctgctggtagctgctgtggcccttgtctcctcttcagcttggagttcagccctgggatcccaaaccaccttcgggcctgtctttgaagaccagcccctcagtgtgctattcccagaggagtccacggaggagcaggtgttgctggcatgccgcgcccgggccagccctccagccacctatcggtggaagatgaatggtaccgagatgaagctggagccaggttcccgtcaccagctggtggggggcaacctggtcatcatgaaccccaccaaggcacaggatgccggggtctaccagtgcctggcctccaacccagtgggcaccgttgtcagcagggaggccatcctccgcttcggctttctgcaggaattctccaaggaggagcgagacccagtgaaagctcatgaaggctggggggtgatgttgccctgtaacccacctgcccactacccaggcttgtcctaccgctggctcctcaacgagttccccaacttcatcccgacggacgggcgtcacttcgtgtcccagaccacagggaacctgtacattgcccgaaccaatgcctcagacctgggcaactactcctgtttggccaccagccacatggacttctccaccaagagcgtcttcagcaagtttgctcagctcaacctggctgctgaagatacccggctctttgcacccagcatcaaggcccggttcccagcagagacctatgcactggtggggcagcaggtcaccctggagtgcttcgcctttgggaaccctgtcccccggatcaagtggcgcaaagtggacggctccctgtccccgcagtggaccacagctgagcccaccctgcagatccccagcgtcagctttgaggatgagggcacctacgagtgtgaggcggagaactccaagggccgagacaccgtgcagggccgcatcatcgtgcaggctcagcctgagtggctaaaagtgatctcggacacagaggctgacattggctccaacctgcgttggggctgtgcagccgccggcaagccccggcctacagtgcgctggctgcggaacggggagcctctggcctcccagaaccgggtggaggtgttggctggggacctgcggttctccaagctgagcctggaagactcgggcatgtaccagtgtgtggcagagaataagcacggtaccatctacgccagcgccgagctagccgtgcaagcactcgcccctgacttcaggctgaatcccgtgaggcgtctgatccccgcggcccgcgggggagagatccttatcccctgccagccccgggcagctccaaaggccgtggtgctctggagcaaaggcacggagattttggtcaacagcagcagagtgactgtaactccagatggcaccttgatcataagaaacatcagccggtcagatgaaggcaaatacacctgctttgctgagaacttcatgggcaaagccaacagcactggaatcctatctgtgcgagatgcaaccaaaatcactctagccccctcaagtgccgacatcaacttgggtgacaacctgaccctacagtgccatgcctcccacgaccccaccatggacctcaccttcacctggaccctggacgacttccccatcgactttgataagcctggagggcactaccggagaactaatgtgaaggagaccattggggatctgaccatcctgaacgcccagctgcgccatggggggaagtacacgtgcatggcccagacggtggtggacagcgcgtccaaggaggccacagtcctggtccgaggtccgccaggtcccccaggaggtgtggtggtgagggacattggcgacaccaccatccagctcagctggagccgtggcttcgacaaccacagccccatcgctaagtacaccctgcaagctcgcactccacctgcagggaagtggaagcaggttcggaccaatcctgcaaacatcgagggcaatgccgagactgcacaggtgctgggcctcaccccctggatggactatgagttccgggtcatagccagcaacattctgggcactggggagcctagtgggccctccagcaaaatccggaccagggaagcagccccctcggtggcaccctcaggactcagcggaggaggtggagcccccggagagctcatcgtcaactggacgcccatgtcacgggagtaccagaacggagacggcttcggctacctgctgtccttccgcaggcagggcagcactcactggcagaccgcccgggtgcctggcgccgatgcccagtactttgtctacagcaacgagagcgtccggccctacacgccctttgaggtcaagatccgcagctacaaccgccgcggggatgggcccgagagcctcactgcactcgtgtactcagctgaggaagagcccagggtggcccctaccaaggtgtgggccaaaggggtctcatcctcagagatgaacgtgacctgggaacccgtgcagcaggacatgaatggtatcctcctggggtatgagatccgctactggaaagctggggacaaagaagcagctgcggaccgagtgaggacagcagggctggacaccagtgcccgagtcagcggcctgcatcccaacaccaagtaccatgtgaccgtgagggcctacaaccgggctggcactgggcctgccagcccttctgccaacgccacgaccatgaagccccctccgcggcgacctcctggcaacatctcctggactttctcaagctctagtcttagcattaagtgggaccctgtggtccctttccgaaatgagtctgcagtcaccggctataagatgctgtaccagaatgacttacacctgactcccacgctccacctcaccggcaagaactggatagaaatcccagtgcctgaagacattggccatgccctggtacaaattcggaccacagggcccggaggggatgggatccctgcagaagtccacatcgtgaggaatggaggcacaagcatgatggtggagaacatggcagtccgcccagcaccacaccctggcaccgtcatttcccactccgtggcgatgctgatcctcataggctccctggagctctgatcctggaacccctccctctgcgccgcagctggacgccacctccgacggacacagccagccccttcctgctgccaagagatggccctctgggaccctatacggactccgccacttgagagcagtcctaggcccggcaggaacaccagacatgaacaggttgaagaactggagcgaagtgcacacctcaccatccttcagtctaaggaagaagggcaagccctgggaccaagagctctcccgccttctccctcgagcagcagcaaggaccctgacgctgtccccgataactccctaggggctcctgcctgcccaagcggctgagaaccagcgccccgatgcctgaggctgggagcctgagccccttcagctttgaggggggtgatactccaggctgtttggggtgggagccaaaaagagttgagaggccagggcccttggtggaaaggggcaccagccttggtctgagatagtcacaacccaggtgacgatgccctctcagccaacactgccaacctgaccctgtcatcccgattgacagcgccacttcaggtggctgggtgactaaagggcttgtcttggtggggtctcccacccctccaagacccattctgcacagtccctccagggtttgggcaggagatggccaatcatgcgcccacctctccagtgctgcctgcagtcagctcggcctccccgacctgcagccccagactctgctctcccagcactgactcactcctgcctgggaggggaatgcagcattcatgctgtgtgtcctggtattgggaggtttctgggaagggcagaggataaatgtggccctgcctgctcccaggtatacctaggaccacctggccagatccgctcccagacggccttggactgcttgcatttccccggagaaaaaggggttaataaatgggc

SEQ ID NO: 4418 - DNA, 4497 bp, Homo sapiens
  source 1..4497: mol_type = unassigned DNA
acacacacgcgccctcacccgccaccgccgccgcggccgccgccgcacccggacagcgagcggctgaggccgccagggcccaaaggacagcggcccagacaggggctggcggcccggccggccccggctcaccgactcgggcagcatccacctgccccagccaacacccttctctcgccccaggtcctttctcagcctccagctgggctgtccccaagctgagctgaggctcttctcctccgatccccacctctgcccggacatccaccatggggacagccaccaggaggaagccacacctgctgctggtagctgctgtggcccttgtctcctcttcagcttggagttcagccctgggatcccaaaccaccttcgggcctgtctttgaagaccagcccctcagtgtgctattcccagaggagtccacggaggagcaggtgttgctggcatgccgcgcccgggccagccctccagccacctatcggtggaagatgaatggtaccgagatgaagctggagccaggttcccgtcaccagctggtggggggcaacctggtcatcatgaaccccaccaaggcacaggatgccggggtctaccagtgcctggcctccaacccagtgggcaccgttgtcagcagggaggccatcctccgcttcggctttctgcaggaattctccaaggaggagcgagacccagtgaaagctcatgaaggctggggggtgatgttgccctgtaacccacctgcccactacccaggcttgtcctaccgctggctcctcaacgagttccccaacttcatcccgacggacgggcgtcacttcgtgtcccagaccacagggaacctgtacattgcccgaaccaatgcctcagacctgggcaactactcctgtttggccaccagccacatggacttctccaccaagagcgtcttcagcaagtttgctcagctcaacctggctgctgaagatacccggctctttgcacccagcatcaaggcccggttcccagcagagacctatgcactggtggggcagcaggtcaccctggagtgcttcgcctttgggaaccctgtcccccggatcaagtggcgcaaagtggacggctccctgtccccgcagtggaccacagctgagcccaccctgcagatccccagcgtcagctttgaggatgagggcacctacgagtgtgaggcggagaactccaagggccgagacaccgtgcagggccgcatcatcgtgcaggctcagcctgagtggctaaaagtgatctcggacacagaggctgacattggctccaacctgcgttggggctgtgcagccgccggcaagccccggcctacagtgcgctggctgcggaacggggagcctctggcctcccagaaccgggtggaggtgttggctggggacctgcggttctccaagctgagcctggaagactcgggcatgtaccagtgtgtggcagagaataagcacggtaccatctacgccagcgccgagctagccgtgcaagcactcgcccctgacttcaggctgaatcccgtgaggcgtctgatccccgcggcccgcgggggagagatccttatcccctgccagccccgggcagctccaaaggccgtggtgctctggagcaaaggcacggagattttggtcaacagcagcagagtgactgtaactccagatggcaccttgatcataagaaacatcagccggtcagatgaaggcaaatacacctgctttgctgagaacttcatgggcaaagccaacagcactggaatcctatctgtgcgagatgcaaccaaaatcactctagccccctcaagtgccgacatcaacttgggtgacaacctgaccctacagtgccatgcctcccacgaccccaccatggacctcaccttcacctggaccctggacgacttccccatcgactttgataagcctggagggcactaccggagaactaatgtgaaggagaccattggggatctgaccatcctgaacgcccagctgcgccatggggggaagtacacgtgcatggcccagacggtggtggacagcgcgtccaaggaggccacagtcctggtccgaggtccgccaggtcccccaggaggtgtggtggtgagggacattggcgacaccaccatccagctcagctggagccgtggcttcgacaaccacagccccatcgctaagtacaccctgcaagctcgcactccacctgcagggaagtggaagcaggttcggaccaatcctgcaaacatcgagggcaatgccgagactgcacaggtgctgggcctcaccccctggatggactatgagttccgggtcatagccagcaacattctgggcactggggagcctagtgggccctccagcaaaatccggaccagggaagcagccccctcggtggcaccctcaggactcagcggaggaggtggagcccccggagagctcatcgtcaactggacggcagggcagcactcactggcagaccgcccgggtgcctggcgccgatgcccagtactttgtctacagcaacgagagcgtccggccctacacgccctttgaggtcaagatccgcagctacaaccgccgcggggatgggcccgagagcctcactgcactcgtgtactcagctgaggaagagcccagggtggcccctaccaaggtgtgggccaaaggggtctcatcctcagagatgaacgtgacctgggaacccgtgcagcaggacatgaatggtatcctcctggggtatgagatccgctactggaaagctggggacaaagaagcagctgcggaccgagtgaggacagcagggctggacaccagtgcccgagtcagcggcctgcatcccaacaccaagtaccatgtgaccgtgagggcctacaaccgggctggcactgggcctgccagcccttctgccaacgccacgaccatgaagccccctccgcggcgacctcctggcaacatctcctggactttctcaagctctagtcttagcattaagtgggaccctgtggtccctttccgaaatgagtctgcagtcaccggctataagatgctgtaccagaatgacttacacctgactcccacgctccacctcaccggcaagaactggatagaaatcccagtgcctgaagacattggccatgccctggtacaaattcggaccacagggcccggaggggatgggatccctgcagaagtccacatcgtgaggaatggaggcacaagcatgatggtggagaacatggcagtccgcccagcaccacaccctggcaccgtcatttcccactccgtggcgatgctgatcctcataggctccctggagctctgatcctggaacccctccctctgcgccgcagctggacgccacctccgacggacacagccagccccttcctgctgccaaggtggcctgacactgtgccagagagtggctggttttaaatacctactttaaacagtgccctttttgtaggaggtaggatattttatattctgccgcaggatagaacccacgcaaggattttctttaaattgagaggcaccaggcagtaacttccatgatgacactgacgcctatacctgagctctaggctgcctggagggaaggaacaggcccatgggaagaagggggttttaaaaacatgtcttcaactcagcagagatggccctctgggaccctatacggactccgccacttgagagcagtcctaggcccggcaggaacaccagacatgaacaggttgaagaactggagcgaagtgcacacctcaccatccttcagtctaaggaagaagggcaagccctgggaccaagagctctcccgccttctccctcgagcagcagcaaggaccctgacgctgtccccgataactccctaggggctcctgcctgcccaagcggctgagaaccagcgccccgatgcctgaggctgggagcctgagccccttcagctttgaggggggtgatactccaggctgtttggggtgggagccaaaaagagttgagaggccagggcccttggtggaaaggggcaccagccttggtctgagatagtcacaacccaggtgacgatgccctctcagccaacactgccaacctgaccctgtcatcccgattgacagcgccacttcaggtggctgggtgactaaagggcttgtcttggtggggtctcccacccctccaagacccattctgcacagtccctccagggtttgggcaggagatggccaatcatgcgcccacctctccagtgctgcctgcagtcagctcggcctccccgacctgcagccccagactctgctctcccagcactgactcactcctgcctgggaggggaatgcagcattcatgctgtgtgtcctggtattgggaggtttctgggaagggcagaggataaatgtggccctgcctgctcccaggtatacctaggaccacctggccagatccgctcccagacggccttggactgcttgcatttccccggagaaaaagg

SEQ ID NO: 4419 - DNA, 5081 bp, Homo sapiens
  source 1..5081: mol_type = unassigned DNA
acacacacgcgccctcacccgccaccgccgccgcggccgccgccgcacccggacagcgagcggctgaggccgccagggcccaaaggacagcggcccagacaggggctggcggcccggccggccccggctcaccgactcgggcagcatccacctgccccagccaacacccttctctcgccccaggtcctttctcagcctccagctgggctgtccccaagctgagctgaggctcttctcctccgatccccacctctgcccggacatccaccatggggacagccaccaggaggaagccacacctgctgctggtagctgctgtggcccttgtctcctcttcagcttggagttcagccctgggatcccaaaccaccttcgggcctgtctttgaagaccagcccctcagtgtgctattcccagaggagtccacggaggagcaggtgttgctggcatgccgcgcccgggccagccctccagccacctatcggtggaagatgaatggtaccgagatgaagctggagccaggttcccgtcaccagctggtggggggcaacctggtcatcatgaaccccaccaaggcacaggatgccggggtctaccagtgcctggcctccaacccagtgggcaccgttgtcagcagggaggccatcctccgcttcggctttctgcaggaattctccaaggaggagcgagacccagtgaaagctcatgaaggctggggggtgatgttgccctgtaacccacctgcccactacccaggcttgtcctaccgctggctcctcaacgagttccccaacttcatcccgacggacgggcgtcacttcgtgtcccagaccacagggaacctgtacattgcccgaaccaatgcctcagacctgggcaactactcctgtttggccaccagccacatggacttctccaccaagagcgtcttcagcaagtttgctcagctcaacctggctgctgaagatacccggctctttgcacccagcatcaaggcccggttcccagcagagacctatgcactggtggggcagcaggtcaccctggagtgcttcgcctttgggaaccctgtcccccggatcaagtggcgcaaagtggacggctccctgtccccgcagtggaccacagctgagcccaccctgcagatccccagcgtcagctttgaggatgagggcacctacgagtgtgaggcggagaactccaagggccgagacaccgtgcagggccgcatcatcgtgcaggctcagcctgagtggctaaaagtgatctcggacacagaggctgacattggctccaacctgcgttggggctgtgcagccgccggcaagccccggcctacagtgcgctggctgcggaacggggagcctctggcctcccagaaccgggtggaggtgttggctggggacctgcggttctccaagctgagcctggaagactcgggcatgtaccagtgtgtggcagagaataagcacggtaccatctacgccagcgccgagctagccgtgcaagcactcgcccctgacttcaggctgaatcccgtgaggcgtctgatccccgcggcccgcgggggagagatccttatcccctgccagccccgggcagctccaaaggccgtggtgctctggagcaaaggcacggagattttggtcaacagcagcagagtgactgtaactccagatggcaccttgatcataagaaacatcagccggtcagatgaaggcaaatacacctgctttgctgagaacttcatgggcaaagccaacagcactggaatcctatctgtgcgagatgcaaccaaaatcactctagccccctcaagtgccgacatcaacttgggtgacaacctgaccctacagtgccatgcctcccacgaccccaccatggacctcaccttcacctggaccctggacgacttccccatcgactttgataagcctggagggcactaccggagaactaatgtgaaggagaccattggggatctgaccatcctgaacgcccagctgcgccatggggggaagtacacgtgcatggcccagacggtggtggacagcgcgtccaaggaggccacagtcctggtccgaggtccgccaggtcccccaggaggtgtggtggtgagggacattggcgacaccaccatccagctcagctggagccgtggcttcgacaaccacagccccatcgctaagtacaccctgcaagctcgcactccacctgcagggaagtggaagcaggttcggaccaatcctgcaaacatcgagggcaatgccgagactgcacaggtgctgggcctcaccccctggatggactatgagttccgggtcatagccagcaacattctgggcactggggagcctagtgggccctccagcaaaatccggaccagggaagcagccccctcggtggcaccctcaggactcagcggaggaggtggagcccccggagagctcatcgtcaactggacgcccatgtcacgggagtaccagaacggagacggcttcggctacctgctgtccttccgcaggcagggcagcactcactggcagaccgcccgggtgcctggcgccgatgcccagtactttgtctacagcaacgagagcgtccggccctacacgccctttgaggtcaagatccgcagctacaaccgccgcggggatgggcccgagagcctcactgcactcgtgtactcagctgaggaagagcccagggtggcccctaccaaggtgtgggccaaaggggtctcatcctcagagatgaacgtgacctgggaacccgtgcagcaggacatgaatggtatcctcctggggtatgagatccgctactggaaagctggggacaaagaagcagctgcggaccgagtgaggacagcagggctggacaccagtgcccgagtcagcggcctgcatcccaacaccaagtaccatgtgaccgtgagggcctacaaccgggctggcactgggcctgccagcccttctgccaacgccacgaccatgaagccccctccgcggcgacctcctggcaacatctcctggactttctcaagctctagtcttagcattaagtgggaccctgtggtccctttccgaaatgagtctgcagtcaccggctataagatgctgtaccagaatgacttacacctgactcccacgctccacctcaccggcaagaactggatagaaatcccagtgcctgaagacattggccatgccctggtacaaattcggaccacagggcccggaggggatgggatccctgcagaagtccacatcgtgaggaatggaggcacaagcatgatggtggagaacatggcagtccgcccagcaccacaccctggcaccgtcatttcccactccgtggcgatgctgatcctcataggctccctggagctctgatcctggaacccctccctctgcgccgcagctggacgccacctccgacggacacagccagccccttcctgctgccaaggtggcctgacactgtgccagagagtggctggttttaaatacctactttaaacagtgccctttttgtaggagagatggccctctgggaccctatacggactccgccacttgagagcagtcctaggcccggcaggaacaccagacatgaacaggttgaagaactggagcgaagtgcacacctcaccatccttcagtctaaggaagaagggcaagccctgggaccaagagctctcccgccttctccctcgagcagcagcaaggaccctgacgctgtccccgataactccctaggggctcctgcctgcccaagcggctgagaaccagcgccccgatgcctgaggctgggagcctgagccccttcagctttgaggggggtgatactccaggctgtttggggtgggagccaaaaagagttgagaggccagggcccttggtggaaaggggcaccagccttggtctgagatagtcacaacccaggtgacgatgccctctcagccaacactgccaacctgaccctgtcatcccgattgacagcgccacttcaggtggctgggtgactaaagggcttgtcttggtggggtctcccacccctccaagacccattctgcacagtccctccagggtttgggcaggagatggccaatcatgcgcccacctctccagtgctgcctgcagtcagctcggcctccccgacctgcagccccagactctgctctcccagcactgactcactcctgcctgggaggggaatgcagcattcatgctgtgtgtcctggtattgggaggtttctgggaagggcagaggataaatgtggccctgcctgctcccaggtatacctaggaccacctggccagatccgctcccagacggccttggactgcttgcatttccccggagaaaaaggggttaataaatgggccatcctttcctgagctctgggtatactaccagtcacagaacgtcagagctggaagaagccttagagctcaacttcttcaagcccctcactttacagatgaggaaatggaggtggtccagagagggtctgggattcccaaggtcacacagcccagaagagatggggctgggttaagaactcgagtcttccacctttctgttcaaggctgtttgtctacccagaggaaggaggcactgctgaatggctatggcctggctaagaaggtgattagtcagtagggtgtgaaaattctacttcaaggggttcggattggtgatcatggggattggcatggctgggttcccgtccaaggtgtgggcagagcttctaccaaacttcaacatggagggctgacttgaagctccctgtccccctcactcttgccccaagaaaagaggccaaagcaagagcagattccctaggcaagagcagcagcacaactaggaaaccccaaagcccatgctccgacaggtggcccttcacagggggcagcgggacaggcatcttgaagggcatatgtcctcggaagctccgagcctgttttctgtagtttatagttagagctctattttgttatggttttttaaacttttaagtcctgctctattttcctgggcaggtttatgttgatgtttacccactacaattttttaaa

SEQ ID NO: 4420 - DNA, 2174 bp, Homo sapiens
  source 1..2174: mol_type = unassigned DNA
cgcttcggctgtgagacccgcgggggaccaagacactttgggggagggggagagggggctaggagaaattactgagaaaggataagggacaccctcaagccgggccttcctgacctcacatgacatgccttagtgaactgctgcttctccgtgaaggatgagtcggggaggggctcgcaggccaggaggacagtgcctgagcccctggtctctgcctccagttctgcaggaattctccaaggaggagcgagacccagtgaaagctcatgaaggctggggggtgatgttgccctgtaacccacctgcccactacccaggtgagtccagacctggggccagggttagagagggcacaggaagggcttccagatgcttggcagaggaaggatggaataaaaggagacccctggaaatgacccttagaagcacccatccctgggaccctaactttaaatgatctgtgtttcctttataggtctgtcactttccatcgttgtgccctgcttccgccttcaaactgggtggcccctgagggctgcgatccctggcagacttagcgctccctgagggcaggaataaagtcacttcttccctctaggtctccccttagccccagttcagagcatggtggctgtcaggacagggcttgcagaaccgcaccagcatgctggggtcccacccagagtggccctgttagcccagcaccccctggtttcctcaaactcctcacatcctaggcttgtcctaccgctggctcctcaacgagttccccaacttcatcccgacggacgggcgtcacttcgtgtcccagaccacagggaacctgtacattgcccgaaccaatgcctcagacctgggcaactactcctgtttggccaccagccacatggacttctccaccaagagcgtcttcagcaagtttgctcagctcaacctggctgctgaaggtcaggcttggccaggcgtggctggagggagggaactggaagggtcagcgggcattaggaaaagggtttttcctttggagattggaagatcagcttgcagggcactgattccaggccctggacccccagatcctcctgcttcaaatcctgaggcccttgccccaggcctcaaggagattccacacagctgcctagacagagttggctctgaaaggtgctgagatcccatgcacgggagcacctgacctggagtcatctgcatctgatttgtaaaaccctctctccccagatacccggctctttgcacccagcatcaaggcccggttcccagcagagacctatgcactggtggggcagcaggtcaccctggagtgcttcgcctttgggaagtgagtgtgaagagggaggggaagcagagcacggtctctcgggggcacaggtgaccccagggtgagggcaggcagagtcagggctcttatcttggtgtccctcacagggtctagcaaagtactgggcacacagtgggtatcgaccaccactcactggacagtacctctctgggtgaggcatcgcatatgccaggggccttccatggccaggatcacttggtcttccagcagtgcatggcaggctcagacagcttgagtaacacccagggctggaggcaggcagcacagtgtacagactccaaccctgtctgtctcattcagatcccagctctgccacccgcagaccttgggtaaactgcctaacctctctgtgcctcagtttctttatggtggtgataatagtacctacctcatagggttgtcatgaggattaaatcagttcatatatgtgagatacttagaacagtgcctggaatttagttaagtgttccgtgaatgttaacagtgatctatttgagaatggcagcagaaagtgttctctttctcgtactcctagaagaaggagtcactagaacagggctaagcaaatagcaggtgctcaataaatgtttgtagtatgaaagaaagaatgtgatttgtactttggccccctcctccctcaactatctcctatggttacctgggagaatctctgccttgtgggaagttttgggcttccagaaaatccacatgaaaagcatgtggaagtggggccaggtgcggtggttcatgtctgtaatcccagcactttgggaggccgaggtgggaagatcatgaggtcaggagatcgagaccatcc

SEQ ID NO: 4421 - DNA, 1238 bp, Homo sapiens
  source 1..1238: mol_type = unassigned DNA
tttgggggagggggagagggggctaggagaaattactgagaaaggataagggacaccctcaagccgggccttcctgacctcacatgacatgccttagtgaactgctgcttctccgtgaaggatgagtcggggaggggctcgcaggccaggaggacagtgcctgagcccctggtctctgcctccagttctgcaggaattctccaaggaggagcgagacccagtgaaagctcatgaaggctggggggtgatgttgccctgtaacccacctgcccactacccaggcttgtcctaccgctggctcctcaacgagttccccaacttcatcccgacggacgggcgtcacttcgtgtcccagaccacagggaacctgtacattgcccgaaccaatgcctcagacctgggcaactactcctgtttggccaccagccacatggacttctccaccaagagcgtcttcagcaagtttgctcagctcaacctggctgctgaagatacccggctctttgcacccagcatcaaggcccggttcccagcagagacctatgcactggtggggcagcaggtcaccctggagtgcttcgcctttgggaaccctgtcccccggatcaagtggcgcaaagtggacggctccctgtccccgcagtggaccacagctgagcccaccctgcagatccccagcgtcagctttgaggatgagggcacctacgagtgtgaggcggagaactccaagggccgagacaccgtgcagggccgcatcatcgtgcaggctcagcctgagtggctaaaagtgatctcggacacagaggctgacattggctccaacctgcgttggggctgtgcagccgccggcaagccccggcctacagtgcgctggctgcggaacggggagcctctggcctcccaggtaggagacatggggcttcccccgacacatcacaactgtcctctgctcacttggttccctcccccgcccagaacttcccctgcaccactagtagcccctctgggctaattagggtgtcagagggtggtcctaggaccacctaaggacttcttcccatcccagtcccattgtcacaggctaggcctggatccaggcacagttcagccacaaaagaagtgatgtggtcctgactgggtcacctcacccttccagctttggggaggcctgggtaatctgcatcctgaggttccaggcagccctgaggtaggactggacatataagccatatcctcta

SEQ ID NO: 4422 - DNA, 1548 bp, Homo sapiens
  source 1..1548: mol_type = unassigned DNA
agggacaccctcaagccgggccttcctgacctcacatgacatgccttagtgaactgctgcttctccgtgaaggatgagtcggggaggggctcgcaggccaggaggacagtgcctgagcccctggtctctgcctccagttctgcaggaattctccaaggaggagcgagacccagtgaaagctcatgaaggctggggggtgatgttgccctgtaacccacctgcccactacccaggcttgtcctaccgctggctcctcaacgagttccccaacttcatcccgacggacgggcgtcacttcgtgtcccagaccacagggaacctgtacattgcccgaaccaatgcctcagacctgggcaactactcctgtttggccaccagccacatggacttctccaccaagagcgtcttcagcaagtttgctcagctcaacctggctgctgaagatacccggctctttgcacccagcatcaaggcccggttcccagcagagacctatgcactggtggggcagcaggtcaccctggagtgcttcgcctttgggaagtgagtgtgaagagggaggggaagcagagcacggtctctcgggggcacaggtgaccccagggtgagggcaggcagagtcagggctcttatcttggtgtccctcacagggtctagcaaagtactgggcacacagtgggtatcgaccaccactcactggacagtacctctctgggtgaggcatcgcatatgccaggggccttccatggccaggatcacttggtcttccagcagtgcatggcaggctcagacagcttgagtaacacccagggctggaggcaggcagcacagtgtacagactccaaccctgtctgtctcattcagatcccagctctgccacccgcagaccttgggtaaactgcctaacctctctgtgcctcagtttctttatggtggtgataatagtacctacctcatagggttgtcatgaggattaaatcagttcatatatgtgagatacttagaacagtgcctggaatttagttaagtgttccgtgaatgttaacagtgatctatttgagaatggcagcagaaagtgttctctttctcgtactcctagaagaaggagtcactagaacagggctaagcaaatagcaggtgctcaataaatgtttgtagtatgaaagaaagaatgtgatttgtactttggccccctcctccctcaactatctcctatggttacctgggagaatctctgccttgtgggaagttttgggcttccagaaaatccacatgaaaagcatgtggaagtggggccaggtgcggtggttcatgtctgtaatcccagcactttgggaggccgaggtgggaagatcatgaggtcaggagatcgagaccatcctggctagcacggtgaaatccagtctctactaaaaatacaaaaaaaactagccaggtgtggtggcgggtgcctgtagtcccagctgctcgggaggctgaggcaggagaatggtgtgaacccgggaggcagagcttgcagtgagccaagattgccccactgcactccag

SEQ ID NO: 4423 - DNA, 3501 bp, Homo sapiens
  source 1..3501: mol_type = unassigned DNA
gctgcttctccgtgaaggatgagtcggggaggggctcgcaggccaggaggacagtgcctgagcccctggtctctgcctccagttctgcaggaattctccaaggaggagcgagacccagtgaaagctcatgaaggctggggggtgatgttgccctgtaacccacctgcccactacccaggcttgtcctaccgctggctcctcaacgagttccccaacttcatcccgacggacgggcgtcacttcgtgtcccagaccacagggaacctgtacattgcccgaaccaatgcctcagacctgggcaactactcctgtttggccaccagccacatggacttctccaccaagagcgtcttcagcaagtttgctcagctcaacctggctgctgaagatacccggctctttgcacccagcatcaaggcccggttcccagcagagacctatgcactggtggggcagcaggtcaccctggagtgcttcgcctttgggaaccctgtcccccggatcaagtggcgcaaagtggacggctccctgtccccgcagtggaccacagctgagcccaccctgcagatccccagcgtcagctttgaggatgagggcacctacgagtgtgaggcggagaactccaagggccgagacaccgtgcagggccgcatcatcgtgcaggctcagcctgagtggctaaaagtgatctcggacacagaggctgacattggctccaacctgcgttggggctgtgcagccgccggcaagccccggcctacagtgcgctggctgcggaacggggagcctctggcctcccagaaccgggtggaggtgttggctggggacctgcggttctccaagctgagcctggaagactcgggcatgtaccagtgtgtggcagagaataagcacggtaccatctacgccagcgccgagctagccgtgcaagcactcgcccctgacttcaggctgaatcccgtgaggcgtctgatccccgcggcccgcgggggagagatccttatcccctgccagccccgggcagctccaaaggccgtggtgctctggagcaaaggcacggagattttggtcaacagcagcagagtgactgtaactccagatggcaccttgatcataagaaacatcagccggtcagatgaaggcaaatacacctgctttgctgagaacttcatgggcaaagccaacagcactggaatcctatctgtgcgagatgcaaccaaaatcactctagccccctcaagtgccgacatcaacttgggtgacaacctgaccctacagtgccatgcctcccacgaccccaccatggacctcaccttcacctggaccctggacgacttccccatcgactttgataagcctggagggcactaccggagaactaatgtgaaggagaccattggggatctgaccatcctgaacgcccagctgcgccatggggggaagtacacgtgcatggcccagacggtggtggacagcgcgtccaaggaggccacagtcctggtccgaggtccgccaggtcccccaggaggtgtggtggtgagggacattggcgacaccaccatccagctcagctggagccgtggcttcgacaaccacagccccatcgctaagtacaccctgcaagctcgcactccacctgcagggaagtggaagcaggttcggaccaatcctgcaaacatcgagggcaatgccgagactgcacaggtgctgggcctcaccccctggatggactatgagttccgggtcatagccagcaacattctgggcactggggagcctagtgggccctccagcaaaatccggaccagggaagcagccccctcggtggcaccctcaggactcagcggaggaggtggagcccccggagagctcatcgtcaactggacgcccatgtcacgggagtaccagaacggagacggcttcggctacctgctgtccttccgcaggcagggcagcactcactggcagaccgcccgggtgcctggcgccgatgcccagtactttgtctacagcaacgagagcgtccggccctacacgccctttgaggtcaagatccgcagctacaaccgccgcggggatgggcccgagagcctcactgcactcgtgtactcagctgaggaagagcccagggtggcccctaccaaggtgtgggccaaaggggtctcatcctcagagatgaacgtgacctgggaacccgtgcagcaggacatgaatggtatcctcctggggtatgagatccgctactggaaagctggggacaaagaagcagctgcggaccgagtgaggacagcagggctggacaccagtgcccgagtcagcggcctgcatcccaacaccaagtaccatgtgaccgtgagggcctacaaccgggctggcactgggcctgccagcccttctgccaacgccacgaccatgaagccccctccgcggcgacctcctggcaacatctcctggactttctcaagctctagtcttagcattaagtgggaccctgtggtccctttccgaaatgagtctgcagtcaccggctataagatgctgtaccagaatgacttacacctgactcccacgctccacctcaccggcaagaactggatagaaatcccagtgcctgaagacattggccatgccctggtacaaattcggaccacagggcccggaggggatgggatccctgcagaagtccacatcgtgaggaatggagagatggccctctgggaccctatacggactccgccacttgagagcagtcctaggcccggcaggaacaccagacatgaacaggttgaagaactggagcgaagtgcacacctcaccatccttcagtctaaggaagaagggcaagccctgggaccaagagctctcccgccttctccctcgagcagcagcaaggaccctgacgctgtccccgataactccctaggggctcctgcctgcccaagcggctgagaaccagcgccccgatgcctgaggctgggagcctgagccccttcagctttgaggggggtgatactccaggctgtttggggtgggagccaaaaagagttgagaggccagggcccttggtggaaaggggcaccagccttggtctgagatagtcacaacccaggtgacgatgccctctcagccaacactgccaacctgaccctgtcatcccgattgacagcgccacttcaggtggctgggtgactaaagggcttgtcttggtggggtctcccacccctccaagacccattctgcacagtccctccagggtttgggcaggagatggccaatcatgcgcccacctctccagtgctgcctgcagtcagctcggcctccccgacctgcagccccagactctgctctcccagcactgactcactcctgcctgggaggggaatgcagcattcatgctgtgtgtcctggtattgggaggtttctgggaagggcagaggataaatgtggccctgcctgctcccaggtatacctaggaccacctggccagatccgctcccagac

SEQ ID NO: 4424 - DNA, 4306 bp, Homo sapiens
  source 1..4306: mol_type = unassigned DNA
gaaagctcatgaaggctggggggtgatgttgccctgtaacccacctgcccactacccaggtgagtccagacctggggccagggttagagagggcacaggaagggcttccagatgcttggcagaggaaggatggaataaaaggagacccctggaaatgacccttagaagcacccatccctgggaccctaactttaaatgatctgtgtttcctttataggtctgtcactttccatcgttgtgccctgcttccgccttcaaactgggtggcccctgagggctgcgatccctggcagacttagcgctccctgagggcaggaataaagtcacttcttccctctaggtctccccttagccccagttcagagcatggtggctgtcaggacagggcttgcagaaccgcaccagcatgctggggtcccacccagagtggccctgttagcccagcaccccctggtttcctcaaactcctcacatcctaggcttgtcctaccgctggctcctcaacgagttccccaacttcatcccgacggacgggcgtcacttcgtgtcccagaccacagggaacctgtacattgcccgaaccaatgcctcagacctgggcaactactcctgtttggccaccagccacatggacttctccaccaagagcgtcttcagcaagtttgctcagctcaacctggctgctgaagatacccggctctttgcacccagcatcaaggcccggttcccagcagagacctatgcactggtggggcagcaggtcaccctggagtgcttcgcctttgggaaccctgtcccccggatcaagtggcgcaaagtggacggctccctgtccccgcagtggaccacagctgagcccaccctgcagatccccagcgtcagctttgaggatgagggcacctacgagtgtgaggcggagaactccaagggccgagacaccgtgcagggccgcatcatcgtgcaggctcagcctgagtggctaaaagtgatctcggacacagaggctgacattggctccaacctgcgttggggctgtgcagccgccggcaagccccggcctacagtgcgctggctgcggaacggggagcctctggcctcccagaaccgggtggaggtgttggctggggacctgcggttctccaagctgagcctggaagactcgggcatgtaccagtgtgtggcagagaataagcacggtaccatctacgccagcgccgagctagccgtgcaagcactcgcccctgacttcaggctgaatcccgtgaggcgtctgatccccgcggcccgcgggggagagatccttatcccctgccagccccgggcagctccaaaggccgtggtgctctggagcaaaggcacggagattttggtcaacagcagcagagtgactgtaactccagatggcaccttgatcataagaaacatcagccggtcagatgaaggcaaatacacctgctttgctgagaacttcatgggcaaagccaacagcactggaatcctatctgtgcgagatgcaaccaaaatcactctagccccctcaagtgccgacatcaacttgggtgacaacctgaccctacagtgccatgcctcccacgaccccaccatggacctcaccttcacctggaccctggacgacttccccatcgactttgataagcctggagggcactaccggagaactaatgtgaaggagaccattggggatctgaccatcctgaacgcccagctgcgccatggggggaagtacacgtgcatggcccagacggtggtggacagcgcgtccaaggaggccacagtcctggtccgaggtccgccaggtcccccaggaggtgtggtggtgagggacattggcgacaccaccatccagctcagctggagccgtggcttcgacaaccacagccccatcgctaagtacaccctgcaagctcgcactccacctgcagggaagtggaagcaggttcggaccaatcctgcaaacatcgagggcaatgccgagactgcacaggtgctgggcctcaccccctggatggactatgagttccgggtcatagccagcaacattctgggcactggggagcctagtgggccctccagcaaaatccggaccagggaagcagccccctcggtggcaccctcaggactcagcggaggaggtggagcccccggagagctcatcgtcaactggacgcccatgtcacgggagtaccagaacggagacggcttcggctacctgctgtccttccgcaggcagggcagcactcactggcagaccgcccgggtgcctggcgccgatgcccagtactttgtctacagcaacgagagcgtccggccctacacgccctttgaggtcaagatccgcagctacaaccgccgcggggatgggcccgagagcctcactgcactcgtgtactcagctgaggaagagcccagggtggcccctaccaaggtgtgggccaaaggggtctcatcctcagagatgaacgtgacctgggaacccgtgcagcaggacatgaatggtatcctcctggggtatgagatccgctactggaaagctggggacaaagaagcagctgcggaccgagtgaggacagcagggctggacaccagtgcccgagtcagcggcctgcatcccaacaccaagtaccatgtgaccgtgagggcctacaaccgggctggcactgggcctgccagcccttctgccaacgccacgaccatgaagccccctccgcggcgacctcctggcaacatctcctggactttctcaagctctagtcttagcattaagtgggaccctgtggtccctttccgaaatgagtctgcagtcaccggctataagatgctgtaccagaatgacttacacctgactcccacgctccacctcaccggcaagaactggatagaaatcccagtgcctgaagacattggccatgccctggtacaaattcggaccacagggcccggaggggatgggatccctgcagaagtccacatcgtgaggaatggaggcacaagcatgatggtggagaacatggcagtccgcccagcaccacaccctggcaccgtcatttcccactccgtggcgatgctgatcctcataggctccctggagctctgatcctggaacccctccctctgcgccgcagctggacgccacctccgacggacacagccagccccttcctgctgccaaggtggcctgacactgtgccagagagtggctggttttaaatacctactttaaacagtgccctttttgtaggaggtaggatattttatattctgccgcaggatagaacccacgcaaggattttctttaaattgagaggcaccaggcagtaacttccatgatgacactgacgcctatacctgagctctaggctgcctggagggaaggaacaggcccatgggaagaagggggttttaaaaacatgtcttcaactcagcagagatggccctctgggaccctatacggactccgccacttgagagcagtcctaggcccggcaggaacaccagacatgaacaggttgaagaactggagcgaagtgcacacctcaccatccttcagtctaaggaagaagggcaagccctgggaccaagagctctcccgccttctccctcgagcagcagcaaggaccctgacgctgtccccgataactccctaggggctcctgcctgcccaagcggctgagaaccagcgccccgatgcctgaggctgggagcctgagccccttcagctttgaggggggtgatactccaggctgtttggggtgggagccaaaaagagttgagaggccagggcccttggtggaaaggggcaccagccttggtctgagatagtcacaacccaggtgacgatgccctctcagccaacactgccaacctgaccctgtcatcccgattgacagcgccacttcaggtggctgggtgactaaagggcttgtcttggtggggtctcccacccctccaagacccattctgcacagtccctccagggtttgggcaggagatggccaatcatgcgcccacctctccagtgctgcctgcagtcagctcggcctccccgacctgcagccccagactctgctctcccagcactgactcactcctgcctgggaggggaatgcagcattcatgctgtgtgtcctggtattgggaggtttctgggaagggcagaggataaatgtggccctgcctgctcccaggtatacctaggaccacctggccagatccgctcccagacggccttggactgcttgcatttccccggagaaaaaggggttaataaatgggccatcctttcctg

SEQ ID NO: 4425 - DNA, 7112 bp, Homo sapiens
  source 1..7112: mol_type = unassigned DNA
cccgacggacgggcgtcacttcgtgtcccagaccacagggaacctgtacattgcccgaaccaatgcctcagacctgggcaactactcctgtttggccaccagccacatggacttctccaccaagagcgtcttcagcaagtttgctcagctcaacctggctgctgaagatacccggctctttgcacccagcatcaaggcccggttcccagcagagacctatgcactggtggggcagcaggtcaccctggagtgcttcgcctttgggaaccctgtcccccggatcaagtggcgcaaagtggacggctccctgtccccgcagtggaccacagctgagcccaccctgcagatccccagcgtcagctttgaggatgagggcacctacgagtgtgaggcggagaactccaagggccgagacaccgtgcagggccgcatcatcgtgcaggctcagcctgagtggctaaaagtgatctcggacacagaggctgacattggctccaacctgcgttggggctgtgcagccgccggcaagccccggcctacagtgcgctggctgcggaacggggagcctctggcctcccagaaccgggtggaggtgttggctggggacctgcggttctccaagctgagcctggaagactcgggcatgtaccagtgtgtggcagagaataagcacggtaccatctacgccagcgccgagctagccgtgcaagcactcgcccctgacttcaggctgaatcccgtgaggcgtctgatccccgcggcccgcgggggagagatccttatcccctgccagccccgggcagctccaaaggccgtggtgctctggagcaaaggcacggagattttggtcaacagcagcagagtgactgtaactccagatggcaccttgatcataagaaacatcagccggtcagatgaaggcaaatacacctgctttgctgagaacttcatgggcaaagccaacagcactggaatcctatctgtgcgagatgcaaccaaaatcactctagccccctcaagtgccgacatcaacttgggtgacaacctgaccctacagtgccatgcctcccacgaccccaccatggacctcaccttcacctggaccctggacgacttccccatcgactttgataagcctggagggcactaccggagaactaatgtgaaggagaccattggggatctgaccatcctgaacgcccagctgcgccatggggggaagtacacgtgcatggcccagacggtggtggacagcgcgtccaaggaggccacagtcctggtccgaggtccgccaggtcccccaggaggtgtggtggtgagggacattggcgacaccaccatccagctcagctggagccgtggcttcgacaaccacagccccatcgctaagtacaccctgcaagctcgcactccacctgcagggaagtggaagcaggttcggaccaatcctgcaaacatcgagggcaatgccgagactgcacaggtgctgggcctcaccccctggatggactatgagttccgggtcatagccagcaacattctgggcactggggagcctagtgggccctccagcaaaatccggaccagggaagcagccccctcggtggcaccctcaggactcagcggaggaggtggagcccccggagagctcatcgtcaactggacgcccatgtcacgggagtaccagaacggagacggcttcggctacctgctgtccttccgcaggcagggcagcactcactggcagaccgcccgggtgcctggcgccgatgcccagtactttgtctacagcaacgagagcgtccggccctacacgccctttgaggtcaagatccgcagctacaaccgccgcggggatgggcccgagagcctcactgcactcgtgtactcagctgaggaagagcccagggtggcccctaccaaggtgtgggccaaaggggtctcatcctcagagatgaacgtgacctgggaacccgtgcagcaggacatgaatggtatcctcctggggtatgagatccgctactggaaagctggggacaaagaagcagctgcggaccgagtgaggacagcagggctggacaccagtgcccgagtcagcggcctgcatcccaacaccaagtaccatgtgaccgtgagggcctacaaccgggctggcactgggcctgccagcccttctgccaacgccacgaccatgaagccccctccgcggcgacctcctggcaacatctcctggactttctcaagctctagtcttagcattaagtgggaccctgtggtccctttccgaaatgagtctgcagtcaccggctataagatgctgtaccagaatgacttacacctgactcccacgctccacctcaccggcaagaactggatagaaatcccagtgcctgaagacattggccatgccctggtacaaattcggaccacagggcccggaggggatgggatccctgcagaagtccacatcgtgaggaatggaggtgctgctcctcccctacccttatcccctcgagagattcaggatccacccagatacctgagaggatcattcccacccaggccaactccaatctctacccgcaaaggaaagtggaaggcaggcaggaaccaagtgcaaagtagtcttagaactgcctcgccgccacctttctacccagcccccagaacatccccgagggccagggaagggcgcagggtgcagggggaggctgaggaccaaccagcaatagcaaacggcctacaaagcaccgtaggagtcggactgagaagaccacccagccgtccgctcccaggcctgcagctggccctgcacaagcatgatggtggagaacatggcagtccgcccagcaccacaccctggcaccgtcatttcccactccgtggcgatgctgatcctcataggctccctggagctctgatcctggaacccctccctctgcgccgcagctggacgccacctccgacggacacagccagccccttcctgctgccaaggtggcctgacactgtgccagagagtggctggttttaaatacctactttaaacagtgccctttttgtaggaggtaggatattttatattctgccgcaggatagaacccacgcaaggattttctttaaattgagaggcaccaggcagtaacttccatgatgacactgacgcctatacctgagctctaggctgcctggagggaaggaacaggcccatgggaagaagggggttttaaaaacatgtcttcaactcagcagagatggccctctgggaccctatacggactccgccacttgagagcagtcctaggcccggcaggaacaccagacatgaacaggttgaagaactggagcgaagtgcacacctcaccatccttcagtctaaggaagaagggcaagccctgggaccaagagctctcccgccttctccctcgagcagcagcaaggaccctgacgctgtccccgataactccctaggggctcctgcctgcccaagcggctgagaaccagcgccccgatgcctgaggctgggagcctgagccccttcagctttgaggggggtgatactccaggctgtttggggtgggagccaaaaagagttgagaggccagggcccttggtggaaaggggcaccagccttggtctgagatagtcacaacccaggtgacgatgccctctcagccaacactgccaacctgaccctgtcatcccgattgacagcgccacttcaggtggctgggtgactaaagggcttgtcttggtggggtctcccacccctccaagacccattctgcacagtccctccagggtttgggcaggagatggccaatcatgcgcccacctctccagtgctgcctgcagtcagctcggcctccccgacctgcagccccagactctgctctcccagcactgactcactcctgcctgggaggggaatgcagcattcatgctgtgtgtcctggtattgggaggtttctgggaagggcagaggataaatgtggccctgcctgctcccaggtatacctaggaccacctggccagatccgctcccagacggccttggactgcttgcatttccccggagaaaaaggggttaataaatgggccatcctttcctgagctctgggtatactaccagtcacagaacgtcagagctggaagaagccttagagctcaacttcttcaagcccctcactttacagatgaggaaatggaggtggtccagagagggtctgggattcccaaggtcacacagcccagaagagatggggctgggttaagaactcgagtcttccacctttctgttcaaggctgtttgtctacccagaggaaggaggcactgctgaatggctatggcctggctaagaaggtgattagtcagtagggtgtgaaaattctacttcaaggggttcggattggtgatcatggggattggcatggctgggttcccgtccaaggtgtgggcagagcttctaccaaacttcaacatggagggctgacttgaagctccctgtccccctcactcttgccccaagaaaagaggccaaagcaagagcagattccctaggcaagagcagcagcacaactaggaaaccccaaagcccatgctccgacaggtggcccttcacagggggcagcgggacaggcatcttgaagggcatatgtcctcggaagctccgagcctgttttctgtagtttatagttagagctctattttgttatggttttttaaacttttaagtcctgctctattttcctgggcaggtttatgttgatgtttacccactacaattttttaaaaatataagctcacatgccttttccctgccacagccaaacccccactgcaccctacccacccacccctagcccaggtcagctttcctggagctggctaatgaaagcctcctcacctcttcccaacccttacaagcaagggtgctaggggctcagctatacgaccattctccctgacagggagtccaaacttggcctagcatccctcctggcccccctctggccacgacttggcctgtgcctggttctctatcagaaaggggatgctgaacaaaacctccttccaagttttatccaattcgttcctcattgcctcgggctgcgtcaggggaagcaggggacaggtgtccagttgctgggccgagggaggagctggtttggcataggacctaaccagtgaagctagaggctacagccactaaacttgcttcaggccaacgatagttactcacaagtaagtaccttaatgctaatgaggtccactaaaaaggggaggaaggcagacctcctgggagacccacgaagggtttttagccagggaaaactgagccccaggaaaacctaaccactgggcaggcagaatttgtttgagggatagaacgacaacaaaataaatgttcctgcagcctgagatttcaggtagagtactgactaaggtttaataagacaataggtgacctgaggacatgcaagcttgtaaaatgcaacagcctcctgctagagtgacttgtacatgagcttgcttgcagaagactagattagatgtttctcaggatcccctcctgcgcaggggttctctgattttcgtgttctctgcccagatgggctgggggagttgagagtgtgcttattttcactgcgatcatgagaccacagttctgggttatctcctctcatacatcaagccccagaggaggcggcaagaggaacagccacaaacaagtactttaccccacagcttagtggccagtaaacaccctggggactaggaaaaggaaccaactgtaggcacctctccagggcctagggagacaagtgtcctctcttctgcatacatttgggctccccttacagagccctttgccctggctctctggtccttgttgctctaacagtccagatgtacacccagcctcagggggaaggcagctctctccagacagagtctcagggcccagcaaggtcaggttatctgctttcattcagggcaacaaatgatacaaatggtgccagggagtggcaaggccatgggggtaggtgggggtgtctttttcttttcataaagtaacaacagacgagactgaggttaaacatcagaaaaaaacctctggaatgaccttcctcattccaggaggccctggaataaggaagaggcttctttctgagggagctttgaggaattttgacagctgttgacatgggatttgggaaaggtgaagctgtgactggaggggcaggagatggtccaagtgtccatccagagatgagactcttagaatcaaagtgttcagcccaggaagtcttggagatcccaccttctgtggccctgcaccttatgggaagccattaagggggctcatctaggaattctggttacagcccagtgctcatcccagcgtatgctgcctctttagggcagccccaagggccagccagcctgtactctgggcaagagcccaaaatggctaggaatgtttgactcccttaatctcttccccagctacagaggaatcttttctctgcctggtctcagaatgggactgccaactggctcattggtgggagacacagtatcctcaaacctgtggccactggcatgacagtggtgctctgtctccctgggtgacacccaccctaggcttcctcctggatgtgatggggattgccagagaggctcttagcataaaaggcattaggtgggcatttttctgtgtgcccccaaaaagctccatggaaacaggcacctggtagctgcggaacacccgtggacttgtgtatatggtcataggctttgggaagacaggacgtaaaggaaaatgagagaaacaaaatgggtcagatagctttggccacagccccaggcagcctttggggcctatgacacttagtgcccttagatgggatacatcttgcctcggccccaagactcctccaacttacccgtcccatccagggcctgcacagcttagagaggctcacagcttggcaaatgctagggcttcatcagaccactgacttgactcagtgtttgttaaaatggaaccactcccgttggcctactgtttctctcctgtacttcttgtaatgatagttatttattg

SEQ ID NO: 4426 - DNA, 1749 bp, Homo sapiens
  source 1..1749: mol_type = unassigned DNA
cagggcactgattccaggccctggacccccagatcctcctgcttcaaatcctgaggcccttgccccaggcctcaaggagattccacacagctgcctagacagagttggctctgaaaggtgctgagatcccatgcacgggagcacctgacctggagtcatctgcatctgatttgtaaaaccctctctccccagatacccggctctttgcacccagcatcaaggcccggttcccagcagagacctatgcactggtggggcagcaggtcaccctggagtgcttcgcctttgggaaccctgtcccccggatcaagtggcgcaaagtggacggctccctgtccccgcagtggaccacagctgagcccaccctgcagatccccagcgtcagctttgaggatgagggcacctacgagtgtgaggcggagaactccaagggccgagacaccgtgcagggccgcatcatcgtgcaggctcagcctgagtggctaaaagtgatctcggacacagaggctgacattggctccaacctgcgttggggctgtgcagccgccggcaagccccggcctacagtgcgctggctgcggaacggggagcctctggcctcccagaaccgggtggaggtgttggctggggacctgcggttctccaagctgagcctggaagactcgggcatgtaccagtgtgtggcagagaataagcacggtaccatctacgccagcgccgagctagccgtgcaaggtaaggggcccagggaggcaggggacatcccaaggacatgcatatggtggctttcagagctctgagtttaggtgtttccaaacacacatgcacataccctgtggccattttccttggttttccaacagtttctaagtaggagaactcagagatttaagaaaggagatgagacacagggttgacagctgccagagggcagggtctctgacttgttccatgtctggcacacagtaaatgtttgctgcagtgagtgaaaaaaacagaaaccaaatcaatcagatttgtgtaacccaaccctttcagctatgtgagctttggcaagttacttagtgtttctgtgtttcagtttcttgattataaaatataggcaataatagtcctgccctcctgggctgctgtatggaacaagtgagatgaaagaggtacagcataaagggcctgcccaccatacagcaggtgcccgggaaatgtaagccagtgctaatatttagttgtgtgacttgagctcactgagcctcagtttcctcatccataaaatggacacagtgatacccaccacatcaggttttagtgaagctttgctaagaagcattcattcgttccttcatccattcaaccactacttactcaacacttcacagggatgaatataaaagatacggtctctgcctttaagtagcttacaatccagtagagggaaagggacaaataaaccccaaatcaaacaattaaataatttcagctagccatcaaatatagtataaagaaaatccaggcagggtgcagtggctcatgcctgtgtaatcccagcactttgggaggcaggggtgagtggatctcctcaagctcaggagtttgagaccagcctgggcaacatggtgaaaccccatgtctatgaaaaacacaaaatttagccaggcatggtagcacacacgtgtagtcccagctacacaggaggctgaggcaggagaatcacttgagccctggaggcagaggctgcagtgaactgagatt

SEQ ID NO: 4427 - DNA, 1082 bp, Homo sapiens
  source 1..1082: mol_type = unassigned DNA
attaaaactgatacctcagtccgttttagtgcacagattactactaactaaagtccctttcaaagtaggggcaaggcctgccctgtagaggcaacggaaaagagaacccgtaaagacccaggtcacaggccactgtggcggagggcagacccagaggcatggtgaccggtgcgggagagggcaggccagcttcagggtgcagaccccgcagaagcccggcttcactggctccagggttgttgcaggggggatgggtagagcagccctgcctcttgccccttccctgcgtgtgctccgagcctacctgggagaggagagtgaggatcagccagaaggcaccctctctccctctgttcctcccaggcccagcatctcaggagggcctgagagtctgggtatgaggagctgcgggcactggaggggtaggcccagctcagcccacaccctctggctttgtctctcctgccagccctgtcccccggatcaagtggcgcaaagtggacggctccctgtccccgcagtggaccacagctgagcccaccctgcagatccccagcgtcagctttgaggatgagggcacctacgagtgtgaggcggagaactccaagggccgagacaccgtgcagggccgcatcatcgtgcaggctcagcctgagtggctaaaagtgatctcggacacagaggctgacattggctccaacctgcgttggggctgtgcagccgccggcaagccccggcctacagtgcgctggctgcggaacggggagcctctggcctcccagaaccgggtggaggtgttggctggggacctgcggttctccaagctgagcctggaagactcgggcatgtaccagtgtgtggcagagaataagcacggtaccatctacgccagcgccgagctagccgtgcaagcactcgcccctgacttcaggctgaatcccgtgaggcgtctgatccccgcggcccgcgggggagagatccttatcccctgccagccccgggcagctccaaaggccgtggtgctctggagcaaaggcacggagattttggtcaacagcagcagagtgactgtaactccagat

SEQ ID NO: 4428 - DNA, 3370 bp, Homo sapiens
  source 1..3370: mol_type = unassigned DNA
gatcaagtggcgcaaagtggacggctccctgtccccgcagtggaccacagctgagcccaccctgcagatccccagcgtcagctttgaggatgagggcacctacgagtgtgaggcggagaactccaagggccgagacaccgtgcagggccgcatcatcgtgcaggctcagcctgagtggctaaaagtgatctcggacacagaggctgacattggctccaacctgcgttggggctgtgcagccgccggcaagccccggcctacagtgcgctggctgcggaacggggagcctctggcctcccagaaccgggtggaggtgttggctggggacctgcggttctccaagctgagcctggaagactcgggcatgtaccagtgtgtggcagagaataagcacggtaccatctacgccagcgccgagctagccgtgcaagcactcgcccctgacttcaggctgaatcccgtgaggcgtctgatccccgcggcccgcgggggagagatccttatcccctgccagccccgggcagctccaaaggccgtggtgctctggagcaaaggcacggagattttggtcaacagcagcagagtgactgtaactccagatggcaccttgatcataagaaacatcagccggtcagatgaaggcaaatacacctgctttgctgagaacttcatgggcaaagccaacagcactggaatcctatctgtgcgagatgcaaccaaaatcactctagccccctcaagtgccgacatcaacttgggtgacaacctgaccctacagtgccatgcctcccacgaccccaccatggacctcaccttcacctggaccctggacgacttccccatcgactttgataagcctggagggcactaccggagaactaatgtgaaggagaccattggggatctgaccatcctgaacgcccagctgcgccatggggggaagtacacgtgcatggcccagacggtggtggacagcgcgtccaaggaggccacagtcctggtccgaggtccgccaggtcccccaggaggtgtggtggtgagggacattggcgacaccaccatccagctcagctggagccgtggcttcgacaaccacagccccatcgctaagtacaccctgcaagctcgcactccacctgcagggaagtggaagcaggttcggaccaatcctgcaaacatcgagggcaatgccgagactgcacaggtgctgggcctcaccccctggatggactatgagttccgggtcatagccagcaacattctgggcactggggagcctagtgggccctccagcaaaatccggaccagggaagcagccccctcggtggcaccctcaggactcagcggaggaggtggagcccccggagagctcatcgtcaactggacgcaacgagagcgtccggccctacacgccctttgaggtcaagatccgcagctacaaccgccgcggggatgggcccgagagcctcactgcactcgtgtactcagctgaggaagagcccagggtggcccctaccaaggtgtgggccaaaggggtctcatcctcagagatgaacgtgacctgggaacccgtgcagcaggacatgaatggtatcctcctggggtatgagatccgctactggaaagctggggacaaagaagcagctgcggaccgagtgaggacagcagggctggacaccagtgcccgagtcagcggcctgcatcccaacaccaagtaccatgtgaccgtgagggcctacaaccgggctggcactgggcctgccagcccttctgccaacgccacgaccatgaagccccctccgcggcgacctcctggcaacatctcctggactttctcaagctctagtcttagcattaagtgggaccctgtggtccctttccgaaatgagtctgcagtcaccggctataagatgctgtaccagaatgacttacacctgactcccacgctccacctcaccggcaagaactggatagaaatcccagtgcctgaagacattggccatgccctggtacaaattcggaccacagggcccggaggggatgggatccctgcagaagtccacatcgtgaggaatggaggcacaagcatgatggtggagaacatggcagtccgcccagcaccacaccctggcaccgtcatttcccactccgtggcgatgctgatcctcataggctccctggagctctgatcctggaacccctccctctgcgccgcagctggacgccacctccgacggacacagccagccccttcctgctgccaaggtggcctgacactgtgccagagagtggctggttttaaatacctactttaaacagtgccctttttgtaggaggtaggatattttatattctgccgcaggatagaacccacgcaaggattttctttaaattgagaggcaccaggcagtaacttccatgatgacactgacgcctatacctgagctctaggctgcctggagggaaggaacaggcccatgggaagaagggggttttaaaaacatgtcttcaactcagcagagatggccctctgggaccctatacggactccgccacttgagagcagtcctaggcccggcaggaacaccagacatgaacaggttgaagaactggagcgaagtgcacacctcaccatccttcagtctaaggaagaagggcaagccctgggaccaagagctctcccgccttctccctcgagcagcagcaaggaccctgacgctgtccccgataactccctaggggctcctgcctgcccaagcggctgagaaccagcgccccgatgcctgaggctgggagcctgagccccttcagctttgaggggggtgatactccaggctgtttggggtgggagccaaaaagagttgagaggccagggcccttggtggaaaggggcaccagccttggtctgagatagtcacaacccaggtgacgatgccctctcagccaacactgccaacctgaccctgtcatcccgattgacagcgccacttcaggtggctgggtgactaaagggcttgtcttggtggggtctcccacccctccaagacccattctgcacagtccctccagggtttgggcaggagatggccaatcatgcgcccacctctccagtgctgcctgcagtcagctcggcctccccgacctgcagccccagactctgctctcccagcactgactcactcctgcctgggaggggaatgcagcattcatgctgtgtgtcctggtattgggaggtttctgggaagggcagaggataaatgtggccctgcctgctcccaggtatacctaggaccacctggccagatccgctcccagacggccttggactgcttgcatttccccggagaaaaaggggttaataaatgggcca

SEQ ID NO: 4429 - DNA, 1436 bp, Homo sapiens
  source 1..1436: mol_type = unassigned DNA
ggcgcaaagtggacggctccctgtccccgcagtggaccacagctgagcccaccctgcagatccccagcgtcagctttgaggatgagggcacctacgagtgtgaggcggagaactccaagggccgagacaccgtgcagggccgcatcatcgtgcaggctcagcctgagtggctaaaagtgatctcggacacagaggctgacattggctccaacctgcgttggggctgtgcagccgccggcaagccccggcctacagtgcgctggctgcggaacggggagcctctggcctcccagaaccgggtggaggtgttggctggggacctgcggttctccaagctgagcctggaagactcgggcatgtaccagtgtgtggcagagaataagcacggtaccatctacgccagcgccgagctagccgtgcaagcactcgcccctgacttcaggctgaatcccgtgaggcgtctgatccccgcggcccgcgggggagagatccttatcccctgccagccccgggcagctccaaaggccgtggtgctctggagcaaaggcacggagattttggtcaacagcagcagagtgactgtaactccagatggcaccttgatcataagaaacatcagccggtcagatgaaggcaaatacacctgctttgctgagaacttcatgggcaaagccaacagcactggaatcctatctgtgcgagatgcaaccaaaatcactctagccccctcaagtgccgacatcaacttgggtgacaacctgaccctacagtgccatgcctcccacgaccccaccatggacctcaccttcacctggaccctggacgacttccccatcgactttgataagcctggagggcactaccggagaactaatgtgaaggagaccattggggatctgaccatcctgaacgcccagctgcgccatggggggaagtacacgtgcatggcccagacggtggtggacagcgcgtccaaggaggccacagtcctggtccgaggtgaggggtttcccacctctacccctaccccaactcccttaaaacccagctgggctgttctgacctgctcgcctcatctcccctcccttccctcaaagctgcggggaagggcttccggcggaactcctgtgagctggatataccctgtggttcttcacaggtcctaaatgatcaggacatttttcttccaaagtcaaagtttaaaaaatccactcctaaacacatcccaagacaggagtgctttactgagccctgaagttttcaaagcctagtgctgggagatctatgcacctctccatgtgacagcctctgtgagctcccccagccttgagacacatccctccacccaacaactggcacccgccccaactgcccacaccccttgcccgccctcccgcctgggtgtgtgttcactgcatcctctgctgccctgtctt

SEQ ID NO: 4430 - DNA, 1876 bp, Homo sapiens
  source 1..1876: mol_type = unassigned DNA
accgtgcagggccgcatcatcgtgcaggctcagcctgagtggctaaaagtgatctcggacacagaggctgacattggctccaacctgcgttggggctgtgcagccgccggcaagccccggcctacagtgcgctggctgcggaacggggagcctctggcctcccagaaccgggtggaggtgttggctggggacctgcggttctccaagctgagcctggaagactcgggcatgtaccagtgtgtggcagagaataagcacggtaccatctacgccagcgccgagctagccgtgcaagcactcgcccctgacttcaggctgaatcccgtgaggcgtctgatccccgcggcccgcgggggagagatccttatcccctgccagccccgggcagctccaaaggccgtggtgctctggagcaaaggcacggagattttggtcaacagcagcagagtgactgtaactccagatggcaccttgatcataagaaacatcagccggtcagatgaaggcaaatacacctgctttgctgagaacttcatgggcaaagccaacagcactggaatcctatctgtgcgagatgcaaccaaaatcactctagccccctcaagtgccgacatcaacttgggtgacaacctgaccctacagtgccatgcctcccacgaccccaccatggacctcaccttcacctggaccctggacgacttccccatcgactttgataagcctggagggcactaccggagaactaatgtgaaggagaccattggggatctgaccatcctgaacgcccagctgcgccatggggggaagtacacgtgcatggcccagacggtggtggacagcgcgtccaaggaggccacagtcctggtccgaggtccgccaggtcccccaggaggtgtggtggtgagggacattggcgacaccaccatccagctcagctggagccgtggcttcgacaaccacagccccatcgctaagtacaccctgcaagctcgcactccacctgcagggaagtggaagcaggttcggaccaatcctgcaaacatcgagggcaatgccgagactgcacaggtgctgggcctcaccccctggatggactatgagttccgggtcatagccagcaacattctgggcactggggagcctagtgggccctccagcaaaatccggaccagggaagcagccccctcggtggcaccctcaggactcagcggaggaggtggagcccccggagagctcatcgtcaactggacgcccatgtcacgggagtaccagaacggagacggcttcggctacctgctgtccttccgcaggcagggcagcactcactggcagaccgcccgggtgcctggcgccgatgcccagtactttgtctacagcaacgagagcgtccggccctacacgccctttgaggtcaagatccgcagctacaaccgccgcggggatgggcccgagagcctcactgcactcgtgtactcagctgaggaaggtgggctgcccctgggccccctgctcgtccctaccccagccacttgtccacagggatgtggggtgggggaacgctactcatctcccagctcagttccataggaggaggttgagaggacacctgggttccacatcattggcctcacttccagctcttgctaccttgtctcccttcggggttaggaaaagggaggctctctgggaatagaagtgggccctggagcattgcttggggggctcccactcggccttcatcctgaaggctttcctccaaaatcttaagcaaaggcaatcctggttgggggctgctctgcaggacacaggggggccctgggaatccaaacccattctgtattggtccccagagcccagggtggcccctaccaaggtg

SEQ ID NO: 4431 - DNA, 1789 bp, Homo sapiens
  source 1..1789: mol_type = unassigned DNA
ccgcatcatcgtgcaggctcagcctgagtggctaaaagtgatctcggacacagaggctgacattggctccaacctgcgttggggctgtgcagccgccggcaagccccggcctacagtgcgctggctgcggaacggggagcctctggcctcccagaaccgggtggaggtgttggctggggacctgcggttctccaagctgagcctggaagactcgggcatgtaccagtgtgtggcagagaataagcacggtaccatctacgccagcgccgagctagccgtgcaagcactcgcccctgacttcaggctgaatcccgtgaggcgtctgatccccgcggcccgcgggggagagatccttatcccctgccagccccgggcagctccaaaggccgtggtgctctggagcaaaggcacggagattttggtcaacagcagcagagtgactgtaactccagatggcaccttgatcataagaaacatcagccggtcagatgaaggcaaatacacctgctttgctgagaacttcatgggcaaagccaacagcactggaatcctatctgtgcgagatgcaaccaaaatcactctagccccctcaagtgccgacatcaacttgggtgacaacctgaccctacagtgccatgcctcccacgaccccaccatggacctcaccttcacctggaccctggacgacttccccatcgactttgataagcctggagggcactaccggagaactaatgtgaaggagaccattggggatctgaccatcctgaacgcccagctgcgccatggggggaagtacacgtgcatggcccagacggtggtggacagcgcgtccaaggaggccacagtcctggtccgaggtccgccaggtcccccaggaggtgtggtggtgagggacattggcgacaccaccatccagctcagctggagccgtggcttcgacaaccacagccccatcgctaagtacaccctgcaagctcgcactccacctgcagggaagtggaagcaggttcggaccaatcctgcaaacatcgagggcaatgccgagactgcacaggtgctgggcctcaccccctggatggactatgagttccgggtcatagccagcaacattctgggcactggggagcctagtgggccctccagcaaaatccggaccagggaagcaggtgagagtcctgtgtgtcccaaaaagctatcatcagggcagagaccctggcaccacttatagggaatgccaagccagccgcaattatgctgagttccaaccctgctcacagggttcagactctcacaaaacagaggaggacagaacaccaagttgggaccagggccactgcatggacaaaccatctagtccaaactcctcatttaaaaactggccaaccttacaactgcatgtgcatctataatttttttaagtttaatttttaaaagtggaaaaaccaaagttcggagaaaggaagagtcacattgacagagcttggacttgaacccaggaccatggggtggtagacagatgtcttcctggaagagtatgcactacagaaatcagttaatgctggctgggcgcagtggctcaagcctgtaatcccagcactttgggaggccgaggcaggcagatcacctgaggtcagaagtttgagaccagcctggccaacatggtgaaaccccgtctctactaaaaatacaaaaattagccaggcgtggtgacacacacctgtaaatcccagctactcgggaggctgaagcaggagaatcgcttgaacccgggaggtggaggttgcag

SEQ ID NO: 4432 - DNA, 2075 bp, Homo sapiens
  source 1..2075: mol_type = unassigned DNA
agcctgcttgccctaggactgcactgagtctgggaccagaggaggctagtgctgtggtcacctcagagcttcagtcaggggtgcagaaagcacacaggaggctccagaatgatttaagttgcaaaagcagccactggcacagccacagagtgccagctttcttgtgcctccttcttccggccccctcctctttgtcctctccatctcagaatgctcatggcgccctctgctgtctggcacaggtgctgctgccctgattttctgttccttttaatgagctggaagctcctcctagctcatgccaggttttcttttccgggctcccacagctcagcctgagtggctaaaagtgatctcggacacagaggctgacattggctccaacctgcgttggggctgtgcagccgccggcaagccccggcctacagtgcgctggctgcggaacggggagcctctggcctcccaggtaggagacatggggcttcccccgacacatcacaactgtcctctgctcacttggttccctcccccgcccagaacttcccctgcaccactagtagcccctctgggctaattagggtgtcagagggtggtcctaggaccacctaaggacttcttcccatcccagtcccattgtcacaggctaggcctggatccaggcacagttcagccacaaaagaagtgatgtggtcctgactgggtcacctcacccttccagctttggggaggcctgggtaatctgcatcctgaggttccaggcagccctgaggtaggactggacatataagccatatcctctagggattatcagcctagagtctccactgctcccacccctgccaacccctcctccctgtggctcctgtggtcctgatccccctgggctctgggctcttctgcacagaaccgggtggaggtgttggctggggacctgcggttctccaagctgagcctggaagactcgggcatgtaccagtgtgtggcagagaataagcacggtaccatctacgccagcgccgagctagccgtgcaaggtaaggggcccagggaggcaggggacatcccaaggacatgcatatggtggctttcagagctctgagtttaggtgtttccaaacacacatgcacataccctgtggccattttccttggttttccaacagtttctaagtaggagaactcagagatttaagaaaggagatgagacacagggttgacagctgccagagggcagggtctctgacttgttccatgtctggcacacagtaaatgtttgctgcagtgagtgaaaaaaacagaaaccaaatcaatcagatttgtgtaacccaaccctttcagctatgtgagctttggcaagttacttagtgtttctgtgtttcagtttcttgattataaaatataggcaataatagtcctgccctcctgggctgctgtatggaacaagtgagatgaaagaggtacagcataaagggcctgcccaccatacagcaggtgcccgggaaatgtaagccagtgctaatatttagttgtgtgacttgagctcactgagcctcagtttcctcatccataaaatggacacagtgatacccaccacatcaggttttagtgaagctttgctaagaagcattcattcgttccttcatccattcaaccactacttactcaacacttcacagggatgaatataaaagatacggtctctgcctttaagtagcttacaatccagtagagggaaagggacaaataaaccccaaatcaaacaattaaataatttcagctagccatcaaatatagtataaagaaaatccaggcagggtgcagtggctcatgcctgtgtaatcccagcactttgggaggcaggggtgagtggatctcctcaagctcaggagtttgagaccagcctgggcaacatggtgaaaccccatgtctatgaaaaacacaaaatttagccaggcatggtagcacacacgtgtagtcccagctacacaggaggctgaggcaggagaatcacttgagccctggaggcagaggctgcagtgaactgagattgtgccattgcactccagcctgggcaac

SEQ ID NO: 4433 - DNA, 555 bp, Homo sapiens
  source 1..555: mol_type = unassigned DNA
atgccaggttttcttttccgggctcccacagctcagcctgagtggctaaaagtgatctcggacacagaggctgacattggctccaacctgcgttggggctgtgcagccgccggcaagccccggcctacagtgcgctggctgcggaacggggagcctctggcctcccagaaccgggtggaggtgttggctggggacctgcggttctccaagctgagcctggaagactcgggcatgtaccagtgtgtggcagagaataagcacggtaccatctacgccagcgccgagctagccgtgcaagcactcgcccctgacttcaggctgaatcccgtgaggcgtctgatccccgcggcccgcgggggagagatccttatcccctgccagccccgggcagctccaaaggccgtggtgctctggagcaaaggcacggagattttggtcaacagcagcagagtgactgtaactccagatggcaccttgatcataagaaacatcagccggtcagatgaaggcaaatacacctgctttgctgagaacttcatgggcaaagccaacagc

SEQ ID NO: 4434 - DNA, 4065 bp, Homo sapiens
  source 1..4065: mol_type = unassigned DNA
ggaggtgttggctggggacctgcggttctccaagctgagcctggaagactcgggcatgtaccagtgtgtggcagagaataagcacggtaccatctacgccagcgccgagctagccgtgcaagcactcgcccctgacttcaggctgaatcccgtgaggcgtctgatccccgcggcccgcgggggagagatccttatcccctgccagccccgggcagctccaaaggccgtggtgctctggagcaaaggcacggagattttggtcaacagcagcagagtgactgtaactccagatggcaccttgatcataagaaacatcagccggtcagatgaaggcaaatacacctgctttgctgagaacttcatgggcaaagccaacagcactggaatcctatctgtgcgagatgcaaccaaaatcactctagccccctcaagtgccgacatcaacttgggtgacaacctgaccctacagtgccatgcctcccacgaccccaccatggacctcaccttcacctggaccctggacgacttccccatcgactttgataagcctggagggcactaccggagaactaatgtgaaggagaccattggggatctgaccatcctgaacgcccagctgcgccatggggggaagtacacgtgcatggcccagacggtggtggacagcgcgtccaaggaggccacagtcctggtccgaggtccgccaggtcccccaggaggtgtggtggtgagggacattggcgacaccaccatccagctcagctggagccgtggcttcgacaaccacagccccatcgctaagtacaccctgcaagctcgcactccacctgcagggaagtggaagcaggttcggaccaatcctgcaaacatcgagggcaatgccgagactgcacaggtgctgggcctcaccccctggatggactatgagttccgggtcatagccagcaacattctgggcactggggagcctagtgggccctccagcaaaatccggaccagggaagcagccccctcggtggcaccctcaggactcagcggaggaggtggagcccccggagagctcatcgtcaactggacgcccatgtcacgggagtaccagaacggagacggcttcggctacctgctgtccttccgcaggcagggcagcactcactggcagaccgcccgggtgcctggcgccgatgcccagtactttgtctacagcaacgagagcgtccggccctacacgccctttgaggtcaagatccgcagctacaaccgccgcggggatgggcccgagagcctcactgcactcgtgtactcagctgaggaagagcccagggtggcccctaccaaggtgtgggccaaaggggtctcatcctcagagatgaacgtgacctgggaacccgtgcagcaggacatgaatggtatcctcctggggtatgagatccgctactggaaagctggggacaaagaagcagctgcggaccgagtgaggacagcagggctggacaccagtgcccgagtcagcggcctgcatcccaacaccaagtaccatgtgaccgtgagggcctacaaccgggctggcactgggcctgccagcccttctgccaacgccacgaccatgaagccccctccgcggcgacctcctggcaacatctcctggactttctcaagctctagtcttagcattaagtgggaccctgtggtccctttccgaaatgagtctgcagtcaccggctataaggtgaggaagcaatcagctaggcccagaatgggaaggaacagctcctctgtgtttccagtgaacataagcagcagcaatttatagcaagaggcatctgagtgagacataagcaaagggtttgtgactgtgagaggaatgaaattcatgaactattctctcagtaacttgcagtagaaactataaaaacgggcagatggtatcactgcagaaaggcagagttcacaggggcagtgatggactatggggatggagtatgggggttcttctagcttaaggagtctacggaaacagttcagtggcctgcaagctttcctccaccaatgaggagctttgtcaatggggaggaggggtgaggaggctggacctcaagagcccagaaccatcgggtctcctcccagtacctaaagctggggatgactcaacgatcagccctggtgtcaggaaactccacctggaaacctccttcccacagatgctgtaccagaatgacttacacctgactcccacgctccacctcaccggcaagaactggatagaaatcccagtgcctgaagacattggccatgccctggtacaaattcggaccacagggcccggaggggatgggatccctgcagaagtccacatcgtgaggaatggaggtgctgctcctcccctacccttatcccctcgagagattcaggatccacccagatacctgagaggatcattcccacccaggccaactccaatctctacccgcaaaggaaagtggaaggcaggcaggaaccaagtgcaaagtagtcttagaactgcctcgccgccacctttctacccagcccccagaacatccccgagggccagggaagggcgcagggtgcagggggaggctgaggaccaaccagcaatagcaaacggcctacaaagcaccgtaggagtcggactgagaagaccacccagccgtccgctcccaggcctgcagctggccctgtgagtctccttaggaaaggtctcaatcttgccacaagggtggggctagggtagtcccaggcccagctgactcagcttgtgctggtttcaggcacaagcatgatggtggagaacatggcagtccgcccagcaccacaccctggcaccgtcatttcccactccgtggcgatgctgatcctcataggctccctggagctctgatcctggaacccctccctctgcgccgcagctggacgccacctccgacggacacagccagccccttcctgctgccaaggtggcctgacactgtgccagagagtggctggttttaaatacctactttaaacagtgccctttttgtaggaggtaggatattttatattctgccgcaggatagaacccacgcaaggattttctttaaattgagaggcaccaggcagtaacttccatgatgacactgacgcctatacctgagctctaggctgcctggagggaaggaacaggcccatgggaagaagggggttttaaaaacatgtcttcaactcagcagagatggccctctgggaccctatacggactccgccacttgagagcagtcctaggcccggcaggaacaccagacatgaacaggttgaagaactggagcgaagtgcacacctcaccatccttcagtctaaggaagaagggcaagccctgggaccaagagctctcccgccttctccctcgagcagcagcaaggaccctgacgctgtccccgataactccctaggggctcctgcctgcccaagcggctgagaaccagcgccccgatgcctgaggctgggagcctgagccccttcagctttgaggggggtgatactccaggctgtttggggtgggagccaaaaagagttgagaggccagggcccttggtggaaaggggcaccagccttggtctgagatagtcacaacccaggtgacgatgccctctcagccaacactgccaacctgaccctgtcatcccgattgacagcgccacttcaggtggctgggtgactaaagggcttgtcttggtggggtctcccacccctccaagacccattctgcacagtccctccagggtttgggcaggagatggccaatcatgcgcccacctctccagtgctgcctgcagtcagctcggcctccccgacctgcagccccagactctgctctcccagcactgactcactcctgcctgggaggggaatgcagcattcatgctgtgtgtcctggtattgggaggtttctgggaagggcagaggataaatgtggccctgcctgctcccaggtatacctaggaccacctggccagatccgctcccagacggccttggactgcttgcatttccccggagaaaaaggggtta

SEQ ID NO: 4435 - DNA, 2957 bp, Homo sapiens
  source 1..2957: mol_type = unassigned DNA
gggcaaagccaacagcactggaatcctatctgtgcgagatgcaaccaaaatcactctagccccctcaagtgccgacatcaacttgggtgacaacctgaccctacagtgccatgcctcccacgaccccaccatggacctcaccttcacctggaccctggacgacttccccatcgactttgataagcctggagggcactaccggagaactaatgtgaaggagaccattggggatctgaccatcctgaacgcccagctgcgccatggggggaagtacacgtgcatggcccagacggtggtggacagcgcgtccaaggaggccacagtcctggtccgaggtcctaaatgatcaggacatttttcttccaaagtcaaagtttaaaaaatccactcctaaacacatcccaagacaggagtgctttactgagccctgaagttttcaaagcctagtgctgggagatctatgcacctctccatgtgacagcctctgtccgccaggtcccccaggaggtgtggtggtgagggacattggcgacaccaccatccagctcagctggagccgtggcttcgacaaccacagccccatcgctaagtacaccctgcaagctcgcactccacctgcagggaagtggaagcaggttcggaccaatcctgcaaacatcgagggcaatgccgagactgcacaggtgctgggcctcaccccctggatggactatgagttccgggtcatagccagcaacattctgggcactggggagcctagtgggccctccagcaaaatccggaccagggaagcagccccctcggtggcaccctcaggactcagcggaggaggtggagcccccggagagctcatcgtcaactggacgcccatgtcacgggagtaccagaacggagacggcttcggctacctgctgtccttccgcaggcagggcagcactcactggcagaccgcccgggtgcctggcgccgatgcccagtactttgtctacagcaacgagagcgtccggccctacacgccctttgaggtcaagatccgcagctacaaccgccgcggggatgggcccgagagcctcactgcactcgtgtactcagctgaggaagagcccagggtggcccctaccaaggtgtgggccaaaggggtctcatcctcagagatgaacgtgacctgggaacccgtgcagcaggacatgaatggtatcctcctggggtatgagatccgctactggaaagctggggacaaagaagcagctgcggaccgagtgaggacagcagggctggacaccagtgcccgagtcagcggcctgcatcccaacaccaagtaccatgtgaccgtgagggcctacaaccgggctggcactgggcctgccagcccttctgccaacgccacgaccatgaagccccctccgcggcgacctcctggcaacatctcctggactttctcaagctctagtcttagcattaagtgggaccctgtggtccctttccgaaatgagtctgcagtcaccggctataagatgctgtaccagaatgacttacacctgactcccacgctccacctcaccggcaagaactggatagaaatcccagtgcctgaagacattggccatgccctggtacaaattcggaccacagggcccggaggggatgggatccctgcagaagtccacatcgtgaggaatggaggcacaagcatgatggtggagaacatggcagtccgcccagcaccacaccctggcaccgtcatttcccactccgtggcgatgctgatcctcataggctccctggagctctgatcctggaacccctccctctgcgccgcagctggacgccacctccgacggacacagccagccccttcctgctgccaaggtggcctgacactgtgccagagagtggctggttttaaatacctactttaaacagtgccctttttgtaggaggtaggatattttatattctgccgcaggatagaacccacgcaaggattttctttaaattgagaggcaccaggcagtaacttccatgatgacactgacgcctatacctgagctctaggctgcctggagggaaggaacaggcccatgggaagaagggggttttaaaaacatgtcttcaactcagcagagatggccctctgggaccctatacggactccgccacttgagagcagtcctaggcccggcaggaacaccagacatgaacaggttgaagaactggagcgaagtgcacacctcaccatccttcagtctaaggaagaagggcaagccctgggaccaagagctctcccgccttctccctcgagcagcagcaaggaccctgacgctgtccccgataactccctaggggctcctgcctgcccaagcggctgagaaccagcgccccgatgcctgaggctgggagcctgagccccttcagctttgaggggggtgatactccaggctgtttggggtgggagccaaaaagagttgagaggccagggcccttggtggaaaggggcaccagccttggtctgagatagtcacaacccaggtgacgatgccctctcagccaacactgccaacctgaccctgtcatcccgattgacagcgccacttcaggtggctgggtgactaaagggcttgtcttggtggggtctcccacccctccaagacccattctgcacagtccctccagggtttgggcaggagatggccaatcatgcgcccacctctccagtgctgcctgcagtcagctcggcctccccgacctgcagccccagactctgctctcccagcactgactcactcctgcctgggaggggaatgcagcattcatgctgtgtgtcctggtattgggaggtttctgggaagggcagaggataaatgtggccctgcctgctcccaggtatacctaggaccacctggccagatccgctcccagacggccttggactgcttgcatttccccggagaaaaagg

SEQ ID NO: 4436 - DNA, 876 bp, Homo sapiens
  source 1..876: mol_type = unassigned DNA
gccatgcctcccacgaccccaccatggacctcaccttcacctggaccctggacgacttccccatcgactttgataagcctggagggcactaccggagaactaatgtgaaggagaccattggggatctgaccatcctgaacgcccagctgcgccatggggggaagtacacgtgcatggcccagacggtggtggacagcgcgtccaaggaggccacagtcctggtccgaggtccgccaggtcccccaggaggtgtggtggtgagggacattggcgacaccaccatccagctcagctggagccgtggcttcgacaaccacagccccatcgctaagtacaccctgcaagctcgcactccacctgcagggaagtggaagcaggttcggaccaatcctgcaaacatcgagggcaatgccgagactgcacaggtgctgggcctcaccccctggatggactatgagttccgggtcatagccagcaacattctgggcactggggagcctagtgggccctccagcaaaatccggaccagggaagcagcatcccagtagctgaggagcacaaagacagctgtgatgcaaaggaaacatgatgggctttaaaatgagaagggctgagttcagattctacctgtgccatgtattaactgtgtgaccttaggcaagttgattaactgctctgggcctcagtctttccaccctgaaaagggcaataataacacccacctcacaggatcaaatggccaatgtgtttaagtacctcttgcaaattacacggtcctaaactattgtcatcagaagcaagtgaaaaatctccagctgctggattctctacggaaatattttgacccccagccaagttactttctgccaagctgca

SEQ ID NO: 4437 - DNA, 2840 bp, Homo sapiens
  source 1..2840: mol_type = unassigned DNA
ggcccagacggtggtggacagcgcgtccaaggaggccacagtcctggtccgaggtccgccaggtcccccaggaggtgtggtggtgagggacattggcgacaccaccatccagctcagctggagccgtggcttcgacaaccacagccccatcgctaagtacaccctgcaagctcgcactccacctgcagggaagtggaagcaggttcggaccaatcctgcaaacatcgagggcaatgccgagactgcacaggtgctgggcctcaccccctggatggactatgagttccgggtcatagccagcaacattctgggcactggggagcctagtgggccctccagcaaaatccggaccagggaagcagccccctcggtggcaccctcaggactcagcggaggaggtggagcccccggagagctcatcgtcaactggacgcccatgtcacgggagtaccagaacggagacggcttcggctacctgctgtccttccgcaggcagggcagcactcactggcagaccgcccgggtgcctggcgccgatgcccagtactttgtctacagcaacgagagcgtccggccctacacgccctttgaggtcaagatccgcagctacaaccgccgcggggatgggcccgagagcctcactgcactcgtgtactcagctgaggaagagcccagggtggcccctaccaaggtgtgggccaaaggggtctcatcctcagagatgaacgtgacctgggaacccgtgcagcaggacatgaatggtatcctcctggggtatgagatccgctactggaaagctggggacaaagaagcagctgcggaccgagtgaggacagcagggctggacaccagtgcccgagtcagcggcctgcatcccaacaccaagtaccatgtgaccgtgagggcctacaaccgggctggcactgggcctgccagcccttctgccaacgccacgaccatgaagccccctccgcggcgacctcctggcaacatctcctggactttctcaagctctagtcttagcattaagtgggaccctgtggtccctttccgaaatgagtctgcagtcaccggctataagatgctgtaccagaatgacttacacctgactcccacgctccacctcaccggcaagaactggatagaaatcccagtgcctgaagacattggccatgccctggtacaaattcggaccacagggcccggaggggatgggatccctgcagaagtccacatcgtgaggaatggaggtgctgctcctcccctacccttatcccctcgagagattcaggatccacccagatacctgagaggatcattcccacccaggccaactccaatctctacccgcaaaggaaagtggaaggcaggcaggaaccaagtgcaaagtagtcttagaactgcctcgccgccacctttctacccagcccccagaacatccccgagggccagggaagggcgcagggtgcagggggaggctgaggaccaaccagcaatagcaaacggcctacaaagcaccgtaggagtcggactgagaagaccacccagccgtccgctcccaggcctgcagctggccctgtgagtctccttaggaaaggtctcaatcttgccacaagggtggggctagggtagtcccaggcccagctgactcagcttgtgctggtttcaggcacaagcatgatggtggagaacatggcagtccgcccagcaccacaccctggcaccgtcatttcccactccgtggcgatgctgatcctcataggctccctggagctctgatcctggaacccctccctctgcgccgcagctggacgccacctccgacggacacagccagccccttcctgctgccaaggtggcctgacactgtgccagagagtggctggttttaaatacctactttaaacagtgccctttttgtaggaggtaggatattttatattctgccgcaggatagaacccacgcaaggattttctttaaattgagaggcaccaggcagtaacttccatgatgacactgacgcctatacctgagctctaggctgcctggagggaaggaacaggcccatgggaagaagggggttttaaaaacatgtcttcaactcagcagagatggccctctgggaccctatacggactccgccacttgagagcagtcctaggcccggcaggaacaccagacatgaacaggttgaagaactggagcgaagtgcacacctcaccatccttcagtctaaggaagaagggcaagccctgggaccaagagctctcccgccttctccctcgagcagcagcaaggaccctgacgctgtccccgataactccctaggggctcctgcctgcccaagcggctgagaaccagcgccccgatgcctgaggctgggagcctgagccccttcagctttgaggggggtgatactccaggctgtttggggtgggagccaaaaagagttgagaggccagggcccttggtggaaaggggcaccagccttggtctgagatagtcacaacccaggtgacgatgccctctcagccaacactgccaacctgaccctgtcatcccgattgacagcgccacttcaggtggctgggtgactaaagggcttgtcttggtggggtctcccacccctccaagacccattctgcacagtccctccagggtttgggcaggagatggccaatcatgcgcccacctctccagtgctgcctgcagtcagctcggcctccccgacctgcagccccagactctgctctcccagcactgactcactcctgcctgggaggggaatgcagcattcatgctgtgtgtcctggtattgggaggtttctgggaagggcag

SEQ ID NO: 4438 - DNA, 2903 bp, Homo sapiens
  source 1..2903: mol_type = unassigned DNA
tgtaccagctcaagcctggctgggaggaggttggctcaaattggaagctgcccaattctgacccactgtgctctgacctcttggtgcaggtccgccaggtcccccaggaggtgtggtggtgagggacattggcgacaccaccatccagctcagctggagccgtggcttcgacaaccacagccccatcgctaagtacaccctgcaagctcgcactccacctgcagggaagtggaagcaggttcggaccaatcctgcaaacatcgagggcaatgccgagactgcacaggtgctgggcctcaccccctggatggactatgagttccgggtcatagccagcaacattctgggcactggggagcctagtgggccctccagcaaaatccggaccagggaagcagccccctcggtggcaccctcaggactcagcggaggaggtggagcccccggagagctcatcgtcaactggacgcccatgtcacgggagtaccagaacggagacggcttcggctacctgctgtccttccgcaggcagggcagcactcactggcagaccgcccgggtgcctggcgccgatgcccagtactttgtctacagcaacgagagcgtccggccctacacgccctttgaggtcaagatccgcagctacaaccgccgcggggatgggcccgagagcctcactgcactcgtgtactcagctgaggaagagcccagggtggcccctaccaaggtgtgggccaaaggggtctcatcctcagagatgaacgtgacctgggaacccgtgcagcaggacatgaatggtatcctcctggggtatgagatccgctactggaaagctggggacaaagaagcagctgcggaccgagtgaggacagcagggctggacaccagtgcccgagtcagcggcctgcatcccaacaccaagtaccatgtgaccgtgagggcctacaaccgggctggcactgggcctgccagcccttctgccaacgccacgaccatgaagccccctccgcggcgacctcctggcaacatctcctggactttctcaagctctagtcttagcattaagtgggaccctgtggtccctttccgaaatgagtctgcagtcaccggctataagatgctgtaccagaatgacttacacctgactcccacgctccacctcaccggcaagaactggatagaaatcccagtgcctgaagacattggccatgccctggtacaaattcggaccacagggcccggaggggatgggatccctgcagaagtccacatcgtgaggaatggaggtgctgctcctcccctacccttatcccctcgagagattcaggatccacccagatacctgagaggatcattcccacccaggccaactccaatctctacccgcaaaggaaagtggaaggcaggcaggaaccaagtgcaaagtagtcttagaactgcctcgccgccacctttctacccagcccccagaacatccccgagggccagggaagggcgcagggtgcagggggaggctgaggaccaaccagcaatagcaaacggcctacaaagcaccgtaggagtcggactgagaagaccacccagccgtccgctcccaggcctgcagctggccctgcacaagcatgatggtggagaacatggcagtccgcccagcaccacaccctggcaccgtcatttcccactccgtggcgatgctgatcctcataggctccctggagctctgatcctggaacccctccctctgcgccgcagctggacgccacctccgacggacacagccagccccttcctgctgccaaggtggcctgacactgtgccagagagtggctggttttaaatacctactttaaacagtgccctttttgtaggaggtaggatattttatattctgccgcaggatagaacccacgcaaggattttctttaaattgagaggcaccaggcagtaacttccatgatgacactgacgcctatacctgagctctaggctgcctggagggaaggaacaggcccatgggaagaagggggttttaaaaacatgtcttcaactcagcagagatggccctctgggaccctatacggactccgccacttgagagcagtcctaggcccggcaggaacaccagacatgaacaggttgaagaactggagcgaagtgcacacctcaccatccttcagtctaaggaagaagggcaagccctgggaccaagagctctcccgccttctccctcgagcagcagcaaggaccctgacgctgtccccgataactccctaggggctcctgcctgcccaagcggctgagaaccagcgccccgatgcctgaggctgggagcctgagccccttcagctttgaggggggtgatactccaggctgtttggggtgggagccaaaaagagttgagaggccagggcccttggtggaaaggggcaccagccttggtctgagatagtcacaacccaggtgacgatgccctctcagccaacactgccaacctgaccctgtcatcccgattgacagcgccacttcaggtggctgggtgactaaagggcttgtcttggtggggtctcccacccctccaagacccattctgcacagtccctccagggtttgggcaggagatggccaatcatgcgcccacctctccagtgctgcctgcagtcagctcggcctccccgacctgcagccccagactctgctctcccagcactgactcactcctgcctgggaggggaatgcagcattcatgctgtgtgtcctggtattgggaggtttctgggaagggcagaggataaatgtggccctgcctgctcccaggtatacctaggaccacctggccagatccgctcccagacggccttggactgcttgcatttccccggagaaaaaggggttaataaatgggc

SEQ ID NO: 4439 - DNA, 2981 bp, Homo sapiens
  source 1..2981: mol_type = unassigned DNA
ggtggtgagggacattggcgacaccaccatccagctcagctggagccgtggcttcgacaaccacagccccatcgctaagtacaccctgcaagctcgcactccacctgcagggaagtggaagcaggttcggaccaatcctgcaaacatcgagggcaatgccgagactgcacaggtgctgggcctcaccccctggatggactatgagttccgggtcatagccagcaacattctgggcactggggagcctagtgggccctccagcaaaatccggaccagggaagcagccccctcggtggcaccctcaggactcagcggaggaggtggagcccccggagagctcatcgtcaactggacgcccatgtcacgggagtaccagaacggagacggcttcggctacctgctgtccttccgcaggcagggcagcactcactggcagaccgcccgggtgcctggcgccgatgcccagtactttgtctacagcaacgagagcgtccggccctacacgccctttgaggtcaagatccgcagctacaaccgccgcggggatgggcccgagagcctcactgcactcgtgtactcagctgaggaagagcccagggtggcccctaccaaggtgtgggccaaaggggtctcatcctcagagatgaacgtgacctgggaacccgtgcagcaggacatgaatggtatcctcctggggtatgagatccgctactggaaagctggggacaaagaagcagctgcggaccgagtgaggacagcagggctggacaccagtgcccgagtcagcggcctgcatcccaacaccaagtaccatgtgaccgtgagggcctacaaccgggctggcactgggcctgccagcccttctgccaacgccacgaccatgaagccccctccgcggcgacctcctggcaacatctcctggactttctcaagctctagtcttagcattaagtgggaccctgtggtccctttccgaaatgagtctgcagtcaccggctataaggtgaggaagcaatcagctaggcccagaatgggaaggaacagctcctctgtgtttccagtgaacataagcagcagcaatttatagcaagaggcatctgagtgagacataagcaaagggtttgtgactgtgagaggaatgaaattcatgaactattctctcagtaacttgcagtagaaactataaaaacgggcagatggtatcactgcagaaaggcagagttcacaggggcagtgatggactatggggatggagtatgggggttcttctagcttaaggagtctacggaaacagttcagtggcctgcaagctttcctccaccaatgaggagctttgtcaatggggaggaggggtgaggaggctggacctcaagagcccagaaccatcgggtctcctcccagtacctaaagctggggatgactcaacgatcagccctggtgtcaggaaactccacctggaaacctccttcccacagatgctgtaccagaatgacttacacctgactcccacgctccacctcaccggcaagaactggatagaaatcccagtgcctgaagacattggccatgccctggtacaaattcggaccacagggcccggaggggatgggatccctgcagaagtccacatcgtgaggaatggaggcacaagcatgatggtggagaacatggcagtccgcccagcaccacaccctggcaccgtcatttcccactccgtggcgatgctgatcctcataggctccctggagctctgatcctggaacccctccctctgcgccgcagctggacgccacctccgacggacacagccagccccttcctgctgccaaggtggcctgacactgtgccagagagtggctggttttaaatacctactttaaacagtgccctttttgtaggagagatggccctctgggaccctatacggactccgccacttgagagcagtcctaggcccggcaggaacaccagacatgaacaggttgaagaactggagcgaagtgcacacctcaccatccttcagtctaaggaagaagggcaagccctgggaccaagagctctcccgccttctccctcgagcagcagcaaggaccctgacgctgtccccgataactccctaggggctcctgcctgcccaagcggctgagaaccagcgccccgatgcctgaggctgggagcctgagccccttcagctttgaggggggtgatactccaggctgtttggggtgggagccaaaaagagttgagaggccagggcccttggtggaaaggggcaccagccttggtctgagatagtcacaacccaggtgacgatgccctctcagccaacactgccaacctgaccctgtcatcccgattgacagcgccacttcaggtggctgggtgactaaagggcttgtcttggtggggtctcccacccctccaagacccattctgcacagtccctccagggtttgggcaggagatggccaatcatgcgcccacctctccagtgctgcctgcagtcagctcggcctccccgacctgcagccccagactctgctctcccagcactgactcactcctgcctgggaggggaatgcagcattcatgctgtgtgtcctggtattgggaggtttctgggaagggcagaggataaatgtggccctgcctgctcccaggtatacctaggaccacctggccagatccgctcccagacggccttggactgcttgcatttccccggagaaaaaggggttaataaatgggccatcctttcctgagctctgggtatactaccagtcacagaacgtcagagctggaagaagccttagagctcaacttcttcaagcccctcactttacagatgaggaaatggaggtggtccagagagggtctgggattcccaaggtcacacagcccagaagagatggggctgggttaagaactcgagtcttccacctttctgttcaaggctgtttgtctacccagaggaaggaggc

SEQ ID NO: 4440 - DNA, 1048 bp, Homo sapiens
  source 1..1048: mol_type = unassigned DNA
caagctcgcactccacctgcagggaagtggaagcaggttcggaccaatcctgcaaacatcgagggcaatgccgagactgcacaggtgctgggcctcaccccctggatggactatgagttccgggtcatagccagcaacattctgggcactggggagcctagtgggccctccagcaaaatccggaccagggaagcagccccctcggtggcaccctcaggactcagcggaggaggtggagcccccggagagctcatcgtcaactggacggcagggcagcactcactggcagaccgcccgggtgcctggcgccgatgcccagtactttgtctacagcaacgagagcgtccggccctacacgccctttgaggtcaagatccgcagctacaaccgccgcggggatgggcccgagagcctcactgcactcgtgtactcagctgaggaaggtgggctgcccctgggccccctgctcgtccctaccccagccacttgtccacagggatgtggggtgggggaacgctactcatctcccagctcagttccataggaggaggttgagaggacacctgggttccacatcattggcctcacttccagctcttgctaccttgtctcccttcggggttaggaaaagggaggctctctgggaatagaagtgggccctggagcattgcttggggggctcccactcggccttcatcctgaaggctttcctccaaaatcttaagcaaaggcaatcctggttgggggctgctctgcaggacacaggggggccctgggaatccaaacccattctgtattggtccccagagcccagggtggcccctaccaaggtgtgggccaaaggggtctcatcctcagagatgaacgtgacctgggaacccgtgcagcaggacatgaatggtatcctcctggggtatgaggtgagcaccaacctgggacttgggagaggaaggggtgctggggcttcaaagccaggtgggaacaactcacagaccactaatcattcctcctggcgtccctggttcgctgacatggcaaactgagcatc

SEQ ID NO: 4441 - DNA, 2798 bp, Homo sapiens
  source 1..2798: mol_type = unassigned DNA
ggagcagatggaattgaataacctgcccacaaccctcagcaaaaagcgtgtgggtgtcagaacttgagtggagaaggagggggagaaaagaacccaggagagagtaggggaggcacaggctccagtcagcatctgctgagaggctcctgcccatctccgagccattcgcaggggaaggcctggaatgagagcccggggatcctgggaccaggagcatagattaaggaccctgcctcacctcctctacagacctgttgcactggatgtgtagtgagggtccaccttcttgtctgcctgaaacatgttctcctacatgccccagactgactctccaggccctttttctagaatcactcaacatttttagctggtacctctcctgagtaagaaattccagaggcagcactttctttgattgatcctgaacttcttggagggtcaaatgtggagaaatgaggggactcctttattctatttacagcatcccagtagctgaggagcacaaagacagctgtgatgcaaaggaaacatgatgggctttaaaatgagaagggctgagttcagattctacctgtgccatgtattaactgtgtgaccttaggcaagttgattaactgctctgggcctcagtctttccaccctgaaaagggcaataataacacccacctcacaggatcaaatggccaatgtgtttaagtacctcttgcaaattacacggtcctaaactattgtcatcagaagcaagtgaaaaatctccagctgctggattctctacggaaatattttgacccccagccaagttactttctgccaagctgcaggagctgatgaaataaattcctgttttaatatcagccttgtttaatactagagacaattaggagattaaatctgcaacaaaaagaaaaatagataatatatcaccctggagcccaaaagtagtttgttttgtttgtttgtttgtttgtttgtttgtttgtttgtttgcattaactgcagttctgggttatttattccccttattttaaagcgagtgagagttggtctctgtgatttagtttaagttgatggagtaaggaggacaatgatcatgtgtgcatcatctgctctatactaaccaccgtcttgtctaatttcattctcattatggcctctgagagaaacatgattatcttcatggagaagagaatcagaggctcagaaaggttaagtgacttgcccagggaagcacagctagtaaatggcagaggtgggatttgatttcaggactgcctgactccaaagcctatgttcagagggaccactggggggcaaacccagggcccagttgaaggggttcccatcttacggtgctctacaggcacaggctcagggctttcattttttccttgctcattaacaagccatatcggtgtcccttggcccttgacagccccctcggtggcaccctcaggactcagcggaggaggtggagcccccggagagctcatcgtcaactggacggtaagctgcaagggtcagatgtcctcctcctcctccctgacccctctcccgcttgagcagctgcagaaaggaccactgcacagctctgactcaaacgcggataacttcctgtcccccttccacgcacccgctgccccttacgcgaatccacgctgcaggcgtaggcgtccagggccgctactcttggcaaaggttgggtggggccagggaacgggcagggacacatgccgcggaccctcgcccatgccatgctcttgcccctcagcccatgtcacgggagtaccagaacggagacggcttcggctacctgctgtccttccgcaggcagggcagcactcactggcagaccgcccgggtgcctggcgccgatgcccagtactttgtctacagcaacgagagcgtccggccctacacgccctttgaggtcaagatccgcagctacaaccgccgcggggatgggcccgagagcctcactgcactcgtgtactcagctgaggaaggtgggctgcccctgggccccctgctcgtccctaccccagccacttgtccacagggatgtggggtgggggaacgctactcatctcccagctcagttccataggaggaggttgagaggacacctgggttccacatcattggcctcacttccagctcttgctaccttgtctcccttcggggttaggaaaagggaggctctctgggaatagaagtgggccctggagcattgcttggggggctcccactcggccttcatcctgaaggctttcctccaaaatcttaagcaaaggcaatcctggttgggggctgctctgcaggacacaggggggccctgggaatccaaacccattctgtattggtccccagagcccagggtggcccctaccaaggtgtgggccaaaggggtctcatcctcagagatgaacgtgacctgggaacccgtgcagcaggacatgaatggtatcctcctggggtatgaggtgagcaccaacctgggacttgggagaggaaggggtgctggggcttcaaagccaggtgggaacaactcacagaccactaatcattcctcctggcgtccctggttcgctgacatggcaaactgagcatccagtctgtgtagcactgtgaatgcaaatttcactaagaccccatggcaggccaggcgcggtggctcatgcctgtaatcccatcactttgggaggctgaggcggtagatctcctgagatcaggagtttgagaccagcctggccaacatggtgaagccccgcctctactaaaaatacaaaaattagctgggc

SEQ ID NO: 4442 - DNA, 2610 bp, Homo sapiens
  source 1..2610: mol_type = unassigned DNA
aaccgccgcggggatgggcccgagagcctcactgcactcgtgtactcagctgaggaagagcccagggtggcccctaccaaggtgtgggccaaaggggtctcatcctcagagatgaacgtgacctgggaacccgtgcagcaggacatgaatggtatcctcctggggtatgagatccgctactggaaagctggggacaaagaagcagctgcggaccgagtgaggacagcagggctggacaccagtgcccgagtcagcggcctgcatcccaacaccaagtaccatgtgaccgtgagggcctacaaccgggctggcactgggcctgccagcccttctgccaacgccacgaccatgaagccccgtgagtctgtctgcctggggtgggggtagggcaatattttggagggtgggtgcctctgagatcattccttccccaatgataagacaaatgctctagcccaccagctctgggctgaacagaaattaggcagcgagcctaatggaaataagggaatggaattcatggcccctgaagcgtctcacacttctccaacctttggattttcatgggctttgtttcgtgggcatgacagaatgtgctgggtgtaactgctagaggcaaacatccagagaagggctggttaaaggtgagggggtgcggggtgccagggaaacgtttggacatctctccaattcttcctctctggcagctccgcggcgacctcctggcaacatctcctggactttctcaagctctagtcttagcattaagtgggaccctgtggtccctttccgaaatgagtctgcagtcaccggctataaggtgaggaagcaatcagctaggcccagaatgggaaggaacagctcctctgtgtttccagtgaacataagcagcagcaatttatagcaagaggcatctgagtgagacataagcaaagggtttgtgactgtgagaggaatgaaattcatgaactattctctcagtaacttgcagtagaaactataaaaacgggcagatggtatcactgcagaaaggcagagttcacaggggcagtgatggactatggggatggagtatgggggttcttctagcttaaggagtctacggaaacagttcagtggcctgcaagctttcctccaccaatgaggagctttgtcaatggggaggaggggtgaggaggctggacctcaagagcccagaaccatcgggtctcctcccagtacctaaagctggggatgactcaacgatcagccctggtgtcaggaaactccacctggaaacctccttcccacagatgctgtaccagaatgacttacacctgactcccacgctccacctcaccggcaagaactggatagaaatcccagtgcctgaagacattggccatgccctggtacaaattcggaccacagggcccggaggggatgggatccctgcagaagtccacatcgtgaggaatggaggcacaagcatgatggtggagaacatggcagtccgcccagcaccacaccctggcaccgtcatttcccactccgtggcgatgctgatcctcataggctccctggagctctgatcctggaacccctccctctgcgccgcagctggacgccacctccgacggacacagccagccccttcctgctgccaaggtggcctgacactgtgccagagagtggctggttttaaatacctactttaaacagtgccctttttgtaggaggtaggatattttatattctgccgcaggatagaacccacgcaaggattttctttaaattgagaggcaccaggcagtaacttccatgatgacactgacgcctatacctgagctctaggctgcctggagggaaggaacaggcccatgggaagaagggggttttaaaaacatgtcttcaactcagcagagatggccctctgggaccctatacggactccgccacttgagagcagtcctaggcccggcaggaacaccagacatgaacaggttgaagaactggagcgaagtgcacacctcaccatccttcagtctaaggaagaagggcaagccctgggaccaagagctctcccgccttctccctcgagcagcagcaaggaccctgacgctgtccccgataactccctaggggctcctgcctgcccaagcggctgagaaccagcgccccgatgcctgaggctgggagcctgagccccttcagctttgaggggggtgatactccaggctgtttggggtgggagccaaaaagagttgagaggccagggcccttggtggaaaggggcaccagccttggtctgagatagtcacaacccaggtgacgatgccctctcagccaacactgccaacctgaccctgtcatcccgattgacagcgccacttcaggtggctgggtgactaaagggcttgtcttggtggggtctcccacccctccaagacccattctgcacagtccctccagggtttgggcaggagatggccaatcatgcgcccacctctccagtgctgcctgcagtcagctcggcctccccgacctgcagccccagactctgctctcccagcactgactcactcctgcctgggaggggaatgcagcattcatgctgtgtgtcctggtatt

SEQ ID NO: 4443 - DNA, 633 bp, Homo sapiens
  source 1..633: mol_type = unassigned DNA
cagtacctaaagctggggatgactcaacgatcagccctggtgtcaggaaactccacctggaaacctccttcccacagatgctgtaccagaatgacttacacctgactcccacgctccacctcaccggcaagaactggatagaaatcccagtgcctgaagacattggccatgccctggtacaaattcggaccacagggcccggaggggatgggatccctgcagaagtccacatcgtgaggaatggaggcacaagcatgatggtggagaacatggcagtccgcccagcaccacaccctggcaccgtcatttcccactccgtggcgatgctgatcctcataggctccctggagctctgatcctggaacccctccctctgcgccgcagctggacgccacctccgacggacacagccagccccttcctgctgccaaggtggcctgacactgtgccagagagtggctggttttaaatacctactttaaacagtgccctttttgtaggaggtaggatattttatattctgccgcaggatagaacccacgcaaggattttctttaaattgagaggcaccaggcagtaacttccatgatgacactgacgcctatacctgagctctaggctgcctggagggaa

SEQ ID NO: 4444 - DNA, 4948 bp, Homo sapiens
  source 1..4948: mol_type = unassigned DNA
gagttactcttgcatttggcaattaaagatgatgtttccatggaaacagttgatcctgctttcattcattggctgcttaggaggtgagcttctcttacaaggccctgtatttatcaaagaacccagcaacagcattttccctgttggttcagaagataaaaaaataactttgcattgtgaagcaagaggcaatccatcacctcattacagatggcagctgaatggaagtgatattgatatgagtatggaacatcgttataagttgaatggaggaaatcttgtggttattaatcccaacagaaattgggatacaggaacttaccaatgttttgcaacaaattcacttggaacaattgtcagcagagaagccaaacttcagtttgcctatcttgaaaattttaaaaccaaaatgaggagtacagtgtctgtgcgtgaaggccagggagttgtgctgctctgcggccccccaccacactctggagaactgtcatatgcttggatcttcaatgaatacccatcgtttgttgaagaagatagtcggagatttgtctcccaggagacagggcacctctacatatctaaggtggagccgtctgatgtgggaaattacacatgtgtggtgacaagtatggtgacaaatgcccgagtgctgggctctccaactcctttggtgctacgttctgatggtgtgatgggtgaatatgaacctaaaatagaagttcagtttccagaaactcttccagcagctaaaggttcgactgtgaaattggaatgttttgcccttggaaatcccatacctcagattaattggagaagaagtgatgggctgccattttccagcaaaattaaattaaggaagttcagtggtgtgcttgaaatccccaacttccaacaggaagatgcaggttcctatgaatgcattgctgagaattcacgaggaaaaaatgttgccagagggcgtctcacttactatgcaaagccccattgggttcaactcataaaggatgtggaaatagccgtggaggacagtctttattgggaatgcagggcaagcggcaagcccaagccttcctaccgatggctgaaaaatggagcagccctggtgctagaggagagaacacagatagaaaatggtgcccttacaatatcaaacctaagtgtgactgattctggcatgttccaatgcatagcagaaaacaaacatggccttgtttattccagtgctgagctcaaagttgttgcttctgctccagatttttcaaagaatccaatgaagaagttggttcaggtgcaggtgggcagcctggtcagcttggattgtaaacccagagcctccccaagggcactctcttcctggaagaagggggatgtgagcgtgcaggagcatgaaagaatttctttgttaaacgatggaggactcaaaatagccaatgtgactaaagctgatgctggaacttacacctgcatggcagaaaaccagtttgggaaagcaaatggcacaacacatttggttgttacggaaccaacaagaataactttggcaccatctaacatggatgtttctgttggtgaaagcgtcatattgccctgccaggtacaacatgacccgctgttagacatcatctttacctggtatttcaatggggcccttgcagattttaagaaagatggatctcactttgagaaagttggtgggagttcatctggtgatttaatgatcagaaacattcagctgaaacacagtgggaaatatgtttgtatggtgcaaacgggggtggacagtgtttcatctgctgctgacctcatagtaagaggttcacctggaccaccagaaaatgtgaaggtagatgaaattacagacacaacagcccaactctcttggaaagaaggtaaagacaaccatagcccagttatatcctattctatccaggctcggacacctttctccgtgggttggcaaaccgtcacaacagtgcctgaggtcatcgatgggaagacgcacacagccactgtagttgagttaaacccatgggtggaatatgaatttcgggttgtagccagtaacaaaattggaggtggagaaccaagtttaccctcagaaaaagtaagaactgaagaggcagttccagaagtgcctccttctgaagtcaatggaggaggcggaagccggtctgaacttgtgataacctgggatccagtccctgaagaactacagaatggtgaaggttttgggtatgttgttgctttccgccctcttggggttaccacctggatccagacagtggtgacatcccctgacaccccaagatatgtctttaggaatgaaagcatcgtgccatattcaccatatgaagttaaagtgggtgtttataataacaaaggtgaaggaccatttagcccagtgacaacagtgttctctgcagaagaagagcctacagtggccccatctcaagtctctgcaaatagcctatcttcctcagaaattgaggtttcatggaacaccattccttggaagttgagcaatggacatttactgggctatgaggtgcggtactggaatgggggtggaaaggaggaatcatccagtaagatgaaagtggcaggaaatgagacatcagccagactacggggcctgaagagcaacctggcctattacacggctgtccgggcttacaacagtgccggcgctgggccttttagcgccacagttaatgtaaccaccaagaaaacgcctcccagtcagccaccaggaaatgttgtttggaatgccacagacactaaagtgttacttaattgggagcaagttaaagccatggagaatgagtcagaagtaacaggatataaagttttctataggactagcagtcaaaataacgtacaagtactgaacacaaataaaacttcagctgaacttgtgctgcccattaaagaggactacattattgaagtcaaggccacaacagatggaggggatgggaccagtagtgaacagatcaggattccacgaataaccagtatggatgcaagaggatccacttcagccatctcgaatgtccaccctatgtcaagttatatgcctatagtactgttcttaattgtatatgtcctgtggtgatattaactcctttttattatttattggaaagttatttggttaccaaaaaaagtgctttcatgaaatgcagtgattatgcatgtttttttcaactcttatttttaactttctacttcattataggtaaatatgaatataattaaaaaaacagtaaatccttttaggggaatctgaaatgccttaatattaacttgataaaccaaaggaatttacatattacatacttcagacttttgatataaatgttcttaaactatgagtttaagcactgcctatggataaagactcacacactctcacatgtacacacacacgcatgagaatttctttttacattgaaaaactctttcatttaattcaaatgctattttcccattataatagcattatttggaagacttaaccagtatcaatttgaaatgctgatttaagtccccaaggatgaaaaatacattttaaaaattattttgttggagaggagtggcatgtgattcaaaagagcattgttggaaaatgctactgtggggcttagaagaatgatgtttggtttggtatgctgctaactagttgtaagactttacaaatcactttgccatctgtacctctcaattattcctctataaaatatggagataataatacctatctgatcagactttgccccatgaattagtttttaaaagataaagactgaagtatgaaagtgcttttgtcaccccaaatgcaattgacccatgcaaaatattagcatgaatttatttaatcacataaaagtcatgaagaccagccagattttcaagcttcattctgtttcattcagttatattccaaaattcaaatgatcacattttattctttctcaaaaaaaaaaagtttttttaaattaaaaaaggaattgtttccttcacagctatgaataagctttcaggttttattaaaacctagaggaaaaaatcaggaatgacctgaatctcaacccaaatattaaacaaaatccacataatccctcatttcaatttccaattccattaagggaccctctctttttggatggcagagatggttttttaatgaaatcccaccatctatctgagtgagtctggcaggctttttagttcctgagttaaatttgtaatagaaccaaggcaatgctgctgactttgatatgtatgactcagtctttcaatatgtggttttcaaaaaattgttgaagacgtgacttcatagcaatatatagagaataaattaaaatcagcagattgagttttcaacattgcaaaatcagttttttacctctttcctaccaatttcacattttgcagaaacttgttcacatttccaacaatatcagaattagaaaacagttcagataacaagaaagattaaaaattagggaaattctgatatcaccataaagcactattttacatttagagattacatttaagataaagtcatcatacacaaaaacaataaatatttataactttctctataaggtccgcatatactgtatatattgaaacaatctgaatgactagtagatttcatatgaccattgttatttccactttctccaatacttgtattttatgctacatgtaatgaagttggacctttttattatttagtaattcctatatgttcctatacttttcattttcaagatgattgctctattgtttcatgttgtttctagcaatatatctccatgagatatgcactttgtttcatattgaaaagtataaaatttatctttcaattcctgtgtgtgtatcctatggttatctgtatgtattattttctattctaataaaatttataacaagcaaa

SEQ ID NO: 4445 - DNA, 560 bp, Homo sapiens
  source 1..560: mol_type = unassigned DNA
tatactctgttatttttttctgatttcatctattacaccaagcattaccaaaggcatcccgttctacttccactagcttcctatgatagccgccatctcctccgtgtaaaatatcacttgtacttcgatctgttttaaaatttctcattttgcatttcaagctcccagtcagccaccaggaaatgttgtttggaatgccacagacactaaagtgttacttaattgggagcaagttaaagccatggagaatgagtcagaagtaacaggatataaagttttctataggactagcagtcaaaataacgtacaagtactgaacacaaataaaacttcagctgaacttgtgctgcccattaaagaggactacattattgaagtcaaggccacaacagatggaggggatgggaccagtagtgaacagatcaggattccacgaataaccagtatggatgcaagaggatccacttcagccatctcgaatgtccaccctatgtcaagttatatgcctatagtactgttcttaattgtatatgtcctgtggtgatattaactccttttta

SEQ ID NO: 4446 - DNA, 658 bp, Homo sapiens
  source 1..658: mol_type = unassigned DNA
agccgccgcgagcgccgggagggagggcagcgccgcgccagacggagcccggggttcgacgccaggattggctgcaagtagggagctttcgccgccgccccgggcccctcggactgtgccggcgccgcacccgaggctctcgccagcccggcgccccggtgctgaggaatcattgacatagagtaactccacagcatgtgtcttcaagagcttccctaaaagattaaaggttatacaaaacttaaaagaagcagcaattctattcgcttgttattggacttgaaactccctttgacctcggaaactgaagatgaggttgccatgggaactgctggtactgcaatcattcattttgtgccttgcagatgattccacactgcatggcccgatttttattcaagaaccaagtcctgtaatgttccctttggattctgaggagaaaaaagtgaagctcaattgtgaagttaaaggaaatccaaaacctcatatcaggtggaagttaaatggaacagatgttgacactggtatggatttccgctacagtgttgttgaagggagcttgttgatcaataaccccaataaaacccaagatgctggaacgtaccagtgcacagcgacaaactcgtttggaacaattgttagcagagaagcaaagctt

SEQ ID NO: 4447 - DNA, 3057 bp, Homo sapiens
  source 1..3057: mol_type = unassigned DNA
gttcgacgccaggattggctgcaagtagggagctttcgccgccgccccgggcccctcggactgtgccggcgccgcacccgaggctctcgccagcccggcgccccggtgctgagccggaaaataagtttgttgcgctgcgaggcagccacaaaacaaggaaccgagagcccggaatgctgcgggaagccttcaagtcagctcctccgactggttcgggctactgccccctctccgtgcgccctggcctctggcgccgggttcccggcggggcttttcttctgacagcccagtcacagcccgcagcagagggacgcgaacctggggagtggagggacctgggactaaaggaacaggagcccgtagccgtggtggaaggagccgcgtggagacggaggctgatgtctgtggcgcccgctgggtgccgggctggctgctgagcgctgaggctgcggcggcgagcgacaggccaggtgcctgctcttagggaaggaatcattgacatagagtaactccacagcatgtgtcttcaagagcttccctaaaagattaaaggttatacaaaacttaaaagaagcagcaattctattcgcttgttattggacttgaaactccctttgacctcggaaactgaagatgaggttgccatgggaactgctggtactgcaatcattcattttgtgccttgcagatgattccacactgcatggcccgatttttattcaagaaccaagtcctgtaatgttccctttggattctgaggagaaaaaagtgaagctcaattgtgaagttaaaggaaatccaaaacctcatatcaggtggaagttaaatggaacagatgttgacactggtatggatttccgctacagtgttgttgaagggagcttgttgatcaataaccccaataaaacccaagatgctggaacgtaccagtgcacagcgacaaactcgtttggaacaattgttagcagagaagcaaagcttcagtttgcttatcttgacaactttaaaacaagaacaagaagcactgtgtctgtccgtcgaggtcaaggaatggtgctactgtgtggcccgccaccccattctggagagctgagttatgcctggatcttcaatgaatacccttcctatcaggataatcgccgctttgtttctcaagagactgggaatctgtatattgccaaagtagaaaaatcagatgttgggaattatacctgtgtggttaccaataccgtgacaaaccacaaggtcctggggccacctacaccactaatattgagaaatgatgtccagtaccaactattatctggcgaagagctgatggaaagccaatagcaaggaaagccagaagacacaagtcaaatggaattcttgagatccctaattttcagcaggaggatgctggtttatatgaatgtgtagctgaaaattccagagggaaaaatgtagcaaggggacagctaactttctatgctcaacctaattggattcaaaaaataaatgatattcacgtggccatggaagaaaatgtcttttgggaatgtaaagcaaatggaaggcctaagcctacatacaagtggctaaaaaatggcgaacctctgctaactcgggatagaattcaaattgagcaaggaacactcaacataacaatagtgaacctctcagatgctggcatgtatcagtgtttggcagagaataaacatggagttatcttttccaacgcagagcttagtgttatagctgtaggtccagatttttcaagaacactcttgaaaagagtaactcttgtcaaagtgggaggtgaagttgtcattgagtgtaagccaaaagcgtctccaaaacctgtttacacctggaagaaaggaagggatatattaaaagaaaatgaaagaattaccatttctgaagatggaaacctcagaatcatcaacgttactaaatcagacgctgggagttatacctgtatagccactaaccattttggaactgctagcagtactggaaacttggtagtgaaagatccaacaagggtaatggtacccccttccagtatggatgtcactgttggagagagtattgttttaccgtgccaggtaacgcatgatcactcgctagacatcgtgtttacttggtcatttaatggacacctgatagactttgacagagatggggaccactttgaaagagttggaggggattcagctggtgatttgatgatccgaaacatccaactgaagcatgctgggaaatatgtctgcatggtccaaacaagtgtggacaggctatctgctgctgcagacctgattgtaagaggtcctccaggtcccccagaggctgtgacaatagacgaaatcacagataccactgctcagctctcctggagacccgggcctgacaaccacagccccatcaccatgtatgtcattcaagccaggactccattctccgtgggctggcaagcagtcagtacagtcccagaactcattgatgggaagacattcacagcgaccgtggtgggtttgaacccttgggttgaatatgaattccgcacagttgcagccaacgtgattgggattggggagcccagccgcccctcagagaaacggagaacagaagaagctctccccgaagtcacaccagcgaatgtcagtggtggcggaggcagcaaatctgaactggttataacctgggagacggtccctgaggaattacagaatggtcgaggctttggttatgtggtggccttccggccctacggtaaaatgatctggatgctgacagtgctggcctcagctgatgcctctagatacgtgttcaggaatgagagcgtgcaccccttctctccctttgaggttaaagtaggtgtcttcaacaacaaaggagaaggccctttcagtcccaccacggtggtgtattctgcagaagaagaacccaccaaaccaccagccagtatctttgccagaagtctttctgccacagatattgaagttttctgggcctccccactggagaagaatagaggacgaatacaaggttatgaggttaaatattggagacatg

SEQ ID NO: 4448 - DNA, 566 bp, Homo sapiens
  source 1..566: mol_type = unassigned DNA
aagtagggagctttcgccgccgccccgggcccctcggactgtgccggcgccgcacccgaggctctcgccagcccggcgccccggtgctgagtgggtgaaaaagaacagtgtgtcatgaagacaggcacctggaggtgatttgggtggcattcatgagaaaattcacgttacccacttcgctaactgatgaaacactgccagagcccacttggactgtttcgcaactttacttaagggaataaaagctctcatgctgaggaatcattgacatagagtaactccacagcatgtgtcttcaagagcttccctaaaagattaaaggttatacaaaacttaaaagaagcagcaattctattcgcttgttattggacttgaaactccctttgacctcggaaactgaagatgaggttgccatgggaactgctggtactgcaatcattcattttgtgccttgcagatgattccacactgcatggcccgatttttattcaagaaccaagtcctgtaatgttccctttggattctgaggagaaaaaagtgaagctcaattgtgaagttaaaggaaa

SEQ ID NO: 4449 - DNA, 5093 bp, Homo sapiens
  source 1..5093: mol_type = unassigned DNA
ctgtgccggcgccgcacccgaggctctcgccagcccggcgccccggtgctgagtgggtgaaaaagaacagtgtgtcatgaagacaggcacctggaggtgatttgggtggcattcatgagaaaattcacgttacccgaatcattgacatagagtaactccacagcatgtgtcttcaagagcttccctaaaagattaaaggttatacaaaacttaaaagaagcagcaattctattcgcttgttattggacttgaaactccctttgacctcggaaactgaagatgaggttgccatgggaactgctggtactgcaatcattcattttgtgccttgcagatgattccacactgcatggcccgatttttattcaagaaccaagtcctgtaatgttccctttggattctgaggagaaaaaagtgaagctcaattgtgaagttaaaggaaatccaaaacctcatatcaggtggaagttaaatggaacagatgttgacactggtatggatttccgctacagtgttgttgaagggagcttgttgatcaataaccccaataaaacccaagatgctggaacgtaccagtgcacagcgacaaactcgtttggaacaattgttagcagagaagcaaagcttcagtttgcttatcttgacaactttaaaacaagaacaagaagcactgtgtctgtccgtcgaggtcaaggaatggtgctactgtgtggcccgccaccccattctggagagctgagttatgcctggatcttcaatgaatacccttcctatcaggataatcgccgctttgtttctcaagagactgggaatctgtatattgccaaagtagaaaaatcagatgttgggaattatacctgtgtggttaccaataccgtgacaaaccacaaggtcctggggccacctacaccactaatattgagaaatgatggagtgatgggtgaatatgagcccaaaatagaagtgcagttcccagaaacagttccgactgcaaaaggagcaacggtgaagctggaatgctttgctttaggaaatccagtaccaactattatctggcgaagagctgatggaaagccaatagcaaggaaagccagaagacacaagtcaaatggaattcttgagatccctaattttcagcaggaggatgctggtttatatgaatgtgtagctgaaaattccagagggaaaaatgtagcaaggggacagctaactttctatgctcaacctaattggattcaaaaaataaatgatattcacgtggccatggaagaaaatgtcttttgggaatgtaaagcaaatggaaggcctaagcctacatacaagtggctaaaaaatggcgaacctctgctaactcgggatagaattcaaattgagcaaggaacactcaacataacaatagtgaacctctcagatgctggcatgtatcagtgtttggcagagaataaacatggagttatcttttccaacgcagagcttagtgttatagctgtaggtccagatttttcaagaacactcttgaaaagagtaactcttgtcaaagtgggaggtgaagttgtcattgagtgtaagccaaaagcgtctccaaaacctgtttacacctggaagaaaggaagggatatattaaaagaaaatgaaagaattaccatttctgaagatggaaacctcagaatcatcaacgttactaaatcagacgctgggagttatacctgtatagccactaaccattttggaactgctagcagtactggaaacttggtagtgaaagatccaacaagggtaatggtacccccttccagtatggatgtcactgttggagagagtattgttttaccgtgccaggtaacgcatgatcactcgctagacatcgtgtttacttggtcatttaatggacacctgatagactttgacagagatggggaccactttgaaagagttggagggcaggattcagctggtgatttgatgatccgaaacatccaactgaagcatgctgggaaatatgtctgcatggtccaaacaagtgtggacaggctatctgctgctgcagacctgattgtaagaggtcctccaggtcccccagaggctgtgacaatagacgaaatcacagataccactgctcagctctcctggagacccgggcctgacaaccacagccccatcaccatgtatgtcattcaagccaggactccattctccgtgggctggcaagcagtcagtacagtcccagaactcattgatgggaagacattcacagcgaccgtggtgggtttgaacccttgggttgaatatgaattccgcacagttgcagccaacgtgattgggattggggagcccagccgcccctcagagaaacggagaacagaagaagctctccccgaagtcacaccagcgaatgtcagtggtggcggaggcagcaaatctgaactggttataacctgggagacggtccctgaggaattacagaatggtcgaggctttggttatgtggtggccttccggccctacggtaaaatgatctggatgctgacagtgctggcctcagctgatgcctctagatacgtgttcaggaatgagagcgtgcaccccttctctccctttgaggttaaagtaggtgtcttcaacaacaaaggagaaggccctttcagtcccaccacggtggtgtattctgcagaagaagaacccaccaaaccaccagccagtatctttgccagaagtctttctgccacagatattgaagttttctgggcctccccactggagaagaatagaggacgaatacaaggttatgaggttaaatattggagacatgaagacaaagaagaaaatgctagaaaaatacgaacagttggaaatcagacatcaacaaaaatcacgaacttaaaaggcagtgtgctgtatcacttagctgtcaaggcatataattctgctgggacaggcccctctagtgcaacagtcaatgtgacaacccgaaagccaccaccaagtcaaccccccggaaacatcatatggaattcatcagactccaaaattatcctgaattgggatcaagtgaaggccctggataatgagtcggaagtaaaaggatacaaagtcttgtacagatggaacagacaaagcagcacatctgtcattgaaacaaataaaacatcggtggagctttctttgcctttcgatgaagattatataatagaaattaagccattcagcgacggaggagatggcagcagcagtgaacaaattcgaattccaaagatatcaaatgcctacgcgagaggatctggggcttccacttcgaatgcatgtacgctgtcagccatcagtacaataatgatttccctcacagctaggtccagtttatgacaaaagttatctgaaggacttgctgtttataatataagcaacatttagctagttgttttgaagacacccagtactaagtaatattgttgttcaagtacatcttattactggaataaaaatgttttttgcttctttaggaatggcattatacagtacttcctcaaagcaaatctagctttgtctgaagtttctttggaaactctgcaatgcactgaagacatctgtaatatgatgttaccaaagcagtttacatatgtccttatatgcatattttttattatatatttagtgttttatagaattttttaaagttaacatataatgtagatattaattttttcctcggctgtaaaatgctatgggcaacacaatcatgcaattataatttgaaaatatttcctttaaagacagagtttgaaactcatcttggtaaataaattgcaaattactcgtacagttttacaaggatctcatggcagaacagcggaagacttggtccgtaactcaaggctgttgtatgcaaactactcttctagtggttaatgcacttgacatgtacagtatgtttcccatgccgttgtgattttgacatgtacagtatgttttcatgccgttgtgaattttgttgttcaacccaacttgagatggtttcaggaatggctgcaatctcaaaagctcaatgtactgcccaagaggcaccttgtgcaatattcccatccctgaatttagcattgtacaggaagattttcttttcactcaactgagttagcattgtctttgtggtagcattatcttagacattaaatttgaagtaacatatatcctgtagtaacatagacccaaagttactatagtcaaccaagtctttcaaaggataaaagatcattttattatctttaactgtatctattttgaatgtaaatttaaaaaaagtaattctctgtcaatggattcgtaatttctttacaaaatttcttatatataatatgtgtatctctgtaataatagagcccttcttttgaatcaaaattacatatggactttggaagattgctcctatttcaacaaatagttgctgcaagaatttttaatatgactctataaaagctctttagtacaattgtatggtttcttgatgattctgttttgcaataggtagcctagttgctttatatgctttaccttctaggtcttaaaatcacacattggaaaatgacaatatcaacaaaactgtattcttatgaaaagaactatttgttacaatgagaaaggttttgtgagtaaaccctactggacagtgacataaaaggcaatggaattttctataaacattttctcatgtaaacatgctgccaccttttcttctttctcagagaactcaaatttgctatagtttgtcatttttgcttacaaataatataacttttcaaccttctagttatatttatccaataaagtcataatcgggattccatttgtgtaaaaactagggtggtaaccggaaaaaaatattgtcagtatttcaagctgtgttcctttcttagtttgatatggttacttctatgttgaaataaaatttaaaatcacatgcaaaaaaaaaatcagcaaaataataaaatgaacgaaaaaaaatgacacccagggagttcccaaccccagtgtaaatgatatttaccagtgatctagcatatgtaatcttttttaaaggtattgttaataaatattctgtcatt

SEQ ID NO: 4450 - DNA, 551 bp, Homo sapiens
  source 1..551: mol_type = unassigned DNA
gtgccggcgccgcacccgaggctctcgccagcccggcgccccggtgctgagccggaaaataagtttgttgcgctgcgaggcagccacaaaacaaggaaccgagagcccggaatgctgcgggaagccttcaagtcagctcctccgactggttcgggctactgccccctctccgtgcgccctggcctctggcgccgggttcccggcggggcttttcttctgacagcccagtcacagcccgcagcagagggacgcgaacctggggagtggagggacctgggactaaaggaacaggagcccgtagccgtggtggaaggagccgcgtggagacggaggctgatgtctgtggcgcccgctgggtgccgggctggctgctgagcgctgaggctgcggcggcgagcgacaggccaggtgcctgctcttagggaaggtacctggcttccccagtctctgccgcgggagcctgttgggtggcattcgtttccagcaacttctggggggtttccagtttctttcgagaggcaagacaaccgccccgtcccctccccgggccc

SEQ ID NO: 4451 - DNA, 5198 bp, Homo sapiens
  source 1..5198: mol_type = unassigned DNA
gccattctcccgcctcagcctcccgagtagctgggactacaggcgccgccaccacgcctggctaatttttgtatttttagtagagacggggtttcaccgtgttagccaggatggtctcgatctcctgacctcgtgatccgcccgcctcggcctcccaaagtgctgggatgacaggcgtgagccaccgtgcccggcctggctctgtttttattagaaaaattctcaatcgtcgtcttttaagaatcattgacatagagtaactccacagcatgtgtcttcaagagcttccctaaaagattaaaggttatacaaaacttaaaagaagcagcaattctattcgcttgttattggacttgaaactccctttgacctcggaaactgaagatgaggttgccatgggaactgctggtactgcaatcattcattttgtgccttgcagatgattccacactgcatggcccgatttttattcaagaaccaagtcctgtaatgttccctttggattctgaggagaaaaaagtgaagctcaattgtgaagttaaaggaaatccaaaacctcatatcaggtggaagttaaatggaacagatgttgacactggtatggatttccgctacagtgttgttgaagggagcttgttgatcaataaccccaataaaacccaagatgctggaacgtaccagtgcacagcgacaaactcgtttggaacaattgttagcagagaagcaaagcttcagtttgcttatcttgacaactttaaaacaagaacaagaagcactgtgtctgtccgtcgaggtcaaggaatggtgctactgtgtggcccgccaccccattctggagagctgagttatgcctggatcttcaatgaatacccttcctatcaggataatcgccgctttgtttctcaagagactgggaatctgtatattgccaaagtagaaaaatcagatgttgggaattatacctgtgtggttaccaataccgtgacaaaccacaaggtcctggggccacctacaccactaatattgagaaatgatggagtgatgggtgaatatgagcccaaaatagaagtgcagttcccagaaacagttccgactgcaaaaggagcaacggtgaagctggaatgctttgctttaggaaatccagtaccaactattatctggcgaagagctgatggaaagccaatagcaaggaaagccagaagacacaagtcaaatggaattcttgagatccctaattttcagcaggaggatgctggtttatatgaatgtgtagctgaaaattccagagggaaaaatgtagcaaggggacagctaactttctatgctcaacctaattggattcaaaaaataaatgatattcacgtggccatggaagaaaatgtcttttgggaatgtaaagcaaatggaaggcctaagcctacatacaagtggctaaaaaatggcgaacctctgctaactcgggatagaattcaaattgagcaaggaacactcaacataacaatagtgaacctctcagatgctggcatgtatcagtgtttggcagagaataaacatggagttatcttttccaacgcagagcttagtgttatagctgtaggtccagatttttcaagaacactcttgaaaagagtaactcttgtcaaagtgggaggtgaagttgtcattgagtgtaagccaaaagcgtctccaaaacctgtttacacctggaagaaaggaagggatatattaaaagaaaatgaaagaattaccatttctgaagatggaaacctcagaatcatcaacgttactaaatcagacgctgggagttatacctgtatagccactaaccattttggaactgctagcagtactggaaacttggtagtgaaagatccaacaagggtaatggtacccccttccagtatggatgtcactgttggagagagtattgttttaccgtgccaggtaacgcatgatcactcgctagacatcgtgtttacttggtcatttaatggacacctgatagactttgacagagatggggaccactttgaaagagttggagggcaggattcagctggtgatttgatgatccgaaacatccaactgaagcatgctgggaaatatgtctgcatggtccaaacaagtgtggacaggctatctgctgctgcagacctgattgtaagaggtcctccaggtcccccagaggctgtgacaatagacgaaatcacagataccactgctcagctctcctggagacccgggcctgacaaccacagccccatcaccatgtatgtcattcaagccaggactccattctccgtgggctggcaagcagtcagtacagtcccagaactcattgatgggaagacattcacagcgaccgtggtgggtttgaacccttgggttgaatatgaattccgcacagttgcagccaacgtgattgggattggggagcccagccgcccctcagagaaacggagaacagaagaagctctccccgaagtcacaccagcgaatgtcagtggtggcggaggcagcaaatctgaactggttataacctgggagacggtccctgaggaattacagaatggtcgaggctttggttatgtggtggccttccggccctacggtaaaatgatctggatgctgacagtgctggcctcagctgatgcctctagatacgtgttcaggaatgagagcgtgcaccccttctctccctttgaggttaaagtaggtgtcttcaacaacaaaggagaaggccctttcagtcccaccacggtggtgtattctgcagaagaagaacccaccaaaccaccagccagtatctttgccagaagtctttctgccacagatattgaagttttctgggcctccccactggagaagaatagaggacgaatacaaggttatgaggttaaatattggagacatgaagacaaagaagaaaatgctagaaaaatacgaacagttggaaatcagacatcaacaaaaatcacgaacttaaaaggcagtgtgctgtatcacttagctgtcaaggcatataattctgctgggacaggcccctctagtgcaacagtcaatgtgacaacccgaaagccaccaccaagtcaaccccccggaaacatcatatggaattcatcagactccaaaattatcctgaattgggatcaagtgaaggccctggataatgagtcggaagtaaaaggatacaaagtcttgtacagatggaacagacaaagcagcacatctgtcattgaaacaaataaaacatcggtggagctttctttgcctttcgatgaagattatataatagaaattaagccattcagcgacggaggagatggcagcagcagtgaacaaattcgaattccaaagatatcaaatgcctacgcgagaggatctggggcttccacttcgaatgcatgtacgctgtcagccatcagtacaataatgatttccctcacagctaggtccagtttatgacaaaagttatctgaaggacttgctgtttataatataagcaacatttagctagttgttttgaagacacccagtactaagtaatattgttgttcaagtacatcttattactggaataaaaatgttttttgcttctttaggaatggcattatacagtacttcctcaaagcaaatctagctttgtctgaagtttctttggaaactctgcaatgcactgaagacatctgtaatatgatgttaccaaagcagtttacatatgtccttatatgcatattttttattatatatttagtgttttatagaattttttaaagttaacatataatgtagatattaattttttcctcggctgtaaaatgctatgggcaacacaatcatgcaattataatttgaaaatatttcctttaaagacagagtttgaaactcatcttggtaaataaattgcaaattactcgtacagttttacaaggatctcatggcagaacagcggaagacttggtccgtaactcaaggctgttgtatgcaaactactcttctagtggttaatgcacttgacatgtacagtatgtttcccatgccgttgtgattttgacatgtacagtatgttttcatgccgttgtgaattttgttgttcaacccaacttgagatggtttcaggaatggctgcaatctcaaaagctcaatgtactgcccaagaggcaccttgtgcaatattcccatccctgaatttagcattgtacaggaagattttcttttcactcaactgagttagcattgtctttgtggtagcattatcttagacattaaatttgaagtaacatatatcctgtagtaacatagacccaaagttactatagtcaaccaagtctttcaaaggataaaagatcattttattatctttaactgtatctattttgaatgtaaatttaaaaaaagtaattctctgtcaatggattcgtaatttctttacaaaatttcttatatataatatgtgtatctctgtaataatagagcccttcttttgaatcaaaattacatatggactttggaagattgctcctatttcaacaaatagttgctgcaagaatttttaatatgactctataaaagctctttagtacaattgtatggtttcttgatgattctgttttgcaataggtagcctagttgctttatatgctttaccttctaggtcttaaaatcacacattggaaaatgacaatatcaacaaaactgtattcttatgaaaagaactatttgttacaatgagaaaggttttgtgagtaaaccctactggacagtgacataaaaggcaatggaattttctataaacattttctcatgtaaacatgctgccaccttttcttctttctcagagaactcaaatttgctatagtttgtcatttttgcttacaaataatataacttttcaaccttctagttatatttatccaataaagtcataatcgggattccatttgtgtaaaaactagggtggtaaccggaaaaaaatattgtcagtatttcaagctgtgttcctttcttagtttgatatggttacttctatgttgaaataaaatttaaaatcacatgcaaaaaaaaaatcagcaaaataataaaatgaacgaaaaaaaatgacacccagggagttcccaaccccagtgtaaatgatatttaccagtgatctagcatatgtaatcttttttaaaggtattgttaataaatattctgtcatt

SEQ ID NO: 4452 - DNA, 2463 bp, Homo sapiens
  source 1..2463: mol_type = unassigned DNA
ggttcgatgcgaggagagccagttagagatgtgtgtgattctcccagtgtgcgtctttgattcgtgtgctaattatgtcgatcctttggggaacacagccaggaagctgggtcctccttgatgaatgctggcggagagccatgcagcgcgcagcggagagcagttcagcatctctagtcccagctgagaatatggtcccattatctcccagctgcctaagcaatccataagggcctgttctgcgtggatgatcagtgtagtggaagcagggacttgctgagagctgaaatctctgtttgatttgctgtaacatgtaaagcgaaactgggacattttactttacagtctattaaaggttatacaaaacttaaaagaagcagcaattctattcgcttgttattggacttgaaactccctttgacctcggaaactgaagatgaggttgccatgggaactgctggtactgcaatcattcattttgtgccttgcagatgattccacactgcatggcccgatttttattcaagaaccaagtcctgtaatgttccctttggattctgaggagaaaaaagtgaagctcaattgtgaagttaaaggaaatccaaaacctcatatcaggtggaagttaaatggaacagatgttgacactggtatggatttccgctacagtgttgttgaagggagcttgttgatcaataaccccaataaaacccaagatgctggaacgtaccagtgcacagcgacaaactcgtttggaacaattgttagcagagaagcaaagcttcagtttgcttatcttgacaactttaaaacaagaacaagaagcactgtgtctgtccgtcgaggtcaaggaatggtgctactgtgtggcccgccaccccattctggagagctgagttatgcctggatcttcaatgaatacccttcctatcaggataatcgccgctttgtttctcaagagactgggaatctgtatattgccaaagtagaaaaatcagatgttgggaattatacctgtgtggttaccaataccgtgacaaaccacaaggtcctggggccacctacaccactaatattgagaaatgatggagtgatgggtgaatatgagcccaaaatagaagtgcagttcccagaaacagttccgactgcaaaaggagcaacggtgaagctggaatgctttgctttaggaaatccagtaccaactattatctggcgaagagctgatggaaagccaatagcaaggaaagccagaagacacaagtcaaatggaattcttgagatccctaattttcagcaggaggatgctggtttatatgaatgtgtagctgaaaattccagagggaaaaatgtagcaaggggacagctaactttctatgctcaacctaattggattcaaaaaataaatgatattcacgtggccatggaagaaaatgtcttttgggaatgtaaagcaaatggaaggcctaagcctacatacaagtggctaaaaaatggcgaacctctgctaactcgggatagaattcaaattgagcaaggaacactcaacataacaatagtgaacctctcagatgctggcatgtatcagtgtttggcagagaataaacatggagttatcttttccaacgcagagcttagtgttatagctgtaggtccagatttttcaagaacactcttgaaaagagtaactcttgtcaaagtgggaggtgaagttgtcattgagtgtaagccaaaagcgtctccaaaacctgtttacacctggaagaaaggaagggatatattaaaagaaaatgaaagaattaccatttctgaagatggaaacctcagaatcatcaacgttactaaatcagacgctgggagttatacctgtatagccactaaccattttggaactgctagcagtactggaaacttggtagtgaaaggtaatggctaacccaaagaattcgaatatttatatatgtgtcctcgtgtctaataatgtaatctaccgaagtggcatcattcatattaatatgtacagataccactgtattgctaaattaattcatcacggcaaacatgatatgattaataattcttagaaaactgctggtaatgaatatgattgaaaggctatcttatttcagaatcatccaatacaattttgagaattatagccattgtatctcttatagtattgtaacgaatgttatcttcaatcctttaattaaatttctttcaagtctctatagatttgaaattcatgtctaggaacactattccaacaaattaaaaactcaagactcatgtactatttttagaaaacattgtttaaacaatgacattggtaatttttaagatagctgtcccatttattcagagatatggatatggcttattatactaatagaaggctttgatcacctctatgctttgccttagtcacccagccaaccttgtcagttttaaggaaataaaattccc

SEQ ID NO: 4453 - DNA, 2637 bp, Homo sapiens
  source 1..2637: mol_type = unassigned DNA
ctgcgtggatgatcagtgtagtggaagcagggacttgctgagagctgaaatctctgtttgatttgctgtaacatgtaaagcgaaactgggacattttactttacagtctattaaaggttatacaaaacttaaaagaagcagcaattctattcgcttgttattggacttgaaactccctttgacctcggaaactgaagatgaggttgccatgggaactgctggtactgcaatcattcattttgtgccttgcagatgattccacactgcatggcccgatttttattcaagaaccaagtcctgtaatgttccctttggattctgaggagaaaaaagtgaagctcaattgtgaagttaaaggaaatccaaaacctcatatcaggtggaagttaaatggaacagatgttgacactggtatggatttccgctacagtgttgttgaagggagcttgttgatcaataaccccaataaaacccaagatgctggaacgtaccagtgcacagcgacaaactcgtttggaacaattgttagcagagaagcaaagcttcagtttgcttatcttgacaactttaaaacaagaacaagaagcactgtgtctgtccgtcgaggtcaaggaatggtgctactgtgtggcccgccaccccattctggagagctgagttatgcctggatcttcaatgaatacccttcctatcaggataatcgccgctttgtttctcaagagactgggaatctgtatattgccaaagtagaaaaatcagatgttgggaattatacctgtgtggttaccaataccgtgacaaaccacaaggtcctggggccacctacaccactaatattgagaaatgatggagtgatgggtgaatatgagcccaaaatagaagtgcagttcccagaaacagttccgactgcaaaaggagcaacggtgaagctggaatgctttgctttaggaaatccagtaccaactattatctggcgaagagctgatggaaagccaatagcaaggaaagccagaagacacaagtcaaatggaattcttgagatccctaattttcagcaggaggatgctggtttatatgaatgtgtagctgaaaattccagagggaaaaatgtagcaaggggacagctaactttctatgctcaacctaattggattcaaaaaataaatgatattcacgtggccatggaagaaaatgtcttttgggaatgtaaagcaaatggaaggcctaagcctacatacaagtggctaaaaaatggcgaacctctgctaactcgggatagaattcaaattgagcaaggaacactcaacataacaatagtgaacctctcagatgctggcatgtatcagtgtttggcagagaataaacatggagttatcttttccaacgcagagcttagtgttatagctgtaggtccagatttttcaagaacactcttgaaaagagtaactcttgtcaaagtgggaggtgaagttgtcattgagtgtaagccaaaagcgtctccaaaacctgtttacacctggaagaaaggaagggatatattaaaagaaaatgaaagaattaccatttctgaagatggaaacctcagaatcatcaacgttactaaatcagacgctgggagttatacctgtatagccactaaccattttggaactgctagcagtactggaaacttggtagtgaaagatccaacaagggtaatggtacccccttccagtatggatgtcactgttggagagagtattgttttaccgtgccaggtaacgcatgatcactcgctagacatcgtgtttacttggtcatttaatggacacctgatagactttgacagagatggggaccactttgaaagagttggagggcaggattcagctggtgatttgatgatccgaaacatccaactgaagcatgctgggaaatatgtctgcatggtccaaacaagtgtggacaggctatctgctgctgcagacctgattgtaagaggtcctccaggtcccccagaggctgtgacaatagacgaaatcacagataccactgctcagctctcctggagacccgggcctgacaaccacagccccatcaccatgtatgtcattcaagccaggactccattctccgtgggctggcaagcagtcagtacagtcccagaactcattgatgggaagacattcacagcgaccgtggtgggtttgaacccttgggttgaatatgaattccgcacagttgcagccaacgtgattgggattggggagcccagccgcccctcagagaaacggagaacagaagaagctcgtgagtagcacccgagattcagatcatctgttctgccagctgctgttccttaggaaaagcgtttgaattcttgctgctcttcagcgctcatgcggctctgtgttagctcacccttccctttaaatgtttataatgatagaaatcaggccaggagaagcccagctgaacacgcaacgggtttcaatcaagagttgttttcttcattaggtccacttgtacagcaagagacacacggtgcttagtcctctcaaaagccagccctttcttcattggttcatttgtcaccaagattctaacagaatttcaaaaaaaaatcccacatttcaaataaaattatctcacataagt

SEQ ID NO: 4454 - DNA, 528 bp, Homo sapiens
  source 1..528: mol_type = unassigned DNA
gaaactgggacattttactttacagtctattaaaggttatacaaaacttaaaagaagcagcaattctattcgcttgttattggacttgaaactccctttgacctcggaaactgaagatgaggttgccatgggaactgctggtactgcaatcattcattttgtgccttgcaggttcacagactgacttctggtccttgctgggggtgctgccagccttggaggctgatgattccacactgcatggcccgatttttattcaagaaccaagtcctgtaatgttccctttggattctgaggagaaaaaagtgaagctcaattgtgaagttaaaggaaatccaaaacctcatatcaggtggaagttaaatggaacagatgttgacactggtatggatttccgctacagtgttgttgaagggagcttgttgatcaataaccccaataaaacccaagatgctggaacgtaccagtgcacagcgacaaactcgtttggaacaattgttagcagagaagcaaagcttcagtttgctt

SEQ ID NO: 4455 - DNA, 575 bp, Homo sapiens
  source 1..575: mol_type = unassigned DNA
acaaaagggatacgggaagcacaaagtaaaggggtaggctaaagacaagcagaacaatacatagaagagagaaagggagacgtcaagcagcctgcgcctggaagttgttagtaaaattagtgaccaatgtgaaataagagggcttatattttcacttcatcataatccacagaagattaaccttcaatgggaaattttcttctagaagctgaaacacagcctgttgtgccttactattttttgttaatttctttctattattttccttatgttgttgtttcctgttgttgttcctatttggaagggattcttcattttggacattttctcttctcatttcagatgattccacactgcatggcccgatttttattcaagaaccaagtcctgtaatgttccctttggattctgaggagaaaaaagtgaagctcaattgtgaagttaaaggaaatccaaaacctcatatcaggtggaagttaaatggaacagatgttgacactggtatggatttccgctacagtgttgttgaagggagcttgttgatcaataaccccaataaaacccaagatgctgga

SEQ ID NO: 4456 - DNA, 568 bp, Homo sapiens
  source 1..568: mol_type = unassigned DNA
tttgagcattactcaatacatgttacatagtgcctgacacctgattagcaaactataaatgcttagcccttgacttaaagagagctgagttatgcctggatcttcaatgaatacccttcctatcaggataatcgccgctttgtttctcaagagactgggaatctgtatattgccaaagtagaaaaatcagatgttgggaattatacctgtgtggttaccaataccgtgacaaaccacaaggtcctggggccacctacaccactaatattgagaaatgatggagtgatgggtgaatatgagcccaaaatagaagtgcagttcccagaaacagttccgactgcaaaaggagcaacggtgaagctggaatgctttgctttaggaaatccagtaccaactattatctggcgaagagctgatggaaagccaatagcaaggaaagccagaagacacaagtcaaatggaattcttgagatccctaattttcagcaggaggatgctggtttatatgaatgtgtagctgaaaattccagagggaaaaatgtagcaaggggacagctaactttctatg

SEQ ID NO: 4457 - DNA, 565 bp, Homo sapiens
  source 1..565: mol_type = unassigned DNA
taagcatgcaggtatttttgagtacttttattaataaatcttacaaatttttctgcagtatacttccaaagagataatttaattttcctgatgactagcacttcatccccttctcctttttttccttaagactaccttaaaacaatacttttgaggggcaaagttgtatgcatggagaatttaatccaggcaaatggtgtggttctgcgacacaaatttttctgtagcagtaactgggagaagagccacaattcatgactgctggagataggacctgctttaaatgaaggaattaattgtgcacataatgatgtgtataagcattctgcattaacagaaaaatgagttttacattttatacattttaaaagaatctccaagacttagcccctttatttattcacaggagtgatgggtgaatatgagcccaaaatagaagtgcagttcccagaaacagttccgactgcaaaaggagcaacggtgaagctggaatgctttgctttaggaaatccagtaccaactattatctggcgaagagctgatggaaagccaatagcaaggaaag

SEQ ID NO: 4458 - DNA, 2322 bp, Homo sapiens
  source 1..2322: mol_type = unassigned DNA
gttctatgttcccagtgggaacataccagatggaggctttgatttgctcaacctaattggattcaaaaaataaatgatattcacgtggccatggaagaaaatgtcttttgggaatgtaaagcaaatggaaggcctaagcctacatacaagtggctaaaaaatggcgaacctctgctaactcgggatagaattcaaattgagcaaggaacactcaacataacaatagtgaacctctcagatgctggcatgtatcagtgtttggcagagaataaacatggagttatcttttccaacgcagagcttagtgttatagctgtaggtccagatttttcaagaacactcttgaaaagagtaactcttgtcaaagtgggaggtgaagttgtcattgagtgtaagccaaaagcgtctccaaaacctgtttacacctggaagaaaggaagggatatattaaaagaaaatgaaagaattaccatttctgaagatggaaacctcagaatcatcaacgttactaaatcagacgctgggagttatacctgtatagccactaaccattttggaactgctagcagtactggaaacttggtagtgaaagatccaacaagggtaatggtacccccttccagtatggatgtcactgttggagagagtattgttttaccgtgccaggtaacgcatgatcactcgctagacatcgtgtttacttggtcatttaatggacacctgatagactttgacagagatggggaccactttgaaagagttggagggcaggattcagctggtgatttgatgatccgaaacatccaactgaagcatgctgggaaatatgtctgcatggtccaaacaagtgtggacaggctatctgctgctgcagacctgattgtaagaggtcctccaggtcccccagaggctgtgacaatagacgaaatcacagataccactgctcagctctcctggagacccgggcctgacaaccacagccccatcaccatgtatgtcattcaagccaggactccattctccgtgggctggcaagcagtcagtacagtcccagaactcattgatgggaagacattcacagcgaccgtggtgggtttgaacccttgggttgaatatgaattccgcacagttgcagccaacgtgattgggattggggagcccagccgcccctcagagaaacggagaacagaagaagctctccccgaagtcacaccagcgaatgtcagtggtggcggaggcagcaaatctgaactggttataacctgggagacggtccctgaggaattacagaatggtcgaggctttggttatgtggtggccttccggccctacggtaaaatgatctggatgctgacagtgctggcctcagctgatgcctctagatacgtgttcaggaatgagagcgtgcaccccttctctccctttgaggttaaagtaggtgtcttcaacaacaaaggagaaggccctttcagtcccaccacggtggtgtattctgcagaagaagaacccaccaaaccaccagccagtatctttgccagaagtctttctgccacagatattgaagttttctgggcctccccactggagaagaatagaggacgaatacaaggttatgaggttaaatattggagacatgaagacaaagaagaaaatgctagaaaaatacgaacagttggaaatcagacatcaacaaaaatcacgaacttaaaaggcagtgtgctgtatcacttagctgtcaaggcatataattctgctgggacaggcccctctagtgcaacagtcaatgtgacaacccgaaagccaccaccaagtcaaccccccggaaacatcatatggaattcatcagactccaaaattatcctgaattgggatcaagtgaaggccctggataatgagtcggaagtaaaaggatacaaagtcttgtacagatggaacagacaaagcagcacatctgtcattgaaacaaataaaacatcggtggagctttctttgcctttcgatgaagattatataatagaaattaagccattcagcgacggaggagatggcagcagcagtgaacaaattcgaattccaaagatatcaaatgcctacgcgagaggatctggggcttccacttcgaatgcatgtacgctgtcagccatcagtacaataatgatttccctcacagctaggtccagtttatgacaaaagttatctgaaggacttgctgtttataatataagcaacatttagctagttgttttgaagacacccagtactaagtaatattgttgttcaagtacatcttattactggaataaaaatgttttttgcttcttt

SEQ ID NO: 4459 - DNA, 726 bp, Homo sapiens
  source 1..726: mol_type = unassigned DNA
aatgatattcacgtggccatggaagaaaatgtcttttgggaatgtaaagcaaatggaaggcctaagcctacatacaagtggctaaaaaatggcgaacctctgctaactcgggatagaattcaaattgagcaaggaacactcaacataacaatagtgaacctctcagatgctggcatgtatcagtgtttggcagagaataaacatggagttatcttttccaacgcagagcttagtgttatagctgtaggtccagatttttcaagaacactcttgaaaagagtaactcttgtcaaagtgggaggtgaagttgtcattgagtgtaagccaaaagcgtctccaaaacctgtttacacctggaagaaaggaagggatatattaaaagaaaatgaaagtgtacatcaggggtttggtagtggctctgctcctctctaaggccagcctggtggaccaagatgctctggacgttgccattgcagaaggaaaagagccaaacatgcatgggttcttaaagcctctacttagaagtgcaacacttgcactttcactcacatttcattggccaaaacaggtcacatgttcctgcaactcagcagggaaatataatcttgctatgtgcctggaagaaaagagacaacctaatattttgaacagtattaatgactgcttacaactgctacagcttaaccattgttacaagctaattaaattacctttggggaaatagta

SEQ ID NO: 4460 - DNA, 614 bp, Homo sapiens
  source 1..614: mol_type = unassigned DNA
gatattcacgtggccatggaagaaaatgtcttttgggaatgtaaagcaaatggaaggcctaagcctacatacaagtggctaaaaaatggcgaacctctgctaactcgggatagaattcaaattgagcaaggaacactcaacataacaatagtgaacctctcagatgctggcatgtatcagtgtttggcagagaataaacatggagttatcttttccaacgcagagcttagtgttatagctgtaggtccagatttttcaagaacactcttgaaaagagtaactcttgtcaaagtgggaggtgaagttgtcattgagtgtaagccaaaagcgtctccaaaacctgtttacacctggaagaaaggaagggatatattaaaagaaaatgaaagaattaccatttctgaagatggaaacctcagaatcatcaacgttactaaatcagacgctgggagttatacctgtatagccactaaccattttggaactgctagcagtactggaaacttggtagtgaaagaattacatccaggctgtattcaatccatatctacatctgtatcttaactgtgtatgtatctgttctcagatctgtaaataaatatccttatcacaaa

SEQ ID NO: 4461 - DNA, 3064 bp, Homo sapiens
  source 1..3064: mol_type = unassigned DNA
gaggatcttcagccaagatggtttttcttccttcagtgagatcttttgtctatttggcaatggaagaagattagtattagaggatacgtgttggaaatgtggtttttcaggagaccgatgtccagtgtttttttttttacaatcatttccaaccatttcagagctgggtctgccccatcaaagagcaagctctggactgcagatcctcattacgttttcaaccctgtccagtacatcataactgtttaagatagactgactgcaagccctaaatttaaaagactgttaacaaaacgccaaataagatgggtggagaaggatgtagacaagaatgttacaagggaaacaaaaacgatttttgcatttgagtgaaactactgtgatttctgaagaccaccttccttctttcccagacggtccctgaggaattacagaatggtcgaggctttggttatgtggtggccttccggccctacggtaaaatgatctggatgctgacagtgctggcctcagctgatgcctctagatacgtgttcaggaatgagagcgtgcaccccttctctccctttgaggttaaagtaggtgtcttcaacaacaaaggagaaggccctttcagtcccaccacggtggtgtattctgcagaagaagaacccaccaaaccaccagccagtatctttgccagaagtctttctgccacagatattgaagttttctgggcctccccactggagaagaatagaggacgaatacaaggttatgaggttaaatattggagacatgaagacaaagaagaaaatgctagaaaaatacgaacagttggaaatcagacatcaacaaaaatcacgaacttaaaaggcagtgtgctgtatcacttagctgtcaaggcatataattctgctgggacaggcccctctagtgcaacagtcaatgtgacaacccgaaagccaccaccaagtcaaccccccggaaacatcatatggaattcatcagactccaaaattatcctgaattgggatcaagtgaaggccctggataatgagtcggaagtaaaaggatacaaagtcttgtacagatggaacagacaaagcagcacatctgtcattgaaacaaataaaacatcggtggagctttctttgcctttcgatgaagattatataatagaaattaagccattcagcgacggaggagatggcagcagcagtgaacaaattcgaattccaaagatatcaaatgcctacgcgagaggatctggggcttccacttcgaatgcatgtacgctgtcagccatcagtacaataatgatttccctcacagctaggtccagtttatgacaaaagttatctgaaggacttgctgtttataatataagcaacatttagctagttgttttgaagacacccagtactaagtaatattgttgttcaagtacatcttattactggaataaaaatgttttttgcttctttaggaatggcattatacagtacttcctcaaagcaaatctagctttgtctgaagtttctttggaaactctgcaatgcactgaagacatctgtaatatgatgttaccaaagcagtttacatatgtccttatatgcatattttttattatatatttagtgttttatagaattttttaaagttaacatataatgtagatattaattttttcctcggctgtaaaatgctatgggcaacacaatcatgcaattataatttgaaaatatttcctttaaagacagagtttgaaactcatcttggtaaataaattgcaaattactcgtacagttttacaaggatctcatggcagaacagcggaagacttggtccgtaactcaaggctgttgtatgcaaactactcttctagtggttaatgcacttgacatgtacagtatgtttcccatgccgttgtgattttgacatgtacagtatgttttcatgccgttgtgaattttgttgttcaacccaacttgagatggtttcaggaatggctgcaatctcaaaagctcaatgtactgcccaagaggcaccttgtgcaatattcccatccctgaatttagcattgtacaggaagattttcttttcactcaactgagttagcattgtctttgtggtagcattatcttagacattaaatttgaagtaacatatatcctgtagtaacatagacccaaagttactatagtcaaccaagtctttcaaaggataaaagatcattttattatctttaactgtatctattttgaatgtaaatttaaaaaaagtaattctctgtcaatggattcgtaatttctttacaaaatttcttatatataatatgtgtatctctgtaataatagagcccttcttttgaatcaaaattacatatggactttggaagattgctcctatttcaacaaatagttgctgcaagaatttttaatatgactctataaaagctctttagtacaattgtatggtttcttgatgattctgttttgcaataggtagcctagttgctttatatgctttaccttctaggtcttaaaatcacacattggaaaatgacaatatcaacaaaactgtattcttatgaaaagaactatttgttacaatgagaaaggttttgtgagtaaaccctactggacagtgacataaaaggcaatggaattttctataaacattttctcatgtaaacatgctgccaccttttcttctttctcagagaactcaaatttgctatagtttgtcatttttgcttacaaataatataacttttcaaccttctagttatatttatccaataaagtcataatcgggattccatttgtgtaaaaactagggtggtaaccggaaaaaaatattgtcagtatttcaagctgtgttcctttcttagtttgatatggttacttctatgttgaaataaaatttaaaatcacatgcaaaaaaaaaatcagcaaaataataaaatgaacgaaaaaaaatgacacccagggagttcccaaccccagtgtaaatgatatttaccagtgatctagcatatgtaatcttttttaaaggtattgttaataaatattctgtcatt
